United States Patent Application Publication US 2023/0026259 A1 - sequence listing, part 52

SEQ ID NO: 145711 - DNA, 2443 bp, Homo sapiens
  Payload ID: 8895
  Gene Symbol: KHNYN
  Gene Name: KH and NYN domain containing
  Uniprot ID: O15037
  ENST ID: ENST00000556842
  CDS Start-End: 75-2111
aggaagtgactcaagaaacagtttgcgtgcgatgtggacaagagaggtccccgctggggctgggggcagcagccatgcctacctggggggcccgccccgcgtccccagatcgctttgcggtgtctgcggaggctgagaacaaggttcgggaacagcagccccatgtggagcgcatcttcagcgtgggggtgagcgtccttccgaaggactgtccggacaacccccacatctggctgcagctggagggccccaaggaaaacgccagcagagccaaggagtacctgaagggcctctgcagcccagaactgcaggatgaaatccactacccgcccaaactgcactgcatctttctgggagcccagggcttcttccttgactgcctggcctggagcacgtcagcccatctggtgcccagggcgccaggctcactgatgatcagtggcctgactgaagcctttgtcatggctcagagccgggtagaagagctggcagagcggctgagctgggacttcacgccaggaccatcttccggagcctctcagtgtactggagtgctgagagacttctctgccctgctgcagtccccgggggatgcccatagagaggctctgttgcagttgcccctggctgtccaggaggagctgctgagtctggtgcaggaggcgtctagtgggcaggggccaggagcactggcttcttgggaggggcggagctcagccttgctgggtgctcagtgccaaggagtgagagctccccctagtgacggcagggagtccctggacactggatctatgggacccggagattgcaggggagcaaggggagacacttacgctgtggagaaggagggagggaaacagggtggtcccagggagatggattgggggtggaaggagttgcctggggaagaggcgtgggagagagaagtggccctcaggccacagtcagtgggtggaggggcaagggagtcagcacccctgaaagggaaggccctggggaaggaggagatagctctgggaggaggagggttctgtgtccaccgtgagcctcccggtgcccatggctcctgtcacagggcagctcagtcccgaggagcctccctcctccagcggctccacaatgggaatgcctctcctccgagggtgcccagccctccacctgcaccggaacccccatggcactgtggagaccggggtgactgcggagaccggggagacgtgggggacaggggagacaagcagcagggcatggcacggggtcgggggcctcaatggaaacgaggcgcccgagggggcaacttggtgactggcacacagcgtttcaaggaggccctgcaggatcctttcaccctgtgccttgccaatgtgcctggccagccagacctccgccatattgtcattgacggcagcaacgtggccatggtgcatggcctccagcactacttctccagccggggcattgccattgctgtgcagtacttctgggaccgtggtcaccgtgacataactgtctttgtgcctcagtggcgcttcagtaaggatgccaaagtcagagagagtcacttcctgcaaaagctgtattccctcagcctgctctccctcacaccctcacgagtcatggatggcaagaggatctcctcctatgatgacaggttcatggtgaagctggctgaagagacagatgggataattgtctccaatgaccagttccgggacctggcggaggagtctgagaagtggatggcaatcatcagagaacgcctgctgccctttacctttgtgggaaacctcttcatggtacctgatgacccactggggcgaaacggccccaccctggatgaatttctgaagaagccagccaggacacaggggtcttctaaggctcagcatccttccaggggctttgcagaacatggtaaacagcagcaggggagagaagaggaaaaaggtagtggtggcattcggaagacccgggaaacagagcggctccggcggcagctgctggaggtgttttggggtcaggatcacaaagtggacttcatcctgcagcgggagccatactgccgggacatcaaccaactgtctgaggccctgctcagtcttaacttttgagcctcacctgcttgagtggctgccgccctgtcagctccagccgcctccagctcagccctttctgtgagagtccctctgctgctcactctgatccagaggcaccctgagttggtgctttggatcagggaagccactttgggacaggtccataaagtgaactgatcttaccgagtcaggacctcagccagctctcaagaggttctgctcagccttaacttctcaactttgccttagcacagggtttctgtagggagtgggggctgctagaggggattagttccggagactgagactgttggctccacctccaagctgagctagggtggagggca

SEQ ID NO: 145712 - DNA, 760 bp, Homo sapiens
  Payload ID: 8895
  Gene Symbol: KHNYN
  Gene Name: KH and NYN domain containing
  ENST ID: ENST00000554268
  CDS Start-End: 249-620
ccgtgacataactgtctttgtgcctcagtggcgcttcagtaaggatgccaaagtcagagagagtcacttcctgcaaaagctgtattccctcagcctgctctccctcacaccctcacgagtcatggatggcaagaggatctcctcctatgatgacagacaggttcatggtgaagctggctgaagagacagatgggataattgtctccaatgaccagttccgggacctggcggaggagtctgagaagtggatggcaatcatcagagaacgcctgctgccctttacctttgtgggaaacctcttcatggtacctgatgacccactggggcgaaacggccccaccctggatgaatttctgaagaagccagccaggacacaggggtcttctaaggctcagcatccttccaggggctttgcagaacatggtaaacagcagcaggggagagaagaggaaaaaggtagtggtggcattcggaagacccgggaaacagagcggctccggcggcagctgctggaggtgttttggggtcaggatcacaaagtggacttcatcctgcagcgggagccatactgccgggacatcaaccaactgtctgaggccctgctcagtcttaacttttgagcctcacctgcttgagtggctgccgccctgtcagctccagccgcctccagctcagccctttctgtgagagtccctctgctgctcactctgatccagaggcaccctgagttggtgctttggatcagggaagccactttggg

SEQ ID NO: 145713 - DNA, 1018 bp, Homo sapiens
  Payload ID: 8896
  Gene Symbol: KHDC3L
  Gene Name: KH domain containing 3-like, subcortical maternal complex member
  Uniprot ID: Q587J8
  ENST ID: ENST00000370367
  CDS Start-End: 54-707
tcggcctttgggtttgctgtggtgtccttgtctcctgcaggaccggccgcagcatggacgctcccaggcggtttccgacgctcgtgcaactgatgcagccaaaagcaatgccagtggaggtgctcggtcacctccctaagcggttctcctggttccactctgagttcctgaagaatccgaaggtagttcgccttgaggtttggctggtggaaaagatcttcggccggggcggagaacgcatcccgcacgtccagggtatgtcccaaatcttgattcacgtgaatcgattggaccctaacggcgaggctgagatcttggtatttgggaggccttcttaccaggaggacacaatcaagatgatcatgaacctggctgactatcaccgccagctccaggcgaaaggctcaggaaaggccctcgcccaggatgtcgccactcagaaggccgagacccagcggtcttcaatagaagtccgggaggccgggacgcagcgttcggtggaggtccgggaggccgggacccagcgttcggtggaagtccaggaggtcgggacacagggttctccggtggaggtgcaggaggccgggacccagcagtctctccaggctgccaacaagtcggggacccagcgatcccccgaagctgccagcaaggcagtgacccagcggtttcgcgaggatgcccgggacccagttactagattatgaaggcatctcaggccctggagccagagccagtcaggggttaaagtgaaagcccgtatttccgcccagaagctggggttggggagaggatgtggattttttgttttaccctttctgttgcatggttgcaaacacaaacttgagttctaataaagaattgcaaagtggaagcccgccccccgcctcccccccgcctcacttaagtccaggaagctggggtggcgaggaaggatgatgtggattgtttttgttttacaccttctgttgaatggttgccaacacaaacttgagttctaataaataattgcatttcc

SEQ ID NO: 145714 - DNA, 2757 bp, Homo sapiens
  Payload ID: 8897
  Gene Symbol: KHDRBS1
  Gene Name: KH domain containing, RNA binding, signal transduction associated 1
  Uniprot ID: Q07666
  ENST ID: ENST00000327300
  CDS Start-End: 168-1499
gctggctgcgcacgcgcgccgcctcatttccggtgctctctctcgctgggtcgctcgggtcggcttcggtcgctaccgctcccgctctgccacccccgccaaccgccgctcgggcctccgtcgctgccgcgtcgctttctcgctccttggatcgcacatcctcccagatgcagcgccgggacgaccccgccgcgcgcatgagccggtcttcgggccgtagcggctccatggacccctccggtgcccacccctcggtgcgtcagacgccgtctcggcagccgccgctgcctcaccggtcccggggaggcggagggggatcccgcgggggcgcccgggcctcgcccgccacgcagccgccaccgctgctgccgccctcggccacgggtcccgacgcgacagtgggcgggccagcgccgaccccgctgctgcccccctcggccacagcctcggtcaagatggagccagagaacaagtacctgcccgaactcatggccgagaaggactcgctcgacccgtccttcactcacgccatgcagctgctgacggcagaaattgagaagattcagaaaggagactcaaaaaaggatgatgaggagaattacttggatttattttctcataagaacatgaaactgaaagagcgagtgctgatacctgtcaagcagtatcccaagttcaattttgtggggaagattcttggaccacaagggaatacaatcaaaagactgcaggaagagactggtgcaaagatctctgtattgggaaagggctcaatgagagacaaagccaaggaggaagagctgcgcaaaggtggagaccccaaatatgcccacttgaatatggatctgcatgtcttcattgaagtctttggacccccatgtgaggcttatgctcttatggcccatgccatggaggaagtcaagaaatttctagtaccggatatgatggatgatatctgtcaggagcaatttctagagctgtcctacttgaatggagtacctgaaccctctcgtggacgtggggtgccagtgagaggccggggagctgcacctcctccaccacctgttcccaggggccgtggtgttggaccacctcggggggctttggtacgtggtacaccagtaaggggagccatcaccagaggtgccactgtgactcgaggcgtgccacccccacctactgtgaggggtgctccagcaccaagagcacggacagcgggcatccagaggatacctttgcctccacctcctgcaccagaaacatatgaagaatatggatatgatgatacatacgcagaacaaagttacgaaggctacgaaggctattacagccagagtcaaggggactcagaatattatgactatggacatggggaggttcaagattcttatgaagcttatggccaggacgactggaatgggaccaggccgtcgctgaaggcccctcctgctaggccagtgaagggagcatacagagagcacccatatggacgttattaaaaacaaacatgaggggaaaatatcagttatgagcaaagttgttactgatttcttgtatctcccaggattcctgttgctttacccacaacagacaagtaattgtctaagtgtttttcttcgtggtccccttcttctccccaccttattccattcttaactctgcattctggcttctgtatgtagtattttaaaatgagttaaaatagatttaggaatattgaattaattttttaagtgtgtagatgcttttttctttgttgtttaaatataaacagaagtgtaccttttataataaaaaaaagaagttgagtaaaaaaaaaaaacacacaaacctgttagtttcaaaaatgacattgcttgcttaaaggttctgaagtaaaggcttgttaagtttctcttagttttgatttgaggcatcccgtaaagttgtagttgcagaatcccaaactaggctacatttcaaaattcagggctgtttaagatttaaaatcacaaacattaacggcagtaggcaccaccatgtaaaagtgagctcagacgtctctaaaaaatgtttcctttataaaagcacatggcggttgaatcttaaggttaaattttaatatgaaagatcctcatgaattaaatagttgatgcaatttttaacgttaattgatataaaaaaaaaaacaacaaaattaggcttgtaaaactgactttttcattacgtgggttttgaaatctagccccagacatactgtgttgagagatacttagagggagggagtaggttttgaagaggttgatggtggtggggagggaaggcctcctgaattgagtttgatgcagagctttttagccatgaagaatctttcagtcatagtactaataattaaattttcagtatttaaaaagacaaagtattttgtccatttgagattctgcactccatgaaaagttcacttggacgctggggccaaaagctgttgattttcttaagttgacggttgtcaatatatcgaactgttcccaagttagtcaagtatgtctcaacactagcatgatataaaaagggacactgcagctgaatgaaaaaggaatcaaaatccactttgtacataagttaaagtcctaattggatttgtaccgtcctcccattttgttctcggaagattaaatgctacatgtgtaagtctgcctaaataggtagcttaaacttatgtcaaaatgtctgcagcagtttgtcaataaagtttagtccttttttaatcaaagtaaa

SEQ ID NO: 145715 - DNA, 1215 bp, Homo sapiens
  Payload ID: 8897
  Gene Symbol: KHDRBS1
  Gene Name: KH domain containing, RNA binding, signal transduction associated 1
  Uniprot ID: Q07666
  ENST ID: ENST00000492989
  CDS Start-End: 1-1215
atgcagcgccgggacgaccccgccgcgcgcatgagccggtcttcgggccgtagcggctccatggacccctccggtgcccacccctcggtgcgtcagacgccgtctcggcagccgccgctgcctcaccggtcccggggaggcggagggggatcccgcgggggcgcccgggcctcgcccgccacgcagccgccaccgctgctgccgccctcggccacgggtcccgacgcgacagtgggcgggccagcgccgaccccgctgctgcccccctcggccacagcctcggtcaagatggagccagagaacaagtacctgcccgaactcatggccgagaaggactcgctcgacccgtccttcactcacgccatgcagctgctgacggcagaaattgagaagattcagaaaggagactcaaaaaaggatgatgaggagaattacttggatttattttctcataagaacatgaaactgaaagagcgagtgctgatacctgtcaagcagtatcccaaggaggaagagctgcgcaaaggtggagaccccaaatatgcccacttgaatatggatctgcatgtcttcattgaagtctttggacccccatgtgaggcttatgctcttatggcccatgccatggaggaagtcaagaaatttctagtaccggatatgatggatgatatctgtcaggagcaatttctagagctgtcctacttgaatggagtacctgaaccctctcgtggacgtggggtgccagtgagaggccggggagctgcacctcctccaccacctgttcccaggggccgtggtgttggaccacctcggggggctttggtacgtggtacaccagtaaggggagccatcaccagaggtgccactgtgactcgaggcgtgccacccccacctactgtgaggggtgctccagcaccaagagcacggacagcgggcatccagaggatacctttgcctccacctcctgcaccagaaacatatgaagaatatggatatgatgatacatacgcagaacaaagttacgaaggctacgaaggctattacagccagagtcaaggggactcagaatattatgactatggacatggggaggttcaagattcttatgaagcttatggccaggacgactggaatgggaccaggccgtcgctgaaggcccctcctgctaggccagtgaagggagcatacagagagcacccatatggacgttattaa

SEQ ID NO: 145716 - DNA, 2332 bp, Homo sapiens
  Payload ID: 8898
  Gene Symbol: KHDRBS2
  Gene Name: KH domain containing, RNA binding, signal transduction associated 2
  Uniprot ID: Q5VWX1
  ENST ID: ENST00000281156
  CDS Start-End: 280-1329
gcgtcctgttcccgcctctccagttaaggccgctggtgtgagccggggctctgcgcgagcgagggacgacggaagggacgggcaggtgtgggcgcggggccacgcagcccgacggcgggagtcgcaggtgctgggtgcatgggccagtgaggacgcacagagatccctcgccgcgcggaggaggagcagcgcgggagccaggcgctgccccaagaccctgcctgcgtccgagcgagcggaacctcgcgcttcgcccggggacaatccgaagtccgcgctatggaagaggagaaatatttgcctgagctgatggcagagaaagatagcctggatccatcttttgtgcatgcgtcgcgccttttggcagaagaaattgaaaagtttcaaggttctgatggaaaaaaggaagacgaagaaaagaagtatcttgatgtcatcagcaacaaaaacataaagctctcagaaagagtactgattcctgtcaagcagtatccaaagttcaattttgtggggaaattgcttggaccaagaggaaactccttgaagaggctacaggaagaaacaggtgctaaaatgtctatcctgggcaaaggatcaatgagagataaagctaaggaagaagaactaaggaagagtggggaagccaaatatgcccacttgagtgatgagcttcatgtattaattgaagtgtttgctccacctggggaagcttattcacgtatgagtcatgcattggaagagattaaaaaattcctggttcctgactacaatgatgaaattcgtcaggaacaactacgtgaattatcttacttaaatggctcagaggactctggtcgtggcagaggtattagaggcagagggatcagaatagctcccacagctccttcaaggggccgtgggggtgccattcctcctcccccaccacctggacgaggtgttctcacccctcggggaagcactgtaacccgtggagcgcttccagtgccacctgtagcaagaggtgtccctacccctcgagcccggggggcaccaacagtgccaggatacagggcacctcctcctccagcccatgaagcttatgaagaatatggttatgatgatggctacgggggtgaatatgatgaccagacctatgagacttatgataacagctatgcgacccaaacacaaagtgtgcctgaatactatgactacggtcatggagtaagtgaggatgcctatgacagctacgcaccagaagaatgggccacaacccgctctagcttgaaggcaccaccgcaaaggtcagccagagggggatacagggaacacccctatggtagatattgaaggtccttcccacctgtgacctcacctcaaagacaattcatagcctgtggtctccacataaacagcaacaagacaagtaatagtcctttttttgtttgtttgtttctattctagggataactgctcatgattactcccatatatttctagtatttccctctgtactgttggcgtgacattgacactagtattattttacaaaacagactgaaaaagacattagcaagcatagtctataaacctttcagtaggatgatattctcttggttgtttttcattgttgtgtgtaatcttttttttttctttttcttttttttttttttgaggaaaagcatgaatttgttaacagattttgagtctcaaccaactagcagaaactttgtttagggttgctaaaagactgtaatatgatttttgaactagctgataataaagttgtagataagatgttttaacctgtcttttaatatctgttagttagacaaagatgtttgatattaagtttgtaaatttaattttaatgctgttttaatggggttgaaaacaagcagctactgtatgtatgtagctaactgaatttgttcagtgttttaacctgtatttgttaaaaaagaaaaaaaaacacacataaagttccatgtgtaagcttctctaaataggaaaccacaatttgtcaaatatgtttgccataatttgtcaataaagctgaaaacttttgtaaaaattaaatttggaattacttgttttctagctttaaatgcctgctttatttcttcttcaagagatgcctaaaatgttttctatttaaaaattacaaaaatgaacccaagtctgttttaagatatttgtgtaatacttaaaaatgtattaataacttatggttgttaaataatttaaaagttaacaaactaaactgttacatgaatcatggttagtaaacactaatgtataacatgttaatggaaaaaaatggatttagaataataaatggattttaaactat

SEQ ID NO: 145717 - DNA, 1977 bp, Homo sapiens
  Payload ID: 8899
  Gene Symbol: KHDRBS3
  Gene Name: KH domain containing, RNA binding, signal transduction associated 3
  Uniprot ID: O75525
  ENST ID: ENST00000355849
  CDS Start-End: 411-1451
gagtgcgcggggcggcgcgcggcgtgcaggtcgcagctgtggctcgggtgctggcaggtgctggcgggactggcggggatcgccgtggactgcctcaggggcgccgcagcccgctcggcccgagggcccgcctaaccgcgccgcccgcgcccgctcctcctcggcccgcgcccggagcgcgggggccgccggcgctgggtactcggcggccaccggggatcggggctgagcggtcggttcccgcccccgtgccgccgccgccgccttccggccgaccgcccggcttggccgctgctgccgcgtctggcccccgggtccccgccgctgggggcgcgggcggggtcgggggttgccgggcgccgccccccgtgcgcctggagtccacatcccgggcccggcggccggcgagcatggaggagaagtacctgcccgagctgatggcggagaaggactccctggacccctccttcacgcacgccctgcgcctggtgaaccaagaaatagaaaagtttcaaaaaggagaaggcaaggatgaagaaaagtacatcgatgtggtgattaataagaacatgaagctgggacagaaagtgttaattcccgtaaaacagttccctaagttcaactttgtggggaaacttttgggtccacgtggcaattctctgaagcgtttacaagaagaaaccttgacaaaaatgtccatccttgggaaaggttccatgagagacaaggccaaggaagaagagttgaggaaaagtggagaagcgaagtacttccatctcaatgatgatctccatgttctcattgaagtgtttgccccacctgcagaagcttatgccaggatgggacatgctttggaagaaatcaaaaagttcctcatccctgattataatgatgagatcaggcaagcacagctccaggagttaacatatttgaatggtggttcagaaaatgcagatgttccagtggttcgagggaaacccaccttgcgtacaagaggtgtaccagccccagcaataaccaggggaaggggaggagttacagcccggccagttggagttgtagtaccacgagggacgccaactcccagaggagtcctgtccacccgagggccagtgagtcggggaagaggacttctcactcccagagcaagaggagtccccccaactgggtacagacctccaccgccacccccgacacaagagacttatggagaatatgactatgatgatggatatggcactgcttatgatgaacagagttatgattcctatgataacagctatagcaccccagcccaaagtggtgctgattactatgattacggacatggactcagtgaggagacttatgattcctacgggcaagaagagtggactaactcaagacacaaggcaccttcagcgaggacagcaaagggcgtctacagagaccagccatatggcagatactgattgtactgtctgatgttgtgaaatagccaatctccaccagtcctgtatactgttcaaagtaatttttttctatgaacaatccctttttaaataaatcagaatgcttaaaatctgaatggatggaacttaaaactactttgttgaaacatcaacctgggcagaaaaaaaaaaaaaaagacatgtaaaattttgttatttccagtctgtatatgaaaaaataggtcatcaaaaggaaaaaaaataactttgattaactagtgttaaacaaaaaataggtttactaaatatgttaatctattcttttaacataagcctcacctttcattttaaaggtttccatagaatttagttattttatctttcagccatatgctagtttttttttctcttgccaacatgcgtaaaaagggaagccaattacaagtgcaaataatgtggtattcttttgtaactcaagtcttgaaatgttctgtagtgttaagcaaagtctcctcttgcttgatactaaataaacttttgaaagaaa

SEQ ID NO: 145718 - DNA, 585 bp, Homo sapiens
  Payload ID: 8899
  Gene Symbol: KHDRBS3
  Gene Name: KH domain containing, RNA binding, signal transduction associated 3
  ENST ID: ENST00000524282
  CDS Start-End: 1-585
gtttacaagaagaaaccttgacaaaaatgtccatccttgggaaaggttccatgagagacaaggccaaggaagaagagttgaggaaaagtggagaagcgaagtacttccatctcaatgatgatctccatgttctcattgaagtgtttgccccacctgcagaagcttatgccaggatgggacatgctttggaagaaatcaaaaagttcctcatccctgattataatgatgagatcaggcaagcacagctccaggagttaacatatttgaatggtggttcagaaaatgcagatgttccagtggttcgagggaaacccaccttgcgtacaagaggtgtaccagccccagcaataaccaggggaaggggaggagttacagcccggccagttggagttgtagtaccacgagggacgccaactcccagaggagtcctgtccacccgagggccagtgagtcggggaagaggacttctcactcccagagcaagaggagtccccccaactgggtacagacctccaccgccacccccgacacaagagacttatggagaatatggcaagaagagtggactaactcaagacacaaggc

SEQ ID NO: 145719 - DNA, 1066 bp, Homo sapiens
  Payload ID: 8899
  Gene Symbol: KHDRBS3
  Gene Name: KH domain containing, RNA binding, signal transduction associated 3
  ENST ID: ENST00000517859
  CDS Start-End: 1-589
tttgggtccacgtggcaattctctgaagcgtttacaagaagaaaccttgacaaaaatgtccatccttgggaaaggttccatgagagacaaggccaaggaagaagagttgaggaaaagtggagaagcgaagtacttccatctcaatgatgatctccatgttctcattgaagtgtttgccccacctgcagaagcttatgccaggatgggacatgctttggaagaaatcaaaaagttcctcatccctgattataatgatgagatcaggcaagcacagctccaggagttaacatatttgaatggtggttcagaaaatgcagatgttccagtggttcgagggaaacccaccttgcgtacaagaggtgtaccagccccagcaataaccaggggaaggggaggagttacagcccggccagttggagttgtagtaccacgagggacgccaactcccagaggagtcctgtccacccgagggccagtgagtcggggaagaggacttctcactcccagagcaagaggagtccccccaactgggtacagacctccaccgccacccccgacacaagagacttatggagaatattggtgctgattactatgattacggacatggactcagtgaggagacttatgattcctacgggcaagaagagtggactaactcaagacacaaggcaccttcagcgaggacagcaaagggcgtctacagagaccagccatatggcagatactgattgtactgtctgatgttgtgaaatagccaatctccaccagtcctgtatactgttcaaagtaatttttttctatgaacaatccctttttaaataaatcagaatgcttaaaatctgaatggatggaacttaaaactactttgttgaaacatcaacctgggcagaaaaaaaaaaaaaaagacatgtaaaattttgttatttccagtctgtatatgaaaaaataggtcatcaaaaggaaaaaaaataactttgattaactagtgttaaacaaaaaataggtttactaaatatgttaatctattcttttaacataagcctcacctttcattttaaaggtt

SEQ ID NO: 145720 - DNA, 1243 bp, Homo sapiens
  Payload ID: 8899
  Gene Symbol: KHDRBS3
  Gene Name: KH domain containing, RNA binding, signal transduction associated 3
  ENST ID: ENST00000520981
  CDS Start-End: 358-717
cctgtgtccaggctccaacagccctggcggggcagtcagccctcccaggggatgggcagcccatgccaagccttgcaggctggcccttggagaagtcagtaggggagaagaggccggcaaaagagcaccgttccggagggcgttgggttgggtgaccctcattggtggctggcttgaggttcggaatagtggtgaagggagtccttgccattttcacacgactccagccagctcagggtgtgaaagatcctaggaagtactgcgggtcagggatacagagatttctggaggcacgcctacccgggacagtgttcccctggctttttcctcctgtggcttcctgaatcatctgctggcatgcacgaaatagaaaagtttcaaaaaggagaaggcaaggatgaagaaaagtacatcgatgtggtgattaataagaacatgaagctgggacagaaagtgttaattcccgtaaaacagttccctaaggactatgatgatggatatggcactgcttatgatgaacagagttatgattcctatgataacagctatagcaccccagcccaaagtggtgctgattactatgattacggacatggactcagtgaggagacttatgattcctacgggcaagaagagtggactaactcaagacacaaggcaccttcagcgaggacagcaaagggcgtctacagagaccagccatatggcagatactgattgtactgtctgatgttgtgaaatagccaatctccaccagtcctgtatactgttcaaagtaatttttttctatgaacaatccctttttaaataaatcagaatgcttaaaatctgaatggatggaacttaaaactactttgttgaaacatcaacctgggcagaaaaaaaaaaaaaaagacatgtaaaattttgttatttccagtctgtatatgaaaaaataggtcatcaaaaggaaaaaaaataactttgattaactagtgttaaacaaaaaataggtttactaaatatgttaatctattcttttaacataagcctcacctttcattttaaaggtttccatagaatttagttattttatctttcagccatatgctagtttttttttctcttgccaacatgcgtaaaaagggaagccaattacaagtgcaaataatgtggtattcttttgtaactcaagtcttgaaatgttctgtagtgttaagcaaagtctcctcttgcttgatactaaataaacttttgaaagaaa

SEQ ID NO: 145721 - DNA, 793 bp, Homo sapiens
  Payload ID: 8899
  Gene Symbol: KHDRBS3
  Gene Name: KH domain containing, RNA binding, signal transduction associated 3
  ENST ID: ENST00000521461
  CDS Start-End: 1-179
ataacagctatagcaccccagcccaaagtggtgctgattactatgattacggacatggactcagtgaggagacttatgattcctacgggcaagaagagtggactaactcaagacacaaggcaccttcagcgaggacagcaaagggcgtctacagagaccagccatatggcagatactgattgtactgtctgatgttgtgaaatagccaatctccaccagtcctgtatactgttcaaagaaatgtcagccatcttggaatgtcacaggaactggttgaacacctgaagcaaacaaaggaactttccttctatttatgcactgcttaagaaccgtcaactcaccaacgtgcctagtcagcaaatgaatccacttgggaacttgaaaaacatcttaattaatttttgtttgcataattttgtgttctgtgacatgtttttattatatggtatgcttttaatttggagaacctacttttttaaaaaacggaaagaaaatctatcttattttgttgactcccaataacaaaaagagaatgatttgtatagtagttaataaaggctgcctattgaaatctcttctactttaaacctagaaaaacaaagtcttgttatttcagcacagctctaaattgtatacacttgaaaaccatgtacagctgcaactcactgcaagaagtcaagattctacacatattccacatttgaaaatgatttatccatctcagttatggactaataaatatgaaagtattatgcaaaaagtattctgtcacataaaaggttaattataaagg

SEQ ID NO: 145722 - DNA, 679 bp, Homo sapiens
  Payload ID: 8899
  Gene Symbol: KHDRBS3
  Gene Name: KH domain containing, RNA binding, signal transduction associated 3
  ENST ID: ENST00000517394
  CDS Start-End: 198-679
attggtggctggcttgaggttcggaatagtggtgaagggagtccttgccattttcacacgactccagccagctcagggtgtgaaagatcctaggaagtactgcgggtcagggatacagagatttctggaggcacgcctacccgggacagtgttcccctggctttttcctcctgtggcttcctgaatcatctgctggcatgcacgaaatagaaaagtttcaaaaaggagaaggcaaggatgaagaaaagtacatcgatgtggtgattaataagaacatgaagctgggacagaaagtgttaattcccgtaaaacagttccctaagttcaactttgtggggaaacttttgggtccacgtggcaattctctgaagcgtttacaagaagaaaccttgacaaaaatgtccatccttgggaaaggttccatgagagacaaggccaaggaagaagagttgaggaaaagtggagaagcgaagtacttccatctcaatgatgatctccatgttctcattgaagtgtttgccccacctgcagaagcttatgccaggatgggacatgctttggaagaaatcaaaaagttcctcatccctgattataatgatgagatcaggcaagcacagctccaggagttaacatatttgaatggtggttcagaaaatgcagatgttccagtggttcgagg

SEQ ID NO: 145723 - DNA, 889 bp, Homo sapiens
  Payload ID: 8899
  Gene Symbol: KHDRBS3
  Gene Name: KH domain containing, RNA binding, signal transduction associated 3
  ENST ID: ENST00000524199
  CDS Start-End: 94-889
ggtcgtttgcacggggacctgggaggctgtgggacacctaggggaagaccctgatgtgaattttggggacttggaaggagaaggctggggcgcatggaaatagaaaagtttcaaaaaggagaaggcaaggatgaagaaaagtacatcgatgtggtgattaataagaacatgaagctgggacagaaagtgttaattcccgtaaaacagttccctaagttcaactttgtggggaaacttttgggtccacgtggcaattctctgaagcgtttacaagaagaaaccttgacaaaaatgtccatccttgggaaaggttccatgagagacaaggccaaggaagaagagttgaggaaaagtggagaagcgaagtacttccatctcaatgatgatctccatgttctcattgaagtgtttgccccacctgcagaagcttatgccaggatgggacatgctttggaagaaatcaaaaagttcctcatccctgattataatgatgagatcaggcaagcacagctccaggagttaacatatttgaatggtggttcagaaaatgcagatgttccagtggttcgagggaaacccaccttgcgtacaagaggtgtaccagccccagcaataaccaggggaaggggaggagttacagcccggccagttggagttgtagtaccacgagggacgccaactcccagaggagtcctgtccacccgagggccagtgagtcggggaagaggacttctcactcccagagcaagaggagtccccccaactgggtacagacctccaccgccacccccgacacaagagacttatggagaatatgactatgatgatggatatggcactgcttatgatgaacagagttatgattcctatgataacagctatagcaccc

SEQ ID NO: 145724 - DNA, 1134 bp, Homo sapiens
  Payload ID: 8900
  Gene Symbol: KHDC1
  Gene Name: KH homology domain containing 1
  Uniprot ID: Q4VXA5
  ENST ID: ENST00000257765
  CDS Start-End: 425-919
gcgcgcctcgcgcggccgcggcgcgagccgggacccctggaagggtcgggtgcgcggcccaggaggtaccgctgtctcctcacaatcggccaggcctgcagccgctgccgccgctgccgccgccgccgccgccgccgccgccgccctactcagggagtggcccaggcctgcggcgcgccaccctcacctccttcattcctaccgtcaaagcccagccttggctacctgacccccctgtggtctcgaactcggttagtccggtgaagggacagagaagcctgggttcccggcggcatcactgagatgctcagtcctgaattctgccctccattaggattatctgctttgtgggataatttcctcattggttgagtcagtgagttgcgtgtctgcaagagagcatcctatctggtcggagcagagcatggacatgggaacgagtgctctcagcaagaagccgtggtggaccctgcctcaaaactttcatgcaccaatggtgtttcacatggaagaggaccaggaggagctcatcttcgggcatggtgacacataccttcgctgcattgaggtgcacagccacacccttattcagctggagagttggttcacagctacaggccagactcgtgtgactgtagtcggaccacacagggcaaggcagtggctgctgcacatgttttgttgtgtggggagccaggactcctatcatcatgctcgaggcctggagatgctggaacgtgtccgaagccagcctctgaccaacgatgacctggtcacctccattagtgtgccaccatacactggagacctgtctttggctcccaggataagtggaaccgtgtgtcttagcgttcctcagccttccccttaccaagtgattggttgttcgggtttccatttgagttcactgtatccgtaattaaggactgatctcccctgggaagtggggatgagaggagaaatcttggcttcacttttggtgagaaagacatgatagacactgaggaaagtttgaacttgtggccgggacctgtccctctcaggtcttctagacatgtctgagggaagtctcttgaatgtaagaaagtgttattggcaaagcaatccaataaaataagctacctatgatgcaaa

SEQ ID NO: 145725 - DNA, 1430 bp, Homo sapiens
  Payload ID: 8900
  Gene Symbol: KHDC1
  Gene Name: KH homology domain containing 1
  Uniprot ID: Q4VXA5
  ENST ID: ENST00000370384
  CDS Start-End: 502-1215
ggcggaagaggcgggtccagggcggtgtaattaaggcgcggagcccagaccctcctgctacagtgcctcgggctttcctggaggcgggcggcgggatgctgctccgttctccgggtcctctcctccggttcttgtcgtttggtcacgccctcagttcagtcggttattggaaaacgatcaaggcccaaagatggtttacgtggcgttgtggatgttatcaccgttgtttggtgaccgagcctggagcttgagccctgggacgtcttgccagccgcatgtggtcccgtgcccacttctcgcggtggcgcgttaatccacctagactgtgcattggtccagtctgggttgaccccgacccgaagtggccctttccttcgcgtcctgaacttcgcttctccgtcggtgtctggtctcttcccgccggcgggctctgcggtggcgggaggagctgtactactcgtgccttagcgcacccttactttcccaggccagaaacgcgaaatgctgtcggccttccagaggctgttccgagtcttatttgtgattgaaacagtctcagaatacggagtcctgatcttcatttatggatggccctttctccagacccttgcgatgctcctgatcgggacagtgtctttccacctttggatccgcagaaatcgagagagaaactcaaggagcggaaagactagatgccgatccaaaaggtcggagcagagcatggacatgggaacgagtgctctcagcaagaagccgtggtggaccctgcctcaaaactttcatgcaccaatggtgtttcacatggaagaggaccaggaggagctcatcttcgggcatggtgacacataccttcgctgcattgaggtgcacagccacacccttattcagctggagagttggttcacagctacaggccagactcgtgtgactgtagtcggaccacacagggcaaggcagtggctgctgcacatgttttgttgtgtggggagccaggactcctatcatcatgctcgaggcctggagatgctggaacgtgtccgaagccagcctctgaccaacgatgacctggtcacctccattagtgtgccaccatacactggagacctgtctttggctcccaggataagtggaaccgtgtgtcttagcgttcctcagccttccccttaccaagtgattggttgttcgggtttccatttgagttcactgtatccgtaattaaggactgatctcccctgggaagtggggatgagaggagaaatcttggcttcacttttggtgagaaagacatgatagacactgaggaaagtttgaacttgtggccgggacctgtccctctcaggtcttctagacatgtctgagggaagtctcttgaatgtaagaaagtgttattggcaaagcaatccaataaaataagctacctatgatgcaaa

SEQ ID NO: 145726 - DNA, 547 bp, Homo sapiens
  Payload ID: 8900
  Gene Symbol: KHDC1
  Gene Name: KH homology domain containing 1
  ENST ID: ENST00000433730
  CDS Start-End: 253-547
cggccgcggcgcgagccgggacccctggaagggtcgggtgcgcggcccaggaggtaccgctgtctcctcacaatcggccaggcctgcagccgctgccgccgctgccgccgccgccgccgccgccgccgccgccctactcagggagtggcccaggcctgcggcgcgccaccctcacctccttcattcctaccgtcaaagcccagccttggctacctgacccccctgtggtctcgaactcggtcggagcagagcatggacatgggaacgagtgctctcagcaagaagccgtggtggaccctgcctcaaaactttcatgcaccaatggtgtttcacatggaagaggaccaggaggagctcatcttcgggcatggtgacacataccttcgctgcattgaggtgcacagccacacccttattcagctggagagttggttcacagctacaggccagactcgtgtgactgtagtcggaccacacagggcaaggcagtggctgctgcacatgttttgttgtgtggggagccaggactcctatcatcatgctcgag

SEQ ID NO: 145727 - DNA, 1101 bp, Homo sapiens
  Payload ID: 8900
  Gene Symbol: KHDC1
  Gene Name: KH homology domain containing 1
  Uniprot ID: Q4VXA5
  ENST ID: ENST00000610435
  CDS Start-End: 395-889
gcgcgcctcgcgcggccgcggcgcgagccgggacccctggaagggtcgggtgcgcggcccaggaggtaccgctgtctcctcacaatcggccgccgccgccgccgccgccgccgccctactcagggagtggcccaggcctgcggcgcgccaccctcacctccttcattcctaccgtcaaagcccagccttggctacctgacccccctgtggtctcgaactcggttagtccggtgaagggacagagaagcctgggttcccggcggcatcactgagatgctcagtcctgaattctgccctccattaggattatctgctttgtgggataatttcctcattggttgagtcagtgagttgcgtgtctgcaagagagcatcctatctggtcggagcagagcatggacatgggaacgagtgctctcagcaagaagccgtggtggaccctgcctcaaaactttcatgcaccaatggtgtttcacatggaagaggaccaggaggagctcatcttcgggcatggtgacacataccttcgctgcattgaggtgcacagccacacccttattcagctggagagttggttcacagctacaggccagactcgtgtgactgtagtcggaccacacagggcaaggcagtggctgctgcacatgttttgttgtgtggggagccaggactcctatcatcatgctcgaggcctggagatgctggaacgtgtccgaagccagcctctgaccaacgatgacctggtcacctccattagtgtgccaccatacactggagacctgtctttggctcccaggataagtggaaccgtgtgtcttagcgttcctcagccttccccttaccaagtgattggttgttcgggtttccatttgagttcactgtatccgtaattaaggactgatctcccctgggaagtggggatgagaggagaaatcttggcttcacttttggtgagaaagacatgatagacactgaggaaagtttgaacttgtggccgggacctgtccctctcaggtcttctagacatgtctgagggaagtctcttgaatgtaagaaagtgttattggcaaagcaatccaataaaataagctacctatgatgc

SEQ ID NO: 145728 - DNA, 632 bp, Homo sapiens
  Payload ID: 8900
  Gene Symbol: KHDC1
  Gene Name: KH homology domain containing 1
  ENST ID: ENST00000610330
  CDS Start-End: 45-431
gttgcttggacttggccctattctgtatcaggtcggagcagagcatggacatgggaacgagtgctctcagcaagaagccgtggtggaccctgcctcaaaactttcatgcaccaatggtgtttcacatggaagaggaccaggaggagctcatcttcgggcatggtgacacataccttcgctgcattgaggtgcacagccacacccttattcagctggagagttggttcacagctacaggccagactcgtgtgactgtagtcggaccacacagggcaaggcagtggctgctgcacatgttttgttgtgtggggagccaggactcctatcatcatgctcgaggcctggagatgctggaacgtgtccgaagccagcctctgaccaacgatgacctggtcacctccattagtgtgccaccatacactggagactgatctcccctgggaagtggggatgagaggagaaatcttggcttcacttttggtgagaaagacatgatagacactgaggaaagtttgaacttgtggccgggacctgtccctctcaggtcttctagacatgtctgagggaagtctcttgaatgtaagaaagtgttattggcaaagcaatccaataaaataagctacctatgatgc

SEQ ID NO: 145729 - DNA, 635 bp, Homo sapiens
  Payload ID: 8901
  Gene Symbol: KHDC1L
  Gene Name: KH homology domain containing 1-like
  Uniprot ID: Q5JSQ8
  ENST ID: ENST00000370388
  CDS Start-End: 45-431
gtttgttagactttcccctattctgaatcaggtgggagcacagcatggccgtgggaacgagtgctctcagcaaggagccgtggtggaccctgcccgaaaactttcattctccaatggtgttccacatggaagaggaccaggaggagctcatcttcggacttgatgacacgtaccttcgctgcattgagctgcacagccacacccttattcagctggagaggtgtttcacagctacaggccagacacgtgtgactgtagtcggaccaccaatggcaaagcagtggctgctgctcatgttccattgcgtggggagccaggactccaagtgtcacgctcgaggtctgaagatgctagagcgtgtccgaagccagcccctgaccaatgatgacctggtcacctccgttagcctgccaccgtacaccggagactgatctcccctgggaagaggggatgagaggagaagtcttggcttcgcttttggtgagaaagacatgaaaaacactgaagaaagtttgaatttgtggccagacctgcccctctcaggccttctaggcatgtgtctgagggaagtctcctgagtgttagaagtgttattggcaaagcaatccaataaaataagctacctatgatgcaaa

SEQ ID NO: 145730 - DNA, 2993 bp, Homo sapiens
  Payload ID: 8902
  Gene Symbol: KHSRP
  Gene Name: KH-type splicing regulatory protein
  Uniprot ID: Q92945
  ENST ID: ENST00000398148
  CDS Start-End: 94-2229
tgtggagcgaggccttgttcccgcgttgagccgccgccgccgccgccgcctcctcagcttcagcctccgcgccaggcccggccccgccgcgccatgtcggactacagcacgggaggacccccgcccgggccgccgccgcccgccggcgggggcgggggagccggaggcgccgggggaggccctccgccgggcccgccaggcgcgggggaccggggcggcggcggtcccggcggcggcggcccgggcggggggtcggccgggggcccctctcagccacccggcggaggcggcccgggaatccgcaaggacgctttcgccgacgccgtgcagcgggcccgccagattgcagccaaaattggaggcgatgctgccacgacagtgaataacagcactcctgattttggttttgggggccaaaagagacagttggaagatggagatcaaccggagagcaagaagctggcttcccagggagactcaatcagttctcaacttggacccatccatcctcccccaaggacttcaatgacagaagagtacagggtcccagacggcatggtgggcctgatcattggcagaggaggtgaacaaattaacaaaatccaacaggattcaggctgcaaagtacagatttctccagacagcggtggcctacccgagcgcagtgtgtccttgacaggagccccagaatctgtccagaaagccaagatgatgctggatgacattgtgtctcggggtcgtgggggccccccaggacagttccacgacaacgccaacgggggccagaacggcaccgtgcaggagatcatgatccccgcgggcaaggccggcctggtcattggcaagggcggggagaccattaagcagctgcaggaacgcgctggagtgaagatgatcttaattcaggacggatctcagaatacgaatgtggacaaacctctccgcatcattggggatccttacaaagtgcagcaagcctgtgagatggtgatggacatcctccgggaacgtgaccaaggcggctttggggaccggaatgagtacggatctcggattggcggaggcatcgatgtgccagtgcccaggcattctgttggcgtggtcattggccggagtggagagatgatcaagaagatccagaatgatgctggcgtgcggatacagttcaagcaagatgacgggacagggcccgagaagattgctcatataatggggcccccagacaggtgcgagcacgcagcccggatcatcaacgacctcctccagagcctcaggagtggtcccccaggtcctccagggggtccaggcatgcccccggggggccgaggccgaggaagaggccaaggcaattggggtccccctggcggggagatgaccttctccatccccactcacaagtgtgggctggtcatcggccgaggtggcgagaatgtgaaagccataaaccagcagacgggagccttcgtagagatctcccggcagctgccacccaacggggaccccaacttcaagttgttcatcatccggggttcaccccagcagattgaccacgccaagcagcttatcgaggaaaagatcgagggtcctctctgcccagttggaccaggcccaggtggcccaggccctgctggcccaatggggcccttcaatcctgggcccttcaaccaggggccacccggggctcccccacatgccggggggccccctcctcaccagtacccaccccagggctggggcaatacctacccccagtggcagccgcctgctcctcatgacccaagcaaagcagctgcagcggccgcggaccccaacgccgcgtgggccgcctactactcacactactaccagcagcccccgggccccgtccccggccccgcaccggcccctgcggccccaccggctcagggtgagccccctcagcccccacccaccggccagtcggactacactaaggcctgggaagagtattacaaaaagatcggccagcagccccagcagcccggagcacccccacagcaggactacacgaaggcttgggaggagtactacaagaagcaagcgcaagtggccaccggagggggtccaggagctcccccaggctcccagccagactacagtgccgcctgggcggaatattacagacagcaggccgcttactacggacagaccccaggtcctggcggcccccagccgccgcccacgcagcagggacagcagcaggctcaatgaatcgaatgaatgtgaacttcttcatctgtgaaaaatcttttttttttccattttgttctgtttgggggcttctgttttgtttggcgagagagcgatggctgccgtggggagtactggggagccctcgcggcaagcagggtgggggggacttgggggcatgccgggccctcactctctcgcctgttctgtgtctcacatgctttttctttcaaaattgggatccttccatgttgagccagccagagaagatagcgagatctaaatctctgccaaaaaaaaaaaaaaacttaaaaattaaaaacacaaagagcaaagcagaacttataaaattatatatatatatattaaaaagtctctattcttcaccccccagccttcctgaacctgcctctctgaggataaagcaattcattttctcccaccctcggccctcttgtttttaaaataaacttttaaaaaggaaaaaaaaaagtcactcttgctatttcttttttttagttagaggtggaacattccttggaccaggtgttgtattgcaggaccccttcccccagcagccaagccccctcttctctccctcccgccctggctcagctcccgcggccccgcccgtcccccctcccaggactggtctgttgtcttttcatctgttcaagaggagattgaaactgaaaacaaaatgagaacaacaaaaaaaattgtatggcagtttttactttttatcgctcgtttttaacttcacaaataaatgataacaaaacctc

SEQ ID NO: 145731 - DNA, 672 bp, Homo sapiens
  Payload ID: 8902
  Gene Symbol: KHSRP
  Gene Name: KH-type splicing regulatory protein
  ENST ID: ENST00000595258
  CDS Start-End: 324-672
aacgggtgacccccctgcagggagtaggggcgcactgggggtcaccaggagcggcgcctgggtgtgcaggcgccccggagctcggagacgcacttttgggaccccccccttagccccccggccttaggacatgcctggagattgcagccaaaattggaggcgatgctgccacgacagtgaataacagcactcctgattttggttttgggggccaaaagagacagttggaagatggagatcaaccggagagcaagaagctggcttcccagggagactcaatcagttctcaacttggacccatccatcctcccccaaggacttcaatgacagaagagtacagggtcccagacggcatggtgggcctgatcattggcagaggaggtgaacaaattaacaaaatccaacaggattcaggctgcaaagtacagatttctccagacagcggtggcctacccgagcgcagtgtgtccttgacaggagccccagaatctgtccagaaagccaagatgatgctggatgacattgtgtctcggggtcgtgggggccccccaggacagttccacgacaacgccaacgggggccagaacggcaccgtgcaggagatcatgatccccgcgggcaaggccggcctggtcattggcaagggcggggagaccattaagcagctgcagg

SEQ ID NO: 145732 - DNA, 379 bp, Homo sapiens
  Payload ID: 8902
  Gene Symbol: KHSRP
  Gene Name: KH-type splicing regulatory protein
  ENST ID: ENST00000594745
  CDS Start-End: 1-344
gggccgcctactactcacactactaccagcagcccccgggccccgtccccggccccgcaccggcccctgcggccccaccggctcagggtgagccccctcagcccccacccaccggccagtcggactacactaaggcctgggaagagtattacaaaaagatcggccagcagccccagcagcccggagcacccccacagcaggactacacgaaggcttgggaggagtactacaagaagcaagccccctcttctctccctcccgccctggctcagctcccgcggccccgcccgtcccccctcccaggactggtctgttgtcttttcatctgttcaagaggagattgaaactgaaaacaaaatgagaacaacaaaaaaaattg

SEQ ID NO: 145733 - DNA, 801 bp, Homo sapiens
  Payload ID: 8902
  Gene Symbol: KHSRP
  Gene Name: KH-type splicing regulatory protein
  ENST ID: ENST00000595548
  CDS Start-End: 295-801
gggcggtaggcgggggcctggccctcccgctgcgcctcgagtgggatcccaacgggtgacccccctgcagggagtaggggcgcactgggggtcaccaggagcggcgcctggattgcagccaaaattggaggcgatgctgccacgacagtgaataacagcactcctgattttggttttgggggccaaaagagacagttggaagatggagatcaaccggagagcaagaagctggcttcccagggagactcaatcagttctcaacttggacccatccatcctcccccaaggacttcaatgacagaagagtacagggtcccagacggcatggtgggcctgatcattggcagaggaggtgaacaaattaacaaaatccaacaggattcaggctgcaaagtacagatttctccagacagcggtggcctacccgagcgcagtgtgtccttgacaggagccccagaatctgtccagaaagccaagatgatgctggatgacattgtgtctcggggtcgtgggggccccccaggacagttccacgacaacgccaacgggggccagaacggcaccgtgcaggagatcatgatccccgcgggcaaggccggcctggtcattggcaagggcggggagaccattaagcagctgcaggaacgcgctggagtgaagatgatcttaattcaggacggatctcagaatacgaatgtggacaaacctctccgcatcattggggatccttacaaagtgcagcaagcctgtgagatggtgatggacatcctccgggaacgtgaccaaggcggctttggggac

SEQ ID NO: 145734 - DNA, 851 bp, Homo sapiens
  Payload ID: 8902
  Gene Symbol: KHSRP
  Gene Name: KH-type splicing regulatory protein
  ENST ID: ENST00000600480
  CDS Start-End: 1-530
ccaacgccgcgtgggccgcctactactcacactactaccagcagcccccgggccccgtccccggccccgcaccggcccctgcggccccaccggctcagggtgagccccctcagcccccacccaccggccagtcggactacactaaggcctgggaagagtattacaaaaagatcggccagcagccccagcagcccggagcacccccacagcaggactacacgaaggcttgggaggagtactacaagaagcaagcgcaagtggccaccggagggggtccaggagctcccccaggctcccagccagactacagtgccgcctgggcggaatattacagacagcaggccgcttactacggacagaccccaggtcctggcggcccccagccgccgcccacgcagcagggacagcagcaggcaagtgggaattgccaccctcctcctcctcctttctccttccaacccccggccaccgtccatcctgccttagtgggtagcgccggaaaccccttcccctgcggggtgtgcccttgatgcctgcagcgggggccgtgtggccggaggtctccgggagtccccacgcaccgccagggaagcattcgctgggtccagaggttaaacgaagaggcctccctgcgccggctgcttgttcctgtgtgccgctgtcgtgatgctggggagcgctgagactcgcaggcgggacttctgaactgctggggagtcggggggcaggcagacagcgcggacggtgggcaccggcccggccgccaccacctcgctcacaatctggccacttgggaagaaaacgtctattttttccccttctctgcatcacttttttggtttttgttcttt

SEQ ID NO: 145735 - DNA, 837 bp, Homo sapiens
  Payload ID: 8902
  Gene Symbol: KHSRP
  Gene Name: KH-type splicing regulatory protein
  ENST ID: ENST00000599395
  CDS Start-End: 1-837
cctctcagccacccggcggaggcggcccgggaatccgcaaggacgctttcgccgacgccgtgcagcgggcccgccagattgcagccaaaattggaggcgatgctgccacgacagtgaataacagcactcctgattttggttttgggggccaaaagagacagttggaagatggagatcaaccggagagcaagaagctggcttcccagggagactcaatcagttctcaacttggacccatccatcctcccccaaggacttcaatgacagaagagtacagggtcccagacggcatggtgggcctgaacagcggtggcctacccgagcgcagtgtgtccttgacaggagccccagaatctgtccagaaagccaagatgatgctggatgacattgtgtctcggggtcgtgggggccccccaggacagttccacgacaacgccaacgggggccagaacggcaccgtgcaggagatcatgatccccgcgggcaaggccggcctggtcattggcaagggcggggagaccattaagcagctgcaggaacgcgctggagtgaagatgatcttaattcaggacggatctcagaatacgaatgtggacaaacctctccgcatcattggggatccttacaaagtgcagcaagcctgtgagatggtgatggacatcctccgggaacgtgaccaaggcggctttggggaccggaatgagtacggatctcggattggcggaggcatcgatgtgccagtgcccaggcattctgttggcgtggtcattggccggagtggagagatgatcaagaagatccagaatgatgctggcgtgcggatacagttcaagcaag

SEQ ID NO: 145736 - DNA, 328 bp, Homo sapiens
  Payload ID: 8902
  Gene Symbol: KHSRP
  Gene Name: KH-type splicing regulatory protein
  ENST ID: ENST00000597656
  CDS Start-End: 1-239
cccagcagcccggagcacccccacagcaggactacacgaaggcttgggaggagtactacaagaagcaagcgcaagtggccaccggagggggtccaggagctcccccaggctcccagccagactacagtgccgcctgggcggaatattacagacagcaggccgcttactacggacagaccccaggtcctggcggcccccagccgccgcccacgcagcagggacagcagcagccttcctgaacctgcctctctgaggataaagcaattcattttctcccaccctcggccctcttgtttttaaaataaacttttaaaaaggaaaaaaaaaa

SEQ ID NO: 145737 - DNA, 999 bp, Homo sapiens
  Payload ID: 8902
  Gene Symbol: KHSRP
  Gene Name: KH-type splicing regulatory protein
  ENST ID: ENST00000594496
  CDS Start-End: 1-432
tactcacactactaccagcagcccccgggccccgtccccggccccgcaccggcccctgcggccccaccggctcagggccagcagccccagcagcccggagcacccccacagcaggactacacgaaggcttgggaggagtactacaagaagcaagcgcaagtggccaccggagggggtccaggagctcccccaggctcccagccagactacagtgccgcctgggcggaatattacagacagcaggccgcttactacggacagaccccaggtcctggcggcccccagccgccgcccacgcagcagggacagcagcaggcaagtgggaattgccaccctcctcctcctcctttctccttccaacccccggccaccgtccatcctgccttagtgggtagcgccggaaaccccttcccctgcggggtgtgcccttgatgcctgcagcgggggccgtgtggccggaggtctccgggagtccccacgcaccgccagggaagcattcgctgggtccagaggttaaacgaagaggcctccctgcgccggctgcttgttcctgtgtgccgctgtcgtgatgctggggagcgctgagactcgcaggcgggacttctgaactgctggggagtcggggggcaggcagacagcgcggacggtgggcaccggcccggccgccaccacctcgctcacaatctggccacttgggaagaaaacgtctattttttccccttctctgcatcacttttttggtttttgttctttttattcttttattttttaaacccatgatcttttttcctgtgtccaagtgactgtgttgcaggcggcctggctctggcagggactggtggggacgcggggagcggcccaggcccctgccccgccgggctcagcctcccatgcgctcgcgcttgcctgtgtcccgggcttgtctgtgaagtgggcgtgaagatcgttgccaccttccaacctacctcacaggggtgttgtggggacaccatgatctct

SEQ ID NO: 145738 - DNA, 956 bp, Homo sapiens
  Payload ID: 8902
  Gene Symbol: KHSRP
  Gene Name: KH-type splicing regulatory protein
  ENST ID: ENST00000595223
  CDS Start-End: 1-809
gcaattggggtccccctggcggggagatgaccttctccatccccactcacaagtgtgggctggtcatcggccgaggtggcgagaatgtgaaagccataaaccagcagacgggagccttcgtagagatctcccggcagctgccacccaacggggaccccaacttcaagttgttcatcatccggggttcaccccagcagattgaccacgccaagcagcttatcgaggaaaagatcgagggtcctctctgcccagttggaccaggcccaggtggcccaggccctgctggcccaatggggcccttcaatcctgggcccttcaaccaggggccacccggggctcccccacatgccggggggccccctcctcaccagtacccaccccagggctggggcaatacctacccccagtggcagccgcctgctcctcatgacccaagcaaagcagctgcagcggccgcggaccccaacgccgcgtgggccgcctactactcacactactaccagcagcccccgggccccgtccccggccccgcaccggcccctgcggccccaccggctcagggccagcagccccagcagcccggagcacccccacagcaggactacacgaaggcttgggaggagtactacaagaagcaagcgcaagtggccaccggagggggtccaggagctcccccaggctcccagccagactacagtgccgcctgggcggaatattacagacagcaggccgcttactacggacagaccccaggtcctggcggcccccagccgccgcccacgcagcagggacagcagcaggctcaatgaatcgaatgaatgtgaacttcttcatctgtgaaaaatcttttttttttccattttgttctgtttgggggcttctgttttgtttggcgagagagcgatggctgccgtggggagtactggggagccctcgcggcaagcagggtggggggg

SEQ ID NO: 145739 - DNA, 2226 bp, Homo sapiens
  Payload ID: 8902
  Gene Symbol: KHSRP
  Gene Name: KH-type splicing regulatory protein
  ENST ID: ENST00000619396
  CDS Start-End: 75-2210
cccgcgttgagccgccgccgccgccgccgcctcctcagcttcagcctccgcgccaggcccggccccgccgcgccatgtcggactacagcacgggaggacccccgcccgggccgccgccgcccgccggcgggggcgggggagccggaggcgccgggggaggccctccgccgggcccgccaggcgcgggggaccggggcggcggcggtcccggcggcggcggcccgggcggggggtcggccgggggcccctctcagccacccggcggaggcggcccgggaatccgcaaggacgctttcgccgacgccgtgcagcgggcccgccagattgcagccaaaattggaggcgatgctgccacgacagtgaataacagcactcctgattttggttttgggggccaaaagagacagttggaagatggagatcaaccggagagcaagaagctggcttcccagggagactcaatcagttctcaacttggacccatccatcctcccccaaggacttcaatgacagaagagtacagggtcccagacggcatggtgggcctgatcattggcagaggaggtgaacaaattaacaaaatccaacaggattcaggctgcaaagtacagatttctccagacagcggtggcctacccgagcgcagtgtgtccttgacaggagccccagaatctgtccagaaagccaagatgatgctggatgacattgtgtctcggggtcgtgggggccccccaggacagttccacgacaacgccaacgggggccagaacggcaccgtgcaggagatcatgatccccgcgggcaaggccggcctggtcattggcaagggcggggagaccattaagcagctgcaggaacgcgctggagtgaagatgatcttaattcaggacggatctcagaatacgaatgtggacaaacctctccgcatcattggggatccttacaaagtgcagcaagcctgtgagatggtgatggacatcctccgggaacgtgaccaaggcggctttggggaccggaatgagtacggatctcggattggcggaggcatcgatgtgccagtgcccaggcattctgttggcgtggtcattggccggagtggagagatgatcaagaagatccagaatgatgctggcgtgcggatacagttcaagcaagatgacgggacagggcccgagaagattgctcatataatggggcccccagacaggtgcgagcacgcagcccggatcatcaacgacctcctccagagcctcaggagtggtcccccaggtcctccagggggtccaggcatgcccccggggggccgaggccgaggaagaggccaaggcaattggggtccccctggcggggagatgaccttctccatccccactcacaagtgtgggctggtcatcggccgaggtggcgagaatgtgaaagccataaaccagcagacgggagccttcgtagagatctcccggcagctgccacccaacggggaccccaacttcaagttgttcatcatccggggttcaccccagcagattgaccacgccaagcagcttatcgaggaaaagatcgagggtcctctctgcccagttggaccaggcccaggtggcccaggccctgctggcccaatggggcccttcaatcctgggcccttcaaccaggggccacccggggctcccccacatgccggggggccccctcctcaccagtacccaccccagggctggggcaatacctacccccagtggcagccgcctgctcctcatgacccaagcaaagcagctgcagcggccgcggaccccaacgccgcgtgggccgcctactactcacactactaccagcagcccccgggccccgtccccggccccgcaccggcccctgcggccccaccggctcagggtgagccccctcagcccccacccaccggccagtcggactacactaaggcctgggaagagtattacaaaaagatcggccagcagccccagcagcccggagcacccccacagcaggactacacgaaggcttgggaggagtactacaagaagcaagcgcaagtggccaccggagggggtccaggagctcccccaggctcccaggaccccttcccccagcagccaagccccctcctccctcccgccctggctcagctcccgcggccccgcccgtcccccctcccaggactggtctgttgtcttttcatctgttcaagaggagattgaaactgaaaacaaaatg

SEQ ID NO: 145740 - DNA, 4564 bp, Homo sapiens
  Payload ID: 8903
  Gene Symbol: KIAA0040
  Gene Name: KIAA0040
  ENST ID: ENST00000423313
  CDS Start-End: 538-837
ccggggccctacacgccagacctggctcggggtgggagtgcagaggcaaccaaaaaggaacccacacctccctccagggcccggggcgctgtcagacggggcagcaaccaggagattccctgggcctgcaggaagcccttccgcggaccgaaagattgttccccattttggagatgaagaaactgagactcaaagcagctgagtgaccttcccaaggacacacactgaactgggcggtgatcaggatctgaatgcacagggcgggtgttcagcgattgtttactacgttgaacgtgacctccaggaaagcagttctggccgagatcccctgacaacgcaaagcaagaagtaacgtggaaggaggctccccaagctggctggccattttgctgctgtgtgtggaggtgctgccagtggcatgcccaaacccaaagctggaagaggaataaattacaagtggtcaaggttgcatccttttgagcccaggacctgcttgtaagccgagagggttctctggccctaatctagccaagcaccatggagagaatcagtgccttcttcagctctatctgggacaccatcttgaccaaacaccaagaaggcatctacaacaccatctgcctgggagtcctcctgggcctgccactcttggtgatcatcacactcctcttcatctgttgccattgctgctggagcccaccaggcaagaggggccagcagccagagaagaacaagaagaagaagaagaagaagaagaagaaggatgaagaagacctctggatctctgctcaacccaagcttctccagatggagaagagaccatcactgcctgtttagttaggcaggaagcagaggtgtttcctttctggggctaagcctccttctgaccacacacagacatttcaggaacccctgaaataatgcactatgtccatgtccacagagtaactactcaaccaaggaacaaacctcagactaagtgtcccagtggagggcagtcccagggaccacgtggacaattcttggatactgtcttggcagctatgtgtccaatagcaatgctccttactgcagacccaggcatgcctcccacctgtctctggcataccccacatgcaaagcacaaagaacatttatccatacatctcaatatggttcccaagtgtgtgcacatgcacgtaacacacacacacacaaattcaggtagcaggtacgtgggcaagtatattctgctcatcaaatggtcattggctatgtactttgtgcagggaagtacattatctacagtcacaaaaatgtctcatgggaaagccttgccagattcagacacatatatacaatttcctaaccagcaaggcccccatacaccatctattccataaaccactcaggttacagatgcatgctttcctatttctaactctacacataaacttttactggaagtactcataattggacattccagcaacctgctacagtccccacccttgtgtgtcttgatacagacacaccaagtttctgtgcctctgacccctcacctgtgccaagatgtttaaagtgtgatggttcaaaattcattgaaagctcttttcttgtaactcatgacaaagtccgtcctcattgccactgagaggtgtttaatgtgatccaagacctctctgtgaaacattacccccgcaaaccactcagcaaagtgcctttctccaagcaagaacaaagagctcttggtggtgactgctagaaaattatggaagcccactcatttatgtcagtggactgcaactgtgtacctgtgcaatgtttacagatggaaagggtgaggagatgctacacctgagctaggtatctcctatataaccaaagtttccagcagggaaggaactagacaatcatcagtgcagtctcacagaaggcaacactggaagtgatgtcataaggttgtgatgtgtgcacggtatggcacaggtgggatgcagaggtaacagagtttaaatgaaagtaggatgaagctataaagaggtttatttatatttatattgaagctcaggcaagtgccttgcacacagtaggtacttataactaactgtggttactgttggatatgtgatgttgttaagggtaagcttgtaatacctcaccagttctccccgagtgatcttctcttctaagtgagcccactaattgctgcaatggatgaaattgggtgtttaatgctggagagcacatgtaggtgacacatgtgccttgaggtatgtgaggacatgtaaattagatccacagtgagctgaggagggctttccccgccagagtgaggttgggaagcagagttaatccacttataggatgaactgcttggtatttttattgtattgtgactgtattacaaagatggacaattcactccttgggagcaagttatgctctagaagtttatttacaaatatgctgggcagctctcttgaaatattttcccaaggaagctattctacacagtggcaaaattgctatctaattaataatgtagctaaactatgatatttatagtagcaaaaaactaaattctataagattgcattaaaggaaagatatattctatttgctcacttgggctgcttggtactcacctgccctccaggtgtactttaggcctgtggagggtgggcatttagtggtgacccttgcaccagggttttctaacagatgaccctgtgaatcataatttaaacctgcatatattttatagccagtcacatttgccctctcaccctatatggccataaactgcctaagcactcaggcctcccactcatcaacccctttgaccagagaaagaagcactctggttctctatccccttgtcacatagagagtttgtcatggggcctctggctgtgcccttcacataacagaatgacttgccatctgcctgcaccaaacccagggatgtggaagacatctccccacaactgccactgctcaccaggacaagctgcccttcctgtctccacctctcagtccccctagaatggatggctggggagaggtggaggctgacagctgagacgtagtgtcagatatgatctaggagggcggatcaccgggatccgggaccatacaagtaacatggtttccatggcaactgcttgctcctttgaattaagacagcagtcagttgtcattgccatgacaaggcctctatctccaggcacaatgtccctgctgtctcctaatccaatggacttgctctcaccccagggatgaaacacccagaaactcacttctcagtcacttccacagccgatgactcagaagagccaaacccagaatggggcctctcttttccccatcacagactcccctgacaacctttcctggcgtaactagaggagtcccagtgcaggataggccctaaacgttttgttaaataaacaggtgcatgaaaggagcctaaggccattgttgatatccactctcttctttccacttccttctcatctttttctccatgttttatgcttctctgattccctcttctgcctgcaccagaccagccccagccctttattcctctccattttcactccttccagcctctgtccctgaactgccactggcaacccatgggacctcaggaccagagactgcttgactcatctggggagggtaagttcacgggggacaaaaaaatgattcctaaagaagaggcttcctagaccagcacaggctcgagaaagacatcccctaggcctggacttctgagcagctttagccaggctccggacggcagccagaggaggcctttccccattgctcctttccccattgctcaatggattccatgtttctttttcttggggggagcagggagggagaaaggtagaaaaatggcagccacctttccaagaaaaatataaagggtccaagctgtatagtatttgtcagtatttttttctgtaaaattcaaacacacacaaaagaaaaatttatttaaataaaatactttgaaaatgaaaagtcttgatgtagtcagatggttactctcttaacattaggtattacccccactcagacatcactcagaaatgatcaatgcagggactctttctgtgacacaaatgtcccagccctccctggtcaccgccttcgccatggtagagtcataggtctgaggatgaggaatgtggctgtctcacccttgcttgcaaaacagatggccttggagaccagactccctcaaaggtgccagctacaggaaaaatatactgatgttccttggcaacacttacagaactttccatcaatgaggtccatcaatggcttcttaaaggaaaaggggggaaatagcaaaaacctaaggaagaatggacctttgagttaaatccagtgtttgttgggaaaggagggatcaaaaacctctatagtagccactagggcaaaaactgtgtgtatgtgtgtgtgtaagtgtgtgtacactgttcaatatggttcaatatggtaccaatagccacatgtgactatttaaattcattgcaatgaaataaaattaaaggtatactagctc

SEQ ID NO: 145741 - DNA, 4494 bp, Homo sapiens
  Payload ID: 8903
  Gene Symbol: KIAA0040
  Gene Name: KIAA0040
  ENST ID: ENST00000444639
  CDS Start-End: 468-767
tggagcgaaacctcaactatgccaggcgtcggcccgtaggaaggcagggaacacagagggcgctgccctcggcggcagcggcagattgttccccattttggagatgaagaaactgagactcaaagcagctgagtgaccttcccaaggacacacactgaactgggcggtgatcaggatctgaatgcacagggcgggtgttcagcgattgtttactacgttgaacgtgacctccaggaaagcagttctggccgagatcccctgacaacgcaaagcaagaagtaacgtggaaggaggctccccaagctggctggccattttgctgctgtgtgtggaggtgctgccagtggcatgcccaaacccaaagctggaagaggaataaattacaagtggtcaaggttgcatccttttgagcccaggacctgcttgtaagccgagagggttctctggccctaatctagccaagcaccatggagagaatcagtgccttcttcagctctatctgggacaccatcttgaccaaacaccaagaaggcatctacaacaccatctgcctgggagtcctcctgggcctgccactcttggtgatcatcacactcctcttcatctgttgccattgctgctggagcccaccaggcaagaggggccagcagccagagaagaacaagaagaagaagaagaagaagaagaagaaggatgaagaagacctctggatctctgctcaacccaagcttctccagatggagaagagaccatcactgcctgtttagttaggcaggaagcagaggtgtttcctttctggggctaagcctccttctgaccacacacagacatttcaggaacccctgaaataatgcactatgtccatgtccacagagtaactactcaaccaaggaacaaacctcagactaagtgtcccagtggagggcagtcccagggaccacgtggacaattcttggatactgtcttggcagctatgtgtccaatagcaatgctccttactgcagacccaggcatgcctcccacctgtctctggcataccccacatgcaaagcacaaagaacatttatccatacatctcaatatggttcccaagtgtgtgcacatgcacgtaacacacacacacacaaattcaggtagcaggtacgtgggcaagtatattctgctcatcaaatggtcattggctatgtactttgtgcagggaagtacattatctacagtcacaaaaatgtctcatgggaaagccttgccagattcagacacatatatacaatttcctaaccagcaaggcccccatacaccatctattccataaaccactcaggttacagatgcatgctttcctatttctaactctacacataaacttttactggaagtactcataattggacattccagcaacctgctacagtccccacccttgtgtgtcttgatacagacacaccaagtttctgtgcctctgacccctcacctgtgccaagatgtttaaagtgtgatggttcaaaattcattgaaagctcttttcttgtaactcatgacaaagtccgtcctcattgccactgagaggtgtttaatgtgatccaagacctctctgtgaaacattacccccgcaaaccactcagcaaagtgcctttctccaagcaagaacaaagagctcttggtggtgactgctagaaaattatggaagcccactcatttatgtcagtggactgcaactgtgtacctgtgcaatgtttacagatggaaagggtgaggagatgctacacctgagctaggtatctcctatataaccaaagtttccagcagggaaggaactagacaatcatcagtgcagtctcacagaaggcaacactggaagtgatgtcataaggttgtgatgtgtgcacggtatggcacaggtgggatgcagaggtaacagagtttaaatgaaagtaggatgaagctataaagaggtttatttatatttatattgaagctcaggcaagtgccttgcacacagtaggtacttataactaactgtggttactgttggatatgtgatgttgttaagggtaagcttgtaatacctcaccagttctccccgagtgatcttctcttctaagtgagcccactaattgctgcaatggatgaaattgggtgtttaatgctggagagcacatgtaggtgacacatgtgccttgaggtatgtgaggacatgtaaattagatccacagtgagctgaggagggctttccccgccagagtgaggttgggaagcagagttaatccacttataggatgaactgcttggtatttttattgtattgtgactgtattacaaagatggacaattcactccttgggagcaagttatgctctagaagtttatttacaaatatgctgggcagctctcttgaaatattttcccaaggaagctattctacacagtggcaaaattgctatctaattaataatgtagctaaactatgatatttatagtagcaaaaaactaaattctataagattgcattaaaggaaagatatattctatttgctcacttgggctgcttggtactcacctgccctccaggtgtactttaggcctgtggagggtgggcatttagtggtgacccttgcaccagggttttctaacagatgaccctgtgaatcataatttaaacctgcatatattttatagccagtcacatttgccctctcaccctatatggccataaactgcctaagcactcaggcctcccactcatcaacccctttgaccagagaaagaagcactctggttctctatccccttgtcacatagagagtttgtcatggggcctctggctgtgcccttcacataacagaatgacttgccatctgcctgcaccaaacccagggatgtggaagacatctccccacaactgccactgctcaccaggacaagctgcccttcctgtctccacctctcagtccccctagaatggatggctggggagaggtggaggctgacagctgagacgtagtgtcagatatgatctaggagggcggatcaccgggatccgggaccatacaagtaacatggtttccatggcaactgcttgctcctttgaattaagacagcagtcagttgtcattgccatgacaaggcctctatctccaggcacaatgtccctgctgtctcctaatccaatggacttgctctcaccccagggatgaaacacccagaaactcacttctcagtcacttccacagccgatgactcagaagagccaaacccagaatggggcctctcttttccccatcacagactcccctgacaacctttcctggcgtaactagaggagtcccagtgcaggataggccctaaacgttttgttaaataaacaggtgcatgaaaggagcctaaggccattgttgatatccactctcttctttccacttccttctcatctttttctccatgttttatgcttctctgattccctcttctgcctgcaccagaccagccccagccctttattcctctccattttcactccttccagcctctgtccctgaactgccactggcaacccatgggacctcaggaccagagactgcttgactcatctggggagggtaagttcacgggggacaaaaaaatgattcctaaagaagaggcttcctagaccagcacaggctcgagaaagacatcccctaggcctggacttctgagcagctttagccaggctccggacggcagccagaggaggcctttccccattgctcctttccccattgctcaatggattccatgtttctttttcttggggggagcagggagggagaaaggtagaaaaatggcagccacctttccaagaaaaatataaagggtccaagctgtatagtatttgtcagtatttttttctgtaaaattcaaacacacacaaaagaaaaatttatttaaataaaatactttgaaaatgaaaagtcttgatgtagtcagatggttactctcttaacattaggtattacccccactcagacatcactcagaaatgatcaatgcagggactctttctgtgacacaaatgtcccagccctccctggtcaccgccttcgccatggtagagtcataggtctgaggatgaggaatgtggctgtctcacccttgcttgcaaaacagatggccttggagaccagactccctcaaaggtgccagctacaggaaaaatatactgatgttccttggcaacacttacagaactttccatcaatgaggtccatcaatggcttcttaaaggaaaaggggggaaatagcaaaaacctaaggaagaatggacctttgagttaaatccagtgtttgttgggaaaggagggatcaaaaacctctatagtagccactagggcaaaaactgtgtgtatgtgtgtgtgtaagtgtgtgtacactgttcaatatggttcaatatggtaccaatagccacatgtgactatttaaattcattgcaatgaaataaaattaaaggtatactagctc

SEQ ID NO: 145742 - DNA, 2485 bp, Homo sapiens
  Payload ID: 8903
  Gene Symbol: KIAA0040
  Gene Name: KIAA0040
  ENST ID: ENST00000545251
  CDS Start-End: 425-724
gcagaggcaaccaaaaaggaacccacacctccctccagggcccggggcgctgtcagacggggcagcaaccaggagattccctgggcctgcaggaagcccttccgcggaccgaaagactgggcggtgatcaggatctgaatgcacagggcgggtgttcagcgattgtttactacgttgaacgtgacctccaggaaagcagttctggccgagatcccctgacaacgcaaagcaagaagtaacgtggaaggaggctccccaagctggctggccattttgctgctgtgtgtggaggtgctgccagtggcatgcccaaacccaaagctggaagaggaataaattacaagtggtcaaggttgcatccttttgagcccaggacctgcttgtaagccgagagggttctctggccctaatctagccaagcaccatggagagaatcagtgccttcttcagctctatctgggacaccatcttgaccaaacaccaagaaggcatctacaacaccatctgcctgggagtcctcctgggcctgccactcttggtgatcatcacactcctcttcatctgttgccattgctgctggagcccaccaggcaagaggggccagcagccagagaagaacaagaagaagaagaagaagaagaagaagaaggatgaagaagacctctggatctctgctcaacccaagcttctccagatggagaagagaccatcactgcctgtttagttaggcaggaagcagaggtgtttcctttctggggctaagcctccttctgaccacacacagacatttcaggaacccctgaaataatgcactatgtccatgtccacagagtaactactcaaccaaggaacaaacctcagactaagtgtcccagtggagggcagtcccagggaccacgtggacaattcttggatactgtcttggcagctatgtgtccaatagcaatgctccttactgcagacccaggcatgcctcccacctgtctctggcataccccacatgcaaagcacaaagaacatttatccatacatctcaatatggttcccaagtgtgtgcacatgcacgtaacacacacacacacaaattcaggtagcaggtacgtgggcaagtatattctgctcatcaaatggtcattggctatgtactttgtgcagggaagtacattatctacagtcacaaaaatgtctcatgggaaagccttgccagattcagacacatatatacaatttcctaaccagcaaggcccccatacaccatctattccataaaccactcaggttacagatgcatgctttcctatttctaactctacacataaacttttactggaagtactcataattggacattccagcaacctgctacagtccccacccttgtgtgtcttgatacagacacaccaagtttctgtgcctctgacccctcacctgtgccaagatgtttaaagtgtgatggttcaaaattcattgaaagctcttttcttgtaactcatgacaaagtccgtcctcattgccactgagaggtgtttaatgtgatccaagacctctctgtgaaacattacccccgcaaaccactcagcaaagtgcctttctccaagcaagaacaaagagctcttggtggtgactgctagaaaattatggaagcccactcatttatgtcagtggactgcaactgtgtacctgtgcaatgtttacagatggaaagggtgaggagatgctacacctgagctaggtatctcctatataaccaaagtttccagcagggaaggaactagacaatcatcagtgcagtctcacagaaggcaacactggaagtgatgtcataaggttgtgatgtgtgcacggtatggcacaggtgggatgcagaggtaacagagtttaaatgaaagtaggatgaagctataaagaggtttatttatatttatattgaagctcaggcaagtgccttgcacacagtaggtacttataactaactgtggttactgttggatatgtgatgttgttaagggtaagcttgtaatacctcaccagttctccccgagtgatcttctcttctaagtgagcccactaattgctgcaatggatgaaattgggtgtttaatgctggagagcacatgtaggtgacacatgtgccttgaggtatgtgaggacatgtaaattagatccacagtgagctgaggagggctttccccgccagagtgaggttgggaagcagagttaatccacttataggatgaactgcttggtatttttattgtattgtgactgtattacaaagatggacaattcactccttgggagcaagttatgctctagaagtttatttacaaatatgctgggcagctctcttgaaatattttcccaaggaagctattctacacagtggcaaaattgctatctaattaataatgtagctaaactatgatatttatagtagcaaaaaactaaattctataagattgcattaaaggaaagatatattcta

SEQ ID NO: 145743 - DNA, 4340 bp, Homo sapiens
  Payload ID: 8903
  Gene Symbol: KIAA0040
  Gene Name: KIAA0040
  Uniprot ID: Q15053
  ENST ID: ENST00000619513
  CDS Start-End: 697-1158
ctagactgggcggtgatcaggatctgaatgcacagggcgggtgttcagcgattgtttactacgttgaacgtgacctccaggaaagcagttctggccgagatcccctgacaacgcaaagcaagaagtaacgtggaaggaggctccccaagctggctggccattttgctgctgtgtgtggaggtgctgccagtggcatgcccaaacccaaagctggaagaggaataaattacaagtggtcaaggttgcatccttttgagcccaggacctgcttgtaagccgagagggttctctggccctaatctagccaagcaccatggagagaatcagtgccttcttcagctctatctgggacaccatcttgaccaaacaccaagaaggcatctacaacaccatctgcctgggagtcctcctgggcctgccactcttggtgatcatcacactcctcttcatctgttgccattgctgctggagcccaccaggcaagaggggccagcagccagagaagaacaagaagaagaagaagaagaagaagaagaaggatgaagaagacctctggatctctgctcaacccaagcttctccagatggagaagagaccatcactgcctgtttagttaggcaggaagcagaggtgtttcctttctggggctaagcctccttctgaccacacacagacatttcaggaacccctgaaataatgcactatgtccatgtccacagagtaactactcaaccaaggaacaaacctcagactaagtgtcccagtggagggcagtcccagggaccacgtggacaattcttggatactgtcttggcagctatgtgtccaatagcaatgctccttactgcagacccaggcatgcctcccacctgtctctggcataccccacatgcaaagcacaaagaacatttatccatacatctcaatatggttcccaagtgtgtgcacatgcacgtaacacacacacacacaaattcaggtagcaggtacgtgggcaagtatattctgctcatcaaatggtcattggctatgtactttgtgcagggaagtacattatctacagtcacaaaaatgtctcatgggaaagccttgccagattcagacacatatatacaatttcctaaccagcaaggcccccatacaccatctattccataaaccactcaggttacagatgcatgctttcctatttctaactctacacataaacttttactggaagtactcataattggacattccagcaacctgctacagtccccacccttgtgtgtcttgatacagacacaccaagtttctgtgcctctgacccctcacctgtgccaagatgtttaaagtgtgatggttcaaaattcattgaaagctcttttcttgtaactcatgacaaagtccgtcctcattgccactgagaggtgtttaatgtgatccaagacctctctgtgaaacattacccccgcaaaccactcagcaaagtgcctttctccaagcaagaacaaagagctcttggtggtgactgctagaaaattatggaagcccactcatttatgtcagtggactgcaactgtgtacctgtgcaatgtttacagatggaaagggtgaggagatgctacacctgagctaggtatctcctatataaccaaagtttccagcagggaaggaactagacaatcatcagtgcagtctcacagaaggcaacactggaagtgatgtcataaggttgtgatgtgtgcacggtatggcacaggtgggatgcagaggtaacagagtttaaatgaaagtaggatgaagctataaagaggtttatttatatttatattgaagctcaggcaagtgccttgcacacagtaggtacttataactaactgtggttactgttggatatgtgatgttgttaagggtaagcttgtaatacctcaccagttctccccgagtgatcttctcttctaagtgagcccactaattgctgcaatggatgaaattgggtgtttaatgctggagagcacatgtaggtgacacatgtgccttgaggtatgtgaggacatgtaaattagatccacagtgagctgaggagggctttccccgccagagtgaggttgggaagcagagttaatccacttataggatgaactgcttggtatttttattgtattgtgactgtattacaaagatggacaattcactccttgggagcaagttatgctctagaagtttatttacaaatatgctgggcagctctcttgaaatattttcccaaggaagctattctacacagtggcaaaattgctatctaattaataatgtagctaaactatgatatttatagtagcaaaaaactaaattctataagattgcattaaaggaaagatatattctatttgctcacttgggctgcttggtactcacctgccctccaggtgtactttaggcctgtggagggtgggcatttagtggtgacccttgcaccagggttttctaacagatgaccctgtgaatcataatttaaacctgcatatattttatagccagtcacatttgccctctcaccctatatggccataaactgcctaagcactcaggcctcccactcatcaacccctttgaccagagaaagaagcactctggttctctatccccttgtcacatagagagtttgtcatggggcctctggctgtgcccttcacataacagaatgacttgccatctgcctgcaccaaacccagggatgtggaagacatctccccacaactgccactgctcaccaggacaagctgcccttcctgtctccacctctcagtccccctagaatggatggctggggagaggtggaggctgacagctgagacgtagtgtcagatatgatctaggagggcggatcaccgggatccgggaccatacaagtaacatggtttccatggcaactgcttgctcctttgaattaagacagcagtcagttgtcattgccatgacaaggcctctatctccaggcacaatgtccctgctgtctcctaatccaatggacttgctctcaccccagggatgaaacacccagaaactcacttctcagtcacttccacagccgatgactcagaagagccaaacccagaatggggcctctcttttccccatcacagactcccctgacaacctttcctggcgtaactagaggagtcccagtgcaggataggccctaaacgttttgttaaataaacaggtgcatgaaaggagcctaaggccattgttgatatccactctcttctttccacttccttctcatctttttctccatgttttatgcttctctgattccctcttctgcctgcaccagaccagccccagccctttattcctctccattttcactccttccagcctctgtccctgaactgccactggcaacccatgggacctcaggaccagagactgcttgactcatctggggagggtaagttcacgggggacaaaaaaatgattcctaaagaagaggcttcctagaccagcacaggctcgagaaagacatcccctaggcctggacttctgagcagctttagccaggctccggacggcagccagaggaggcctttccccattgctcctttccccattgctcaatggattccatgtttctttttcttggggggagcagggagggagaaaggtagaaaaatggcagccacctttccaagaaaaatataaagggtccaagctgtatagtatttgtcagtatttttttctgtaaaattcaaacacacacaaaagaaaaatttatttaaataaaatactttgaaaatgaaaagtcttgatgtagtcagatggttactctcttaacattaggtattacccccactcagacatcactcagaaatgatcaatgcagggactctttctgtgacacaaatgtcccagccctccctggtcaccgccttcgccatggtagagtcataggtctgaggatgaggaatgtggctgtctcacccttgcttgcaaaacagatggccttggagaccagactccctcaaaggtgccagctacaggaaaaatatactgatgttccttggcaacacttacagaactttccatcaatgaggtccatcaatggcttcttaaaggaaaaggggggaaatagcaaaaacctaaggaagaatggacctttgagttaaatccagtgtttgttgggaaaggagggatcaaaaacctctatagtagccactagggcaaaaactgtgtgtatgtgtgtgtgtaagtgtgtgtacactgttcaatatggttcaatatggtaccaatagccacatgtgactatttaaattcattgcaatgaaataaaattaaaggtatactagctc

SEQ ID NO: 145744 - DNA, 7407 bp, Homo sapiens
  Payload ID: 8904
  Gene Symbol: KIAA0100
  Gene Name: KIAA0100
  Uniprot ID: Q14667
  ENST ID: ENST00000528896
  CDS Start-End: 76-6783
cggtgctgcgcggatccggcgtcggggcccggcatggcgggggccggggccaagccgggccggacccggacctaaatgcctctgttcttctccgcgctgttggtcttgctgctagttgcgcttagcgccctctttctaggccggtggcttgtggtccggttggccaccaagtggtgtcagcggaagctgcaggcggagctaaagattggctccttccgctttttttggatccagaatgtcagtcttaagtttcagcaacaccagcaaacagtggaaattgataacctgtggatttccagcaaactccttagccatgatcttccacactatgtggcattgtgctttggagaagtgcgtatcagaacggacctacagaaagtttctgacctgtctgccccattctcccagagcgctggggtggatcaaaaggaactgtccttcagcccatccttattgaagatcttctgccaactattctccattcatgtagatgctataaacatcatggttctcaaggtggatacctctgagtccttatggcatattcagatcagtagaagcagatttcttttggatagtgatgggaaaaggctaatctgtgaggtgagcttatgtaagatcaacagcaaagttctaaagagtggtcagctggaggacacctgcctagtggagctttcactggccctggacctgtgtctaaaggtgggcattagcagtcggcatctcactgctatcactgtggatgtgtggacactccatgctgaactgcatgagggcctcttccagagccaactgctgtgccagggcccaagcctagcatctaagcctgttccctgttcagaggtgacagaaaacttagttgagccaactctgcctggcctattccttctccagcagctgccagaccaggtcaaggttaagatggagaacacaagcgtggtattgtccatgaatagtcaaaagaggcacctgacttggactctgaagctgctgcagttcctgtaccaccgtgatgaggatcagctgccccttcgaagcttcacagcaaactctgatatggcacagatgagcactgaactgctgctggaagatgggttgttgttgtcccagagtcgccaacgcattgtctgcctcaactccctcaaggctagtgtgcaggtgaccaccattgacctctcagcctccctagttctgaacacttgcatcattcactaccggcaccaggaattctctcactggctgcacctgctagcactggaaacccaagggtctagttcacctgttctaaagcaaaggaaaaaaagaaccttcccccaaatcctggctcccatcatctttagcacctccatctccaatgtcaacatttccattcaacttggagatacaccaccttttgccttgggattcaattctatctctctggattaccagcacctcaggccacaaagcatccatcagcggggcgtcctaactgtggaccacctctgctggcgtgtgggcagtgactcccacattcagcgggcgccacacccacccaatatgcatgtttggggtgaggcacttgttctggactccttcacactacagggtagctataaccagcctctgggcctgtccagcacccagtcagataccctttttcttgattgtaccattcgaggacttcaggtggaagcatcagatacctgtgcccaatgtctgtctcgtatcttatccctgatgggtccacaatctgggaagtcagctgtctctaggcactcttcatttggggaatctgtgtcattactgtggaaggtggacttgaaggtcgaagacatgaacttgtttaccctttctgccttggttggtgcttcagaggtacgactggacaccctaactatcctgggcagtgcagagacgtccactgtggggattcaaggacttgtgttagcgctggtgaaatcagtcacggagaagatgcaaccctgttgcaaggcccctgacatccctaccccagtgctcagcctttccatgctctccatcacctatcacagcagcatccgctctctggaggttcagtgtggtgcagggctgaccttactttggagccccccagatcacatgtacctgtaccagcatgtcctggccactctacagtgccgagacctactaagagccactgtgtttcctgagactgtaccatcccttgcactagagacttcaggaactacttctgagctagaaggccgtgcccctgagccattacccccaaagcggctgctaaacctaaccctggaggtgagcacagccaagctcacagcttttgtagctgaggacaagttcattaccctggctgcagagagtgtgtcactgagccggcatggaggttccctgcaggcatactgtccagagctggctgctggctttgatggcaatagtatcttcaacttcaaggaggtggaggtgcagctgctacctgagctggaagagatgatcctccaccggaaccccttccctgcgctgcagaccctccggaaccgtgtttggctcctctctttcggctcagtctcggtggagtttccttatcagtatgacttttctcgaactctagatgaggctgtgggagttcagaagtggctgaagggactacatcaagggactcgtgcttgggcctctccaagccctgtcccactcccacctgatctactcttaaaggttgagcacttctcatgggttttcttggatgatgtttttgaggtgaaacttcatgataactacgagctgatgaaggatgaaagtaaggagagtgccaaaagactacagctactggatgctaaagtggccgcccttcggaagcagcatggggagttgttgcctgcccgcaaaattgaggagctctatgcctctttggaacgcaaaaacattgaaatctacatccagcgttcccgtcgtctctatggcaacacacccatgcgccgggcactgcttacttggagcttagcagggctagaactggtagctctggcagatgcctccttccatggtcctgagcatgtggtagaacaggttcaagagcttgatccaggcagcccttttccccctgagggattagatcttgtcattcagtggtgtcgaatgctcaagtgcaatgtcaagagctttctggttcggatcagggactatccacggtacctgtttgagatccgtgactggcggctaatgggtcgacttgtgggcaccgagcagagtggtcagccttgctcccgtcggcgtcagatcttgcacttggggcttccgtggggtaacgtggcagtggagaggaacatgcccccactcaaattctaccatgactttcactcggaaatattccagtacacagtggtgtggggcccatgctgggatccagcctggacactaattggccagtgtgtggacctcttgaccaagccctcagctgaccccagcccacctttgccctggtgggacaagagccgtcttctgttccatggagactggcacatggacattgaacaggcgaacctgcaccagctggccactgaggatccatacaacacaactgaaaatatgcactgggagtggagccacctgtcttttcattggaaacctggtcagtttgtgttcaagggtgacttggatatcaacgtgagaacagcctctaagtatgacgactgctgcttccttcacctgcctgacctctgcatgacactggacctgcagtggctgtgccatgggaacccccatgatcaccatagtgtcactctgcgggccccagagttcctgcctgaggtgcccttgggccagcttcatgactcctaccgggcctttcgctcggagaacctcaatctctccatcaagatggatctgactcggcacagtggaacaatatcccagccccgaattctgctatatagtagtaccctgcgctggatgcaaaacttctgggcaacttggacaagtgtcacaaggcctatctgcaggggaaagctcttcaataacctgaaacccagcaagaagaaacttggtcagcactacaagcaactttcctatacagccctctttccccagctgcaggtacattattgggcctcatttgcccagcaacggggcatccagattgagtgcagtcagggccatgtcttcactcgggggactcagcggcttatacctcaagcaggcacagtgatgcggcgccttatctctgattggagtgttacccagatggtgagtgacctaagtcaggtgaccgttcacctgatggcctcacccactgaagagaatgctgatcactgtcttgatcccttggtaacaaagacccacctgctgagcttgtcctccctcacctaccaacggcatagcaatcgcacagctgaggaggagctctctgctcgtgatggggatcctacctttcatacacatcagctgcacttagtagatttacggatttcctggacaactaccaatcgagacattgcctttgggttatatgatgggtacaaaaaggcagctgtactcaaacgtaatctttctactgaggccctgaaggggttaaagattgatccacagatgccagccaaaaagccaaagcggggtgtcccaactagtgcctcagccccacctcgtgttaacactcccagcttcagtggacaacctgataaggggtcatcaggaggtgcttacatgttgcagaagctaattgaagagacagataggtttgtagtgttcacagaagaggaatcaggcatgagtgaccagttgtgtggcattgctgcctgccagacggatgacatatacaaccgaaactgccttattgaattggtcaactgtcagatggttcttcgtggagcagagacagaaggctgtgtcattgtgtcagctgccaaagcccaactgctgcagtgccagcaccatccagcctggtatggtgatacattgaagcaaaagacatcctggacttgcctcttggatggcatgcagtactttgccaccactgaaagcagccccacagagcaggatggccgacagctctggttagaggtgaagaatatcgaggagcaccggcagcgtagtctggactctgtgcaggagctgatggagagtgggcaggcagtgggcggcatggttaccacaaccacagattggaaccagccagctgaggcacagcaagcccagcaagtccagcggatcatttcgcgttgcaactgccgaatgtactatattagttacagccatgacattgatcctgaactagcaactcagattaagccacctgaagttcttgagaaccaggaaaaggaagatctcctaaagaagcaggaaggggctgtggataccttcacccttatccaccatgagctggaaatttccaccaacccagctcagtatgccatgatcctggacattgtcaacaacctgctgctccatgtagaacctaagcggaaggaacatagtgagaagaagcaacgggtcaggttccagcttgagatctctagcaatccagaggagcaacgcagcagcatactgcatttgcaggaggctgtgcggcagcatgtggcccaaatacgacagctggagaagcagatgtattctatcatgaagtctttgcaggatgacagcaagaatgagaatctgcttgacctgaaccagaagcttcagttgcagctaaaccaggagaaggccaacctgcagctggaaagtgaagaactgaatatcctcatcaggtgttttaaggatttccaactgcagcgggctaacaagatggagctgcgaaagcagcaagaagatgtgagtgtggtccgtcgcactgagttttactttgctcaggcacggtggcgcctgacagaggaagatggacagctgggaattgctgaattagaactgcagaggttcctctacagcaaggtgaataagtctgatgacacagcagaacatcttctggagttgggctggtttaccatgaacaacctcctccccaatgctgtctataaggtagtactgcggccccagagctcctgccagtctgggcgacagctagctctccgcctcttcagcaaagttcggccccctgttgggggtatctctgttaaggagcattttgaggtaaatgtggtgcctctcaccatccagctgacacaccagttcttccacagaatgatgggctttttctttcctggccgaagtgtggaagatgatgaagttggtgatgaagaggataagtccaaactggtgactactggaataccagtggtgaagcctcggcagctgattgcaacagatgatgcagtaccactgggccctgggaagggtgtggcacagggtttgactcggagttctggggtcagaaggtcatttcgcaaatcgccagagcaccctgtggatgacattgacaagatgaaagagcgagctgccatgaacaactccttcatctacataaagattccacaggttccactgtgtgtcagctacaagggtgagaagaacagtgtggactggggtgaccttaacctggtgctgccctgtctggagtaccacaacaacacatggacatggctagactttgccatggctgtcaaaagggacagccgcaaagccctggttgcccaggtaatcaaagagaagctaaggctgaagtctgcaacaggctctgaggtccggggaaagctagaaactaaatcggacctgaacatgcaacagcaggaagaggaggagaaagcccggctcctcattggtttaagtgtgggcgacaagaaccctggcaagaagtccatctttggcaggcgcaaatgatttggcgattcgagtggctgcagtacaggatctgactctggctcaggctccagggacttgtggggtgggaggggcttcccgttatccacgaggatttgtgggtgtcagagcccataggcatcactcttcagcacctggtctgttcgctgcagggcatggtggacagtaatgctgagttctgtctcacactgatcaggctcagggccagagaggcaacaagagagcaagacccagggaatgggcccagggcaggaccctattcccttggggtcaagtgaaagggtagggggatagtcctgatcaagtgtgataaatttttatagacatatataaatatatatatattatatatatatttctaagtgtaactgtccttcctctgtgccaggaaacgggagggggctgatcctctgatcctcactccactgtcatgtttgaaagaggtattggtgttctggagtgggggtcaacccctccccagtctctgtgctaagttcacttgggaggatggcagtaggagccagggctggccatgggtcccctacccttccccgtaggatataccctggagaatggcaaaatgatttaaagagaaaaaaaaagatattttaaatttgatgctca

SEQ ID NO: 145745 - DNA, 6856 bp, Homo sapiens
  Payload ID: 8904
  Gene Symbol: KIAA0100
  Gene Name: KIAA0100
  ENST ID: ENST00000544884
  CDS Start-End: 392-6670
atgagtcagccaggtccaccgccagcccaggtggcttgtggtccggttggccaccaagtggtgtcagcggaagctgcaggcggagctaaagattggctccttccgctttttttggatccagaatgtcagtcttaagtttcagcaacaccagcaaacagtggaaattgataacctgtggatttccagcaaactccttagccatgatcttccacactatgtggcattgtgctttggagaagtgcgtatcagaacggacctacagaaagtttctgacctgtctgccccattctcccagagcgctggggtggatcaaaaggaactgtccttcagcccatccttattgaagatcttctgccaactattctccattcatgtagatgctataaacatcatggttctcaaggtggatacctctgagtccttatggcatattcagatcagtagaagcagatttcttttggatagtgatgggaaaaggctaatctgtgaggtgagcttatgtaagatcaacagcaaagttctaaagagtggtcagctggaggacacctgcctagtggagctttcactggccctggacctgtgtctaaaggtgggcattagcagtcggcatctcactgctatcactgtggatgtgtggacactccatgctgaactgcatgagggcctcttccagagccaactgctgtgccagggcccaagcctagcatctaagcctgttccctgttcagaggtgacagaaaacttagttgagccaactctgcctggcctattccttctccagcagctgccagaccaggtcaaggttaagatggagaacacaagcgtggtattgtccatgaatagtcaaaagaggcacctgacttggactctgaagctgctgcagttcctgtaccaccgtgatgaggatcagctgccccttcgaagcttcacagcaaactctgatatggcacagatgagcactgaactgctgctggaagatgggttgttgttgtcccagagtcgccaacgcattgtctgcctcaactccctcaaggctagtgtgcaggtgaccaccattgacctctcagcctccctagttctgaacacttgcatcattcactaccggcaccaggaattctctcactggctgcacctgctagcactggaaacccaagggtctagttcacctgttctaaagcaaaggaaaaaaagaaccttcccccaaatcctggctcccatcatctttagcacctccatctccaatgtcaacatttccattcaacttggagatacaccaccttttgccttgggattcaattctatctctctggattaccagcacctcaggccacaaagcatccatcagcggggcgtcctaactgtggaccacctctgctggcgtgtgggcagtgactcccacattcagcgggcgccacacccacccaatatgcatgtttggggtgaggcacttgttctggactccttcacactacagggtagctataaccagcctctgggcctgtccagcacccagtcagataccctttttcttgattgtaccattcgaggacttcaggtggaagcatcagatacctgtgcccaatgtctgtctcgtatcttatccctgatgggtccacaatctgggaagtcagctgtctctaggcactcttcatttggggaatctgtgtcattactgtggaaggtggacttgaaggtcgaagacatgaacttgtttaccctttctgccttggttggtgcttcagaggtacgactggacaccctaactatcctgggcagtgcagagacgtccactgtggggattcaaggacttgtgttagcgctggtgaaatcagtcacggagaagatgcaaccctgttgcaaggcccctgacatccctaccccagtgctcagcctttccatgctctccatcacctatcacagcagcatccgctctctggaggttcagtgtggtgcagggctgaccttactttggagccccccagatcacatgtacctgtaccagcatgtcctggccactctacagtgccgagacctactaagagccactgtgtttcctgagactgtaccatcccttgcactagagacttcaggaactacttctgagctagaaggccgtgcccctgagccattacccccaaagcggctgctaaacctaaccctggaggtgagcacagccaagctcacagcttttgtagctgaggacaagttcattaccctggctgcagagagtgtgtcactgagccggcatggaggttccctgcaggcatactgtccagagctggctgctggctttgatggcaatagtatcttcaacttcaaggaggtggaggtgcagctgctacctgagctggaagagatgatcctccaccggaaccccttccctgcgctgcagaccctccggaaccgtgtttggctcctctctttcggctcagtctcggtggagtttccttatcagtatgacttttctcgaactctagatgaggctgtgggagttcagaagtggctgaagggactacatcaagggactcgtgcttgggcctctccaagccctgtcccactcccacctgatctactcttaaaggttgagcacttctcatgggttttcttggatgatgtttttgaggtgaaacttcatgataactacgagctgatgaaggatgaaagtaaggagagtgccaaaagactacagctactggatgctaaagtggccgcccttcggaagcagcatggggagttgttgcctgcccgcaaaattgaggagctctatgcctctttggaacgcaaaaacattgaaatctacatccagcgttcccgtcgtctctatggcaacacacccatgcgccgggcactgcttacttggagcttagcagggctagaactggtagctctggcagatgcctccttccatggtcctgagcatgtggtagaacaggttcaagagcttgatccaggcagcccttttccccctgagggattagatcttgtcattcagtggtgtcgaatgctcaagtgcaatgtcaagagctttctggttcggatcagggactatccacggtacctgtttgagatccgtgactggcggctaatgggtcgacttgtgggcaccgagcagagtggtcagccttgctcccgtcggcgtcagatcttgcacttggggcttccgtggggtaacgtggcagtggagaggaacatgcccccactcaaattctaccatgactttcactcggaaatattccagtacacagtggtgtggggcccatgctgggatccagcctggacactaattggccagtgtgtggacctcttgaccaagccctcagctgaccccagcccacctttgccctggtgggacaagagccgtcttctgttccatggagactggcacatggacattgaacaggcgaacctgcaccagctggccactgaggatccatacaacacaactgaaaatatgcactgggagtggagccacctgtcttttcattggaaacctggtcagtttgtgttcaagggtgacttggatatcaacgtgagaacagcctctaagtatgacgactgctgcttccttcacctgcctgacctctgcatgacactggacctgcagtggctgtgccatgggaacccccatgatcaccatagtgtcactctgcgggccccagagttcctgcctgaggtgcccttgggccagcttcatgactcctaccgggcctttcgctcggagaacctcaatctctccatcaagatggatctgactcggcacagtggaacaatatcccagccccgaattctgctatatagtagtaccctgcgctggatgcaaaacttctgggcaacttggacaagtgtcacaaggcctatctgcaggggaaagctcttcaataacctgaaacccagcaagaagaaacttggtcagcactacaagcaactttcctatacagccctctttccccagctgcaggtacattattgggcctcatttgcccagcaacggggcatccagattgagtgcagtcagggccatgtcttcactcgggggactcagcggcttatacctcaagcaggcacagtgatgcggcgccttatctctgattggagtgttacccagatggtgagtgacctaagtcaggtgaccgttcacctgatggcctcacccactgaagagaatgctgatcactgtcttgatcccttggtaacaaagacccacctgctgagcttgtcctccctcacctaccaacggcatagcaatcgcacagctgaggaggagctctctgctcgtgatggggatcctacctttcatacacatcagctgcacttagtagatttacggatttcctggacaactaccaatcgagacattgcctttgggttatatgatgggtacaaaaaggcagctgtactcaaacgtaatctttctactgaggccctgaaggggttaaagattgatccacagatgccagccaaaaagccaaagcggggtgtcccaactagtgcctcagccccacctcgtgttaacactcccagcttcagtggacaacctgataaggggtcatcaggaggtgcttacatgttgcagaagctaattgaagagacagataggtttgtagtgttcacagaagaggaatcaggcatgagtgaccagttgtgtggcattgctgcctgccagacggatgacatatacaaccgaaactgccttattgaattggtcaactgtcagatggttcttcgtggagcagagacagaaggctgtgtcattgtgtcagctgccaaagcccaactgctgcagtgccagcaccatccagcctggtatggtgatacattgaagcaaaagacatcctggacttgcctcttggatggcatgcagtactttgccaccactgaaagcagccccacagagcaggatggccgacagctctggttagaggtgaagaatatcgaggagcaccggcagcgtagtctggactctgtgcaggagctgatggagagtgggcaggcagtgggcggcatggttaccacaaccacagattggaaccagccagctgaggcacagcaagcccagcaagtccagcggatcatttcgcgttgcaactgccgaatgtactatattagttacagccatgacattgatcctgaactagcaactcagattaagccacctgaagttcttgagaaccaggaaaaggaagatctcctaaagaagcaggaaggggctgtggataccttcacccttatccaccatgagctggaaatttccaccaacccagctcagtatgccatgatcctggacattgtcaacaacctgctgctccatgtagaacctaagcggaaggaacatagtgagaagaagcaacgggtcaggttccagcttgagatctctagcaatccagaggagcaacgcagcagcatactgcatttgcaggaggctgtgcggcagcatgtggcccaaatacgacagctggagaagcagatgtattctatcatgaagtctttgcaggatgacagcaagaatgagaatctgcttgacctgaaccagaagcttcagttgcagctaaaccaggagaaggccaacctgcagctggaaagtgaagaactgaatatcctcatcaggtgttttaaggatttccaactgcagcgggctaacaagatggagctgcgaaagcagcaagaagatgtgagtgtggtccgtcgcactgagttttactttgctcaggcacggtggcgcctgacagaggaagatggacagctgggaattgctgaattagaactgcagaggttcctctacagcaaggtgaataagtctgatgacacagcagaacatcttctggagttgggctggtttaccatgaacaacctcctccccaatgctgtctataaggtagtactgcggccccagagctcctgccagtctgggcgacagctagctctccgcctcttcagcaaagttcggccccctgttgggggtatctctgttaaggagcattttgaggtaaatgtggtgcctctcaccatccagctgacacaccagttcttccacagaatgatgggctttttctttcctggccgaagtgtggaagatgatgaagttggtgatgaagaggataagtccaaactggtgactactggaataccagtggtgaagcctcggcagctgattgcaacagatgatgcagtaccactgggccctgggaagggtgtggcacagggtttgactcggagttctggggtcagaaggtcatttcgcaaatcgccagagcaccctgtggatgacattgacaagatgaaagagcgagctgccatgaacaactccttcatctacataaagattccacaggttccactgtgtgtcagctacaagggtgagaagaacagtgtggactggggtgaccttaacctggtgctgccctgtctggagtaccacaacaacacatggacatggctagactttgccatggctgtcaaaagggacagccgcaaagccctggttgcccaggtaatcaaagagaagctaaggctgaagtctgcaacaggctctgaggtccggggaaagctagaaactaaatcggacctgaacatgcaacagcaggaagaggaggagaaagcccggctcctcattggtttaagtgtgggcgacaagaaccctggcaagaagtccatctttggcaggcgcaaatgatttggcgattcgagtggctgcagtacaggatctgactctggctcaggctccagggacttgtggggtgggaggggcttcccgttatccacgaggatttgtgggtgtcagagcccataggcatcactcttcagcacctggtctgttcgctgcagggcatggtggacagtaatgctgagttctgtctca

SEQ ID NO: 145746 - DNA, 1271 bp, Homo sapiens
  Payload ID: 8904
  Gene Symbol: KIAA0100
  Gene Name: KIAA0100
  ENST ID: ENST00000583403
  CDS Start-End: 93-353
agctggtcggcccgcggcggtgctgcgcggatccggcgtcggggcccggcatggcgggggccggggccaagccgggccggacccggacctaaatgcctctgttcttctccgcgctgttggtcttgctgctagttgcgcttagcgccctctttctaggccggtggcttgtggtccggttggccaccaagtggtgtcagcggaagctgcaggcggagctaaagattggctccttccgctttttttggatccagaatgtcagtcttaagtttcagcaacaccagcaaacagtgacactatgtggcattgtgctttggagaagtgcgtatcagaacggacctacagaaagtttctgacctgtctgccccattctcccagagcgctggggtggatcaaaaggaactgtccttcagcccatccttattgaagatcttctgccaactattctccattcatgtagatgctataaacatcatggttctcaaggtggatacctctgagtccttatggcatattcagatcagtagaagcagatttcttttggatagtgatgggaaaaggctaatctgtgaggtgagcttatgtaagatcaacagcaaagttctaaagagtggtcagctggaggacacctgcctagtggagctttcactggccctggacctgtgtctaaaggtgggcattagcagtcggcatctcactgctatcactgtggatgtgtggacactccatgctgaactgcatgagggcctcttccagagccaactgctgtgccagggcccaagcctagcatctaagcctgttccctgttcagaggtgacagaaaacttagttgagccaactctgcctggcctattccttctccagcagctgccagaccaggtcaaggttaagatggagaacacaagcgtggtattgtccatgaatagtcaaaagaggcacctgacttggactctgaagctgctgcagttcctgtaccaccgtgatgaggatcagctgccccttcgaagcttcacagcaaactctgatatggcacagatgagcactgaactgctgctggaaggttcatgggtcggggtactggtactgagcgagaatgggaggactagatactctctttgctcatgccccatatggtctccttaatctaatctcagtgtaactggggagtggaaggagggaacatactgagagaaaatagccccagctcacaagttttgatgacagtctgttgatccctttgccggcttctgaccctctcccagttttacctcttg

SEQ ID NO: 145747 - DNA, 449 bp, Homo sapiens
  Payload ID: 8904
  Gene Symbol: KIAA0100
  Gene Name: KIAA0100
  ENST ID: ENST00000581267
  CDS Start-End: 1-65
gccagggcccaagcctagcatctaagcctgttccctgttcagctgccagaccaggtcaaggttaagatggagaacacaagcgtggtattgtccatgaatagtcaaaagaggcacctgacttggactctgaagctgctgcagttcctgtaccaccgtgatgaggatcagctgccccttcgaagcttcacagcaaactctgatatggcacagatgagcactgaactgctgctggaagatgggttgttgttgtcccagagtcgccaacgcattgtctgcctcaactccctcaaggctagtgtgcaggtgaccaccattgacctctcagcctccctagttctgaacacttgcatcattcactaccggcaccaggaattctctcactggctgcacctgctagcactggaaacccaagggtctagttcacctgttctaaagcaaaggaaaaaaag

SEQ ID NO: 145748 - DNA, 6852 bp, Homo sapiens
  Payload ID: 8904
  Gene Symbol: KIAA0100
  Gene Name: KIAA0100
  ENST ID: ENST00000389003
  CDS Start-End: 392-6670
atgagtcagccaggtccaccgccagcccaggtggcttgtggtccggttggccaccaagtggtgtcagcggaagctgcaggcggagctaaagattggctccttccgctttttttggatccagaatgtcagtcttaagtttcagcaacaccagcaaacagtggaaattgataacctgtggatttccagcaaactccttagccatgatcttccacactatgtggcattgtgctttggagaagtgcgtatcagaacggacctacagaaagtttctgacctgtctgccccattctcccagagcgctggggtggatcaaaaggaactgtccttcagcccatccttattgaagatcttctgccaactattctccattcatgtagatgctataaacatcatggttctcaaggtggatacctctgagtccttatggcatattcagatcagtagaagcagatttcttttggatagtgatgggaaaaggctaatctgtgaggtgagcttatgtaagatcaacagcaaagttctaaagagtggtcagctggaggacacctgcctagtggagctttcactggccctggacctgtgtctaaaggtgggcattagcagtcggcatctcactgctatcactgtggatgtgtggacactccatgctgaactgcatgagggcctcttccagagccaactgctgtgccagggcccaagcctagcatctaagcctgttccctgttcagaggtgacagaaaacttagttgagccaactctgcctggcctattccttctccagcagctgccagaccaggtcaaggttaagatggagaacacaagcgtggtattgtccatgaatagtcaaaagaggcacctgacttggactctgaagctgctgcagttcctgtaccaccgtgatgaggatcagctgccccttcgaagcttcacagcaaactctgatatggcacagatgagcactgaactgctgctggaagatgggttgttgttgtcccagagtcgccaacgcattgtctgcctcaactccctcaaggctagtgtgcaggtgaccaccattgacctctcagcctccctagttctgaacacttgcatcattcactaccggcaccaggaattctctcactggctgcacctgctagcactggaaacccaagggtctagttcacctgttctaaagcaaaggaaaaaaagaaccttcccccaaatcctggctcccatcatctttagcacctccatctccaatgtcaacatttccattcaacttggagatacaccaccttttgccttgggattcaattctatctctctggattaccagcacctcaggccacaaagcatccatcagcggggcgtcctaactgtggaccacctctgctggcgtgtgggcagtgactcccacattcagcgggcgccacacccacccaatatgcatgtttggggtgaggcacttgttctggactccttcacactacagggtagctataaccagcctctgggcctgtccagcacccagtcagataccctttttcttgattgtaccattcgaggacttcaggtggaagcatcagatacctgtgcccaatgtctgtctcgtatcttatccctgatgggtccacaatctgggaagtcagctgtctctaggcactcttcatttggggaatctgtgtcattactgtggaaggtggacttgaaggtcgaagacatgaacttgtttaccctttctgccttggttggtgcttcagaggtacgactggacaccctaactatcctgggcagtgcagagacgtccactgtggggattcaaggacttgtgttagcgctggtgaaatcagtcacggagaagatgcaaccctgttgcaaggcccctgacatccctaccccagtgctcagcctttccatgctctccatcacctatcacagcagcatccgctctctggaggttcagtgtggtgcagggctgaccttactttggagccccccagatcacatgtacctgtaccagcatgtcctggccactctacagtgccgagacctactaagagccactgtgtttcctgagactgtaccatcccttgcactagagacttcaggaactacttctgagctagaaggccgtgcccctgagccattacccccaaagcggctgctaaacctaaccctggaggtgagcacagccaagctcacagcttttgtagctgaggacaagttcattaccctggctgcagagagtgtgtcactgagccggcatggaggttccctgcaggcatactgtccagagctggctgctggctttgatggcaatagtatcttcaacttcaaggaggtggaggtgcagctgctacctgagctggaagagatgatcctccaccggaaccccttccctgcgctgcagaccctccggaaccgtgtttggctcctctctttcggctcagtctcggtggagtttccttatcagtatgacttttctcgaactctagatgaggctgtgggagttcagaagtggctgaagggactacatcaagggactcgtgcttgggcctctccaagccctgtcccactcccacctgatctactcttaaaggttgagcacttctcatgggttttcttggatgatgtttttgaggtgaaacttcatgataactacgagctgatgaaggatgaaagtaaggagagtgccaaaagactacagctactggatgctaaagtggccgcccttcggaagcagcatggggagttgttgcctgcccgcaaaattgaggagctctatgcctctttggaacgcaaaaacattgaaatctacatccagcgttcccgtcgtctctatggcaacacacccatgcgccgggcactgcttacttggagcttagcagggctagaactggtagctctggcagatgcctccttccatggtcctgagcatgtggtagaacaggttcaagagcttgatccaggcagcccttttccccctgagggattagatcttgtcattcagtggtgtcgaatgctcaagtgcaatgtcaagagctttctggttcggatcagggactatccacggtacctgtttgagatccgtgactggcggctaatgggtcgacttgtgggcaccgagcagagtggtcagccttgctcccgtcggcgtcagatcttgcacttggggcttccgtggggtaacgtggcagtggagaggaacatgcccccactcaaattctaccatgactttcactcggaaatattccagtacacagtggtgtggggcccatgctgggatccagcctggacactaattggccagtgtgtggacctcttgaccaagccctcagctgaccccagcccacctttgccctggtgggacaagagccgtcttctgttccatggagactggcacatggacattgaacaggcgaacctgcaccagctggccactgaggatccatacaacacaactgaaaatatgcactgggagtggagccacctgtcttttcattggaaacctggtcagtttgtgttcaagggtgacttggatatcaacgtgagaacagcctctaagtatgacgactgctgcttccttcacctgcctgacctctgcatgacactggacctgcagtggctgtgccatgggaacccccatgatcaccatagtgtcactctgcgggccccagagttcctgcctgaggtgcccttgggccagcttcatgactcctaccgggcctttcgctcggagaacctcaatctctccatcaagatggatctgactcggcacagtggaacaatatcccagccccgaattctgctatatagtagtaccctgcgctggatgcaaaacttctgggcaacttggacaagtgtcacaaggcctatctgcaggggaaagctcttcaataacctgaaacccagcaagaagaaacttggtcagcactacaagcaactttcctatacagccctctttccccagctgcaggtacattattgggcctcatttgcccagcaacggggcatccagattgagtgcagtcagggccatgtcttcactcgggggactcagcggcttatacctcaagcaggcacagtgatgcggcgccttatctctgattggagtgttacccagatggtgagtgacctaagtcaggtgaccgttcacctgatggcctcacccactgaagagaatgctgatcactgtcttgatcccttggtaacaaagacccacctgctgagcttgtcctccctcacctaccaacggcatagcaatcgcacagctgaggaggagctctctgctcgtgatggggatcctacctttcatacacatcagctgcacttagtagatttacggatttcctggacaactaccaatcgagacattgcctttgggttatatgatgggtacaaaaaggcagctgtactcaaacgtaatctttctactgaggccctgaaggggttaaagattgatccacagatgccagccaaaaagccaaagcggggtgtcccaactagtgcctcagccccacctcgtgttaacactcccagcttcagtggacaacctgataaggggtcatcaggaggtgcttacatgttgcagaagctaattgaagagacagataggtttgtagtgttcacagaagaggaatcaggcatgagtgaccagttgtgtggcattgctgcctgccagacggatgacatatacaaccgaaactgccttattgaattggtcaactgtcagatggttcttcgtggagcagagacagaaggctgtgtcattgtgtcagctgccaaagcccaactgctgcagtgccagcaccatccagcctggtatggtgatacattgaagcaaaagacatcctggacttgcctcttggatggcatgcagtactttgccaccactgaaagcagccccacagagcaggatggccgacagctctggttagaggtgaagaatatcgaggagcaccggcagcgtagtctggactctgtgcaggagctgatggagagtgggcaggcagtgggcggcatggttaccacaaccacagattggaaccagccagctgaggcacagcaagcccagcaagtccagcggatcatttcgcgttgcaactgccgaatgtactatattagttacagccatgacattgatcctgaactagcaactcagattaagccacctgaagttcttgagaaccaggaaaaggaagatctcctaaagaagcaggaaggggctgtggataccttcacccttatccaccatgagctggaaatttccaccaacccagctcagtatgccatgatcctggacattgtcaacaacctgctgctccatgtagaacctaagcggaaggaacatagtgagaagaagcaacgggtcaggttccagcttgagatctctagcaatccagaggagcaacgcagcagcatactgcatttgcaggaggctgtgcggcagcatgtggcccaaatacgacagctggagaagcagatgtattctatcatgaagtctttgcaggatgacagcaagaatgagaatctgcttgacctgaaccagaagcttcagttgcagctaaaccaggagaaggccaacctgcagctggaaagtgaagaactgaatatcctcatcaggtgttttaaggatttccaactgcagcgggctaacaagatggagctgcgaaagcagcaagaagatgtgagtgtggtccgtcgcactgagttttactttgctcaggcacggtggcgcctgacagaggaagatggacagctgggaattgctgaattagaactgcagaggttcctctacagcaaggtgaataagtctgatgacacagcagaacatcttctggagttgggctggtttaccatgaacaacctcctccccaatgctgtctataaggcaatactgcggccccagagctcctgccagtctgggcgacagctagctctccgcctcttcagcaaagttcggccccctgttgggggtatctctgttaaggagcattttgaggtaaatgtggtgcctctcaccatccagctgacacaccagttcttccacagaatgatgggctttttctttcctggccgaagtgtggaagatgatgaagttggtgatgaagaggataagtccaaactggtgactactggaataccagtggtgaagcctcggcagctgattgcaacagatgatgcagtaccactgggccctgggaagggtgtggcacagggtttgactcggagttctggggtcagaaggtcatttcgcaaatcgccagagcaccctgtggatgacattgacaagatgaaagagcgagctgccatgaacaactccttcatctacataaagattccacaggttccactgtgtgtcagctacaagggtgagaagaacagtgtggactggggtgaccttaacctggtgctgccctgtctggagtaccacaacaacacatggacatggctagactttgccatggctgtcaaaagggacagccgcaaagccctggttgcccaggtaatcaaagagaagctaaggctgaagtctgcaacaggctctgaggtccggggaaagctagaaactaaatcggacctgaacatgcaacagcaggaagaggaggagaaagcccggctcctcattggtttaagtgtgggcgacaagaaccctggcaagaagtccatctttggcaggcgcaaatgatttggcgattcgagtggctgcagtacaggatctgactctggctcaggctccagggacttgtggggtgggaggggcttcccgttatccacgaggatttgtgggtgtcagagcccataggcatcactcttcagcacctggtctgttcgctgcagggcatggtggacagtaatgctgagttctgt

SEQ ID NO: 145749 - DNA, 862 bp, Homo sapiens
  Payload ID: 8904
  Gene Symbol: KIAA0100
  Gene Name: KIAA0100
  ENST ID: ENST00000577261
  CDS Start-End: 1-862
gaccccagcccacctttgccctggtgggacaagagccgtcttctgttccatggagactggcacatggacattgaacaggcgaacctgcaccagctggccactgagtttgtgttcaagggtgacttggatatcaacgtgagaacagcctctaagtatgacgactgctgcttccttcacctgcctgacctctgcatgacactggacctgcagtggctgtgccatgggaacccccatgatcaccatagtgtcactctgcgggccccagagttcctgcctgaggtgcccttgggccagcttcatgactcctaccgggcctttcgctcggagaacctcaatctctccatcaagatggatctgactcggcacagtggaacaatatcccagccccgaattctgctatatagtagtaccctgcgctggatgcaaaacttctgggcaacttggacaagtgtcacaaggcctatctgcaggggaaagctcttcaataacctgaaacccagcaagaagaaacttggtcagcactacaagcaactttcctatacagccctctttccccagctgcaggtacattattgggcctcatttgcccagcaacggggcatccagattgagtgcagtcagggccatgtcttcactcgggggactcagcggcttatacctcaagcaggcacagtgatgcggcgccttatctctgattggagtgttacccagatggtgagtgacctaagtcaggtgaccgttcacctgatggcctcacccactgaagagaatgctgatcactgtcttgatcccttggtaacaaagacccacctgctgagcttgtcctccctcacctaccaacggcatagcaatcgcacagctg

SEQ ID NO: 145750 - DNA, 2194 bp, Homo sapiens
  Payload ID: 8905
  Gene Symbol: KIAA0101
  Gene Name: KIAA0101
  Uniprot ID: Q15004
  ENST ID: ENST00000300035
  CDS Start-End: 140-475
ggctcgggagagaccttggagcgcgcgggaaagagaccaatataaactgtggcgggatagttttcgggtccttgtccagtgaaacaccctcggctgggaagtcagttcgttctctcctctcctctcttcttgtttgaacatggtgcggactaaagcagacagtgttccaggcacttacagaaaagtggtggctgctcgagcccccagaaaggtgcttggttcttccacctctgccactaattcgacatcagtttcatcgaggaaagctgaaaataaatatgcaggagggaaccccgtttgcgtgcgcccaactcccaagtggcaaaaaggaattggagaattctttaggttgtcccctaaagattctgaaaaagagaatcagattcctgaagaggcaggaagcagtggcttaggaaaagcaaagagaaaagcatgtcctttgcaacctgatcacacaaatgatgaaaaagaatagaactttctcattcatctttgaataacgtctccttgtttaccctggtattctagaatgtaaatttacataaatgtgtttgttccaattagctttgttgaacaggcatttaattaaaaaatttaggtttaaatttagatgttcaaaagtagttgtgaaatttgagaatttgtaagactaattatggtaacttagcttagtattcaatataatgcattgtttggtttcttttaccaaattaagtgtctagttcttgctaaaatcaagtcattgcattgtgttctaattacaagtatgttgtatttgagatttgcttagattgttgtactgctgccatttttattggtgtttgattattggaatggtgccatattgtcactccttctacttgctttaaaaagcagagttagatttttgcacattaaaaaattcagtattaattaaacattacttattctaccctcttttttggcaaggaggacaaatacgcaatgttggaaaaccttggatggatatcttctctttaaaaaaatgtaaagataatttggtcttgagggtttaaacggttgataatgcctctacaacaacaagaaaaaagataaaatactaggatagaatcatggtgggcacagtggcttctcaggaggctgaggagggaggtttgcttgagtccaggagttggagaccagcccaggcaacatagcgtaaaccctatctctaaaacaatttttagccgggtgcggtggctcacgcctgtaatcccagcactctgggaggccgaggcgggtggatcatgaggtcaggagatcgagaccatcctgcctaacaaggtgaaaccccgtctctactaaaaatacaaaaaattagccgggcgcggtggcgggcgcctgtagtcccagctactcgggaggctgaggcaggagaatggcgtgaacccgggaagtggagcttgcagtgagccgagattgcgccactgcagtcggcagtccggcttgggcgacagagcgagactccgtctcaaaaaaaaaaaaaaaaaaaattttaaaaaaggctgagtgcagtggctcacacctgtaatcccagcactttgggaggccaaggcaggtggatcacctgagataggagttcaagaccagcctggccagcatggtgaaactgtcactactaaaaatgaaaaaatgagccaggcatggtggcacatgcctgtaatcccagctactcaggaggctgaggcaggagaatcgcttgaacctgggaggtggaggttgcagtgagcccagattgtgccactgcactccagcctgaacaacagagtgagacaatgtcttaaaaaaaaaaaaagaaagaaaagaaaaaaatatatatttatatatgaacaataaaaaattagcctggcatggtggcacacacagtggaaccagatcccatctcttaaaagaaattttcctaggatttgcatttgattcgctatcataaaatataattttaaagttggaagtcaatataacatgaaaggcaaatcatgccataaacccataggcatggcaaaactcctaagagctactatgacatttttcaacataaccagaggtataattgaagaagtgggtataatattcctcatcaccctttttgcagcagcctgttgtcaaaagtaatcatattttagtaggcatatttttctgaaatacgtttgtaataaatgcatacttatttttacaa

SEQ ID NO: 145751 - DNA, 911 bp, Homo sapiens
  Payload ID: 8905
  Gene Symbol: KIAA0101
  Gene Name: KIAA0101
  Uniprot ID: Q15004
  ENST ID: ENST00000380258
  CDS Start-End: 74-271
ggtccttgtccagtgaaacaccctcggctgggaagtcagttcgttctctcctctcctctcttcttgtttgaacatggtgcggactaaagcagacagtgttccaggcacttacagaaaagtggtggctgctcgagcccccagaaaggtgcttggttcttccacctctgccactaattcgacatcagtttcatcgaggaaagagcatgtcctttgcaacctgatcacacaaatgatgaaaaagaatagaactttctcattcatctttgaataacgtctccttgtttaccctggtattctagaatgtaaatttacataaatgtgtttgttccaattagctttgttgaacaggcatttaattaaaaaatttaggtttaaatttagatgttcaaaagtagttgtgaaatttgagaatttgtaagactaattatggtaacttagcttagtattcaatataatgcattgtttggtttcttttaccaaattaagtgtctagttcttgctaaaatcaagtcattgcattgtgttctaattacaagtatgttgtatttgagatttgcttagattgttgtactgctgccatttttattggtgtttgattattggaatggtgccatattgtcactccttctacttgctttaaaaagcagagttagatttttgcacattaaaaaattcagtattaattaaacattacttattctaccctcttttttggcaaggaggacaaatacgcaatgttggaaaaccttggatggatatcttctctttaaaaaaatgtaaagataatttggtcttgagggtttaaacggttgataatgcctctacaacaacaagaaaaaagataaaatactaggatagaatcatggtgggcacagtggcttctcaggaggctgaggagggaggtttgcttg

SEQ ID NO: 145752 - DNA, 749 bp, Homo sapiens
  Payload ID: 8905
  Gene Symbol: KIAA0101
  Gene Name: KIAA0101
  ENST ID: ENST00000559519
  CDS Start-End: 71-325
ccttgtccagtgaaacaccctcggctgggaagtcagttcgttctctcctctcctctcttcttgtttgaacatggtgcggactaaagcagacagtgttccaggcacttacagaaaagctgaaaataaatatgcaggagggaaccccgtttgcgtgcgcccaactcccaagtggcaaaaaggaattggagaattctttaggttgtcccctaaagattctgaaaaagagaatcagattcctgaagaggcaggaagcagtggcttaggaaaagcaaagagaaaagcatgtcctttgcaacctgatcacacaaatgatgaaaaagaatagaactttctcattcatctttgaataacgtctccttgtttaccctggtattctagaatgtaaatttacataaatgtgtttgttccaattagctttgttgaacaggcatttaattaaaaaatttaggtttaaatttagatgttcaaaagtagttgtgaaatttgagaatttgtaagactaattatggtaacttagcttagtattcaatataatgcattgtttggtttcttttaccaaattaagtgtctagttcttgctaaaatcaagtcattgcattgtgttctaattacaagtatgttgtatttgagatttgcttagattgttgtactgctgccatttttattggtgtttgattattggaatggtgccatattgtcactccttctacttgctttaaaaagcagagttagatttttgcacattaaaa

SEQ ID NO: 145753 - DNA, 766 bp, Homo sapiens
  Payload ID: 8905
  Gene Symbol: KIAA0101
  Gene Name: KIAA0101
  ENST ID: ENST00000558008
  CDS Start-End: 68-415
tgtccagtgaaacaccctcggctgggaagtcagttcgttctctcctctcctctcttcttgtttgaacatggtgcggactaaagcagacagtgttccaggcacttacagaaaagtggtggctgctcgagcccccagaaaggtgcttggttcttccacctctgccactaattcgacatcagtttcatcgaggaaagctgaaaataaatatgcaggagggaaccccgtttgcgtgcgcccaactcccaagtggcaaaaaggaattggagaattctttaggttgtcccctaaagattctgaaaaagagaatcagattcctgaagaggcaggaagcagtggcttaggaaaagcaaagagaaaccaggagccacccatcctccagcacactgagcagcaagctggacacacggcacactgatccaaatggagcatgtcctttgcaacctgatcacacaaatgatgaaaaagaatagaactttctcattcatctttgaataacgtctccttgtttaccctggtattctagaatgtaaatttacataaatgtgtttgttccaattagctttgttgaacaggcatttaattaaaaaatttaggtttaaatttagatgttcaaaagtagttgtgaaatttgagaatttgtaagactaattatggtaacttagcttagtattcaatataatgcattgtttggtttcttttaccaaattaagtgtctagttcttgctaaaatcaagtcattgcattgtgttctaattacaagtatgtt

SEQ ID NO: 145754 - DNA, 487 bp, Homo sapiens
  Payload ID: 8905
  Gene Symbol: KIAA0101
  Gene Name: KIAA0101
  ENST ID: ENST00000625619
  CDS Start-End: 140-487
ggctcgggagagaccttggagcgcgcgggaaagagaccaatataaactgtggcgggatagttttcgggtccttgtccagtgaaacaccctcggctgggaagtcagttcgttctctcctctcctctcttcttgtttgaacatggtgcggactaaagcagacagtgttccaggcacttacagaaaagtggtggctgctcgagcccccagaaaggtgcttggttcttccacctctgccactaattcgacatcagtttcatcgaggaaagctgaaaataaatatgcaggagggaaccccgtttgcgtgcgcccaactcccaagtggcaaaaaggaattggagaattctttaggttgtcccctaaagattctgaaaaagagaatcagattcctgaagaggcaggaagcagtggcttaggaaaagcaaagagaaaccaggagccacccatcctccagcacactgagcagcaagctggacacacggcacactga

SEQ ID NO: 145755 - DNA, 2203 bp, Homo sapiens
  Payload ID: 8906
  Gene Symbol: KIAA0141
  Gene Name: KIAA0141
  Uniprot ID: Q14154
  ENST ID: ENST00000194118
  CDS Start-End: 88-1635
ggggcatcgcggcggcctttctagccgctgtcccaagggttggtctcgcgctttcggctgcgagctctctgtggtgctggcagcgacatgtggcgcctcccgggactcctgggccgagctcttccccgtacactgggacctagcctctggagggtgactcctaagtccaccagcccagatgggcctcagactacctcctccactttgctggttcctgtgcctaacctcgacaggtcaggtccccatggcccaggcacgagcgggggtccaaggtcccatggatggaaggatgccttccaatggatgtcttcccgtgtctccccgaacaccctatgggatgccatatcttggggcactctggccgtgctggccctgcagctggcaaggcagatccacttccaggcatccctgccagcaggacctcagcgggtagaacactgctcctggcacagtcccctggaccgtttcttctcatctcccttgtggcacccatgctcctcactgcgacaacacatcctccccagccccgatggcccagctcccaggcacactggcctcagggaacccaggcttggccaggaagaagcctcagctcagccccggaacttctcacacaactctttgagaggagctcgtcctcaggacccctctgaggaaggtcccggtgattttggcttcctgcatgccagtagtagcatcgagtccgaggcaaaaccagcccagcctcagcccactggtgaaaaggaacaagataaatcaaaaactctttcccttgaggaggctgtgacttccattcagcagctcttccagctcagtgtttccatcgctttcaacttcctgggaacagagaacatgaagagtggcgaccacacggcagccttttcttacttccagaaagctgcagcccgcggctacagcaaagcgcagtacaatgcgggcttgtgtcatgagcatggcagaggcacccccagggacattagcaaggcggtcctttattatcagttggctgccagccagggccacagcctggctcagtaccgctatgccaggtgcctactacgagacccagcctcttcgtggaaccctgagcggcagagggcagtgtccttgctgaagcaggctgcagactcaggcttgagagaggcccaagctttcctcggggtgcttttcaccaaggagccctacctggatgagcagagagctgtgaaatatctttggcttgcagccaacaatggggactcacagagcaggtaccaccttggaatttgctatgagaaaggccttggtgtgcagaggaatctgggagaggccttgagatgttaccagcagtcagccgctctgggaaatgaggccgcccaggagaggctgcgagccctcttttccatgggggctgcagccccggggcccagcgacctgacagttacaggactgaagtctttctccagcccctccctctgcagcttgaacaccctgctagcaggaacctcacgcctaccacatgcctcgagcacaggcaaccttggcctcctctgcagaagtgggcatctcggagccagcctggaagcctccagcagggctattcccccacacccctacccactggaaaggagtgttgtaagactaggttttggctaagaacttctcacctcagccctaaagagggagcctgtgggttctcagagagatatcacaatttgagtcccaaagaagaggccagatacccacccaccttcccccaaatcttaagcacctgcgccagtacagtcaagaagaggaaagtgtgtgaagacccaggtctggctctgccacttgcctggccatgtcaccttgaagctgtgacctgactccctatattgtttcctcagttgtagaccaaaggcaatggtgtctgccctcctaccttagaagacaaatgcaagggcatttcaccacagagaggacctttgtgctcactttggcccaggaggcagtgatgctcatggttgcatgactttatgagtcgctgggccagggtgaggacctgggcctcctgactcctggcccagagttcttgtccatcagttcatactgcaattttatgtgaaagcattatgactgtcctacccatgggagagtaaatgtagattgaatgctaggagtcttaaagctggagagtatagattttgaggtccccatttgggaaacatgtgccagaaatgtctag

SEQ ID NO: 145756 - DNA, 4970 bp, Homo sapiens
  Payload ID: 8906
  Gene Symbol: KIAA0141
  Gene Name: KIAA0141
  Uniprot ID: Q14154
  ENST ID: ENST00000432126
  CDS Start-End: 135-1682
cccttctaattggccagctcagagcttcctcgggtactcggccactcggggcatcgcggcggcctttctagccgctgtcccaagggttggtctcgcgctttcggctgcgagctctctgtggtgctggcagcgacatgtggcgcctcccgggactcctgggccgagctcttccccgtacactgggacctagcctctggagggtgactcctaagtccaccagcccagatgggcctcagactacctcctccactttgctggttcctgtgcctaacctcgacaggtcaggtccccatggcccaggcacgagcgggggtccaaggtcccatggatggaaggatgccttccaatggatgtcttcccgtgtctccccgaacaccctatgggatgccatatcttggggcactctggccgtgctggccctgcagctggcaaggcagatccacttccaggcatccctgccagcaggacctcagcgggtagaacactgctcctggcacagtcccctggaccgtttcttctcatctcccttgtggcacccatgctcctcactgcgacaacacatcctccccagccccgatggcccagctcccaggcacactggcctcagggaacccaggcttggccaggaagaagcctcagctcagccccggaacttctcacacaactctttgagaggagctcgtcctcaggacccctctgaggaaggtcccggtgattttggcttcctgcatgccagtagtagcatcgagtccgaggcaaaaccagcccagcctcagcccactggtgaaaaggaacaagataaatcaaaaactctttcccttgaggaggctgtgacttccattcagcagctcttccagctcagtgtttccatcgctttcaacttcctgggaacagagaacatgaagagtggcgaccacacggcagccttttcttacttccagaaagctgcagcccgcggctacagcaaagcgcagtacaatgcgggcttgtgtcatgagcatggcagaggcacccccagggacattagcaaggcggtcctttattatcagttggctgccagccagggccacagcctggctcagtaccgctatgccaggtgcctactacgagacccagcctcttcgtggaaccctgagcggcagagggcagtgtccttgctgaagcaggctgcagactcaggcttgagagaggcccaagctttcctcggggtgcttttcaccaaggagccctacctggatgagcagagagctgtgaaatatctttggcttgcagccaacaatggggactcacagagcaggtaccaccttggaatttgctatgagaaaggccttggtgtgcagaggaatctgggagaggccttgagatgttaccagcagtcagccgctctgggaaatgaggccgcccaggagaggctgcgagccctcttttccatgggggctgcagccccggggcccagcgacctgacagttacaggactgaagtctttctccagcccctccctctgcagcttgaacaccctgctagcaggaacctcacgcctaccacatgcctcgagcacaggcaaccttggcctcctctgcagaagtgggcatctcggagccagcctggaagcctccagcagggctattcccccacacccctacccactggaaaggagtgttgtaagactaggttttggctaaggtgagataaaacatagtccctggtgcctcttaggggccagagcgggcaggaggttggataacaaaaatagagcatcagcaaccctttccaggtagaaattccagcgggagttcaggttcccaagcaatttcacgtacatggctggtaagtgactgatctttccccccgcttggtagcctcacagatgagtcttggatgcattcacagtcatttctggtctgtgcaccaaaggatgcattcagtgacctatgaaaaaccctactgaagggtccagagaccctggtgctcaccttagcctttgtctttgagcaaataacttaccttcttccttcttatgcctgggttttctcacacttaaatctgtactactgtttgccaatgtctgatgtgtgtatccctggttcacaagaagattttagatggtattcaaattaatattttctatttagttatatatttaatgtataatataaaaatatgattagcatattgacctgtagtttgatagatgttctgtctaggataaagctaactgtaaaaaaaaatagtgaatcagtttaaagaaaaacataacgtaaaagtgggcacagatccagagaggtagcaaaaatcacaggggtggttccatgaatggctgacacttaggaaactctgaattaggccatcctcgagactagcccaccattcacctctgttcatcccccgtgggctcataatcgttttcatttcacctttgatttggaaggaagaagtttcttgcccaaatgcctggatgtgtctgcttgactttcagaacttctcacctcagccctaaagagggagcctgtgggttctcagagagatatcacaatttgagtcccaaagaagaggccagatacccacccaccttcccccaaatcttaagcacctgcgccagtacagtcaagaagaggaaagtgtgtgaagacccaggtctggctctgccacttgcctggccatgtcaccttgaagctgtgacctgactccctatattgtttcctcagttgtagaccaaaggcaatggtgtctgccctcctaccttagaagacaaatgcaagggcatttcaccacagagaggacctttgtgctcactttggcccaggaggcagtgatgctcatggttgcatgactttatgagtcgctgggccagggtgaggacctgggcctcctgactcctggcccagagttcttgtccatcagttcatactgcaattttatgtgaaagcattatgactgtcctacccatgggagagtaaatgtagattgaatgctaggagtcttaaagctggagagtatagattttgaggtccccatttgggaaacatgtgccagaaatgtctaggtgtttaataaaacagatattggattatctcatcactcttgcccttgagtattatgggaagagccagggagacgggcagggggagctgaaagctgaggctccgtcctcatctctaaactctccactaaccaatttaaaggatcttaaaagcttctccaggagagagacttaggaaaaaaaaagatttctgagtcagtgctaatgagtccagttactgaatttgtgaatagctattccctggcttctggatgttagcccaagttgaatagcatagatgtggttgagagtggggtctgggagggatagagagcccaccgcccaccccccacaatcccatgactgagtggagaccaaccagcctggccaattcaaaggcaagaagatttgaggggggaaagttgtccacgtttccctctctgcttcccaccccatctctctcaacttcttagtggtcctgccatactttcctagcacctctctttcacccggggagcccaagcgtcctctagctccatctcctcgcctgctccctgcctccttttcagggctgccctgcacactggctcaccactgttggaccctgcacatggccaccttccacagatggcactccttgggagcagggtccttgtctttgtattccagtgtccccagcactgagtgcaaggccccatgcagggtaggaaacctgaggtttcaagctcagggttttaagctgtgcagtgcactaagctctctgccaaaaaacaaacaaaaaaaggtttctgtggttaaataagtttgggaaatgctgcaccagacgtcccctttttatagattcacaatacacatcagcatatttgaggttccaagaagtcctccagtaaagaacttggttaacccaatgttttctctcactgaattgagcccagagcccgtttccctacagattgcttttgagccttcctggggcaccctctgcgtgaaatgtcaccgtgtgccctccctgtggagccccactccccagcctcctcccctctgtggtcattttggattttctgactacttccttctagccatagctggggccgagggctggttcacagtctggccactgggcgtcctgtggtgaaggccagatgcagccctccctgagtggctctccctcccactcagtcactactgagctaagtactgattcaatttggggtgccaaaggttgggggtaggatatttttaagctctccaatttaaaaaggaagggcctctcctgtggaaagggaaggatggcagagtcgtgagaaaggtgttgtcaagggaccaaaaatccttggctgttcagtcactgcggtcttgatccagccccagggggatgggcttcactggcagagctgggtactgctgtgcttttgccattaaaattctgttattaatgactcatcatcagtgccccagaggaagtgtgagaggacgagagggaggtggctcccatcagcagggccagcctgggtcaggatgctgggttaaagcccggcgccctcaccaatgagacctttgtgggaagctctactgcctcagtttccctatccggagatgctgttttcagggagtcctgacactatgatgggaacaaggctatttggtttactatatcattagtgctaatatagtgtggggcactcagatgttcagtaaatatacattcaacaaataagtgagtgattatactcaactccccccacccaatgcccagcaccaagcctacccagcacatagtaggtactttaagtaatttgaatgaataattttaaataacttgaatgaataattctgtattgccccccactcgccgcctatacacacgcacacacgcacacacacacacacggtttcctgtgctacttctggcacttagtaattattcaataaacacaaaatgtttgttgca

SEQ ID NO: 145757 - DNA, 998 bp, Homo sapiens
  Payload ID: 8906
  Gene Symbol: KIAA0141
  Gene Name: KIAA0141
  ENST ID: ENST00000508751
  CDS Start-End: 33-998
ggctgcgagctctctgtggtgctggcagcgacatgtggcgcctcccgggactcctgggccgagctcttccccgtacactgggacctagcctctggagggtgactcctaagtccaccagcccagatgggcctcagactacctcctccactttgctggttcctgtgcctaacctcgacaggtcaggtccccatggcccaggcacgagcgggggtccaaggtcccatggatggaaggatgccttccaatggatgtcttcccgtgtctccccgaacaccctatgggatgccatatcttggggcactctggccgtgctggccctgcagctggcaaggcagatccacttccaggcatccctgccagcaggacctcagcgggtagaacactgctcctggcacagtcccctggaccgtttcttctcatctcccttgtggcacccatgctcctcactgcgacaacacatcctccccagccccgatggcccagctcccaggcacactggcctcagggaacccaggcttggccaggaagaagcctcagctcagccccggaacttctcacacaactctttgagaggagctcgtcctcaggacccctctgaggaaggtcccggtgattttggcttcctgcatgccagtagtagcatcgagtccgaggcaaaaccagcccagcctcagcccactggtgaaaaggaacaagataaatcaaaaactctttcccttgaggaggctgtgacttccattcagcagctcttccagctcagtgtttccatcgctttcaacttcctgggaacagagaacatgaagagtggcgaccacacggcagccttttcttacttccagaaagctgcagcccgcggctacagcaaagcgcagtacaatgcgggcttgtgtcatgagcatggcagaggcacccccagggacattagcaagttggctgccagccagggccacagcctggctcagtaccgctatgccaggtgcctactacgagacccagcc

SEQ ID NO: 145758 - DNA, 1342 bp, Homo sapiens
  Payload ID: 8906
  Gene Symbol: KIAA0141
  Gene Name: KIAA0141
  ENST ID: ENST00000507481
  CDS Start-End: 1-651
gcggtcctttattatcagttggctgccagccagggccacagcctggctcagtaccgctatgccaggtgcctactacgagacccagcctcttcgtggaaccctgagcggcagagggcagtgtccttgctgaagcaggctgcagactcaggcttgagagaggcccaagctttcctcggggtgcttttcaccaaggagccctacctggatgagcagagagctgtgaaatatctttggcttgcagccaacaatggggactcacagagcaggtaccaccttggaatttgctatgagaaaggccttggtgtgcagaggaatctgggagaggccttgagatgttaccagcagtcagccgctctgggaaatgaggccgcccaggagaggctgcgagccctcttttccatgggggctgcagccccggggcccagcgacctgacagttacaggactgaagtctttctccagcccctccctctgcagcttgaacaccctgctagcaggaacctcacgcctaccacatgcctcgagcacaggcaaccttggcctcctctgcagaagtgggcatctcggagccagcctggaagcctccagcagggctattcccccacacccctacccactggaaaggagtgttgtaagactaggttttggctaagaaattccagcgggagttcaggttcccaagcaatttcacgtacatggctggaagaagtttcttgcccaaatgcctggatgtgtctgcttgactttcagaacttctcacctcagccctaaagagggagcctgtgggttctcagagagatatcacaatttgagtcccaaagaagaggccagatacccacccaccttcccccaaatcttaagcacctgcgccagtacagtcaagaagaggaaagtgtgtgaagacccaggtctggctctgccacttgcctggccatgtcaccttgaagctgtgacctgactccctatattgtttcctcagttgtagaccaaaggcaatggtgtctgccctcctaccttagaagacaaatgcaagggcatttcaccacagagaggacctttgtgctcactttggcccaggaggcagtgatgctcatggttgcatgactttatgagtcgctgggccagggtgaggacctgggcctcctgactcctggcccagagttcttgtccatcagttcatactgcaattttatgtgaaagcattatgactgtcctacccatgggagagtaaatgtagattgaatgctaggagtcttaaagctggagagtatagattttgaggtccccatttgggaaacatgtgccagaaatgtctaggtgtttaataaaacagatattggatt

SEQ ID NO: 145759 - DNA, 4187 bp, Homo sapiens
  Payload ID: 8907
  Gene Symbol: KIAA0196
  Gene Name: KIAA0196
  Uniprot ID: Q12768
  ENST ID: ENST00000318410
  CDS Start-End: 351-3830
agccgtcgccggcgagtggtcacatgatgcccctccctgctcccagccgcttcggtcatgtgaccgcctggggagtcaggggcggaagtcggggtctgacccgctccaggtccgggactgcggatagaagaggaccgccgccttgagggaggggtggaaactgggtgccggctccgcgcgcgacctccggccctgcgcgtgcgccgtggcgcggcccggctgacaggttctttaatggaggagccaatctctctgcacacctggtttcatctaataatatacagacaccagctctgaggccagttaatcatccccagtgtccaggcacagagtagtcggtccgcctcacaatgttggactttctagccgagaacaacctctgtggccaagcaatcctaaggattgtttcctgtggtaatgccatcattgctgaacttttgagactctctgagtttattcctgctgtgttcaggttaaaagacagagctgatcaacagaaatatggagatatcatatttgatttcagctattttaagggtccagaattatgggaaagcaaactggatgctaagccagagctacaggatttagatgaagaatttcgtgaaaacaacatagaaattgtgaccagattttatttagcatttcaaagtgtacataaatatattgtagacttaaacagatatctagatgatctcaatgaaggggtttatattcagcaaaccttagaaactgtgcttctcaatgaagatggaaaacaacttctatgtgaagcactgtacttatatggagttatgctactggtcattgaccaaaagattgaaggagaagtcagagagaggatgctggtttcttactaccgatacagtgctgctcgatcttctgctgattcaaatatggacgatatttgtaagctgcttcgaagtacaggttattctagccaaccaggtgccaaaagaccatccaactatcccgagagctatttccagagagtgcctatcaacgaatccttcatcagtatggtcattggtcgactgagatctgatgatatttacaaccaggtctcagcgtatcctttgccggagcatcgcagcacagccctggcaaaccaagctgccatgctgtacgtgattctctactttgagccttccatccttcacacccatcaagcaaaaatgagagagatagtggataaatactttccagataattgggtaattagtatttacatggggatcacagttaatctagtagatgcttgggaaccttacaaagctgcaaaaactgctttaaataataccctggacctttcaaatgtcagagaacaggcaagcagatatgctactgtcagtgaaagagtgcatgctcaagtgcagcaatttctaaaagaaggttatttaagggaggagatggttctggacaatatcccaaagcttctgaactgcctgagagactgcaatgttgccatccgatggctgatgcttcatacagcagactcagcctgtgacccaaacaacaaacgccttcgtcaaatcaaggaccagattctaacagactctcggtacaatcccaggatcctcttccagctgctgttagatactgcacaatttgagtttatactcaaagagatgttcaagcaaatgctttcagaaaagcaaaccaaatgggagcattacaagaaagagggttcggagcggatgactgagcttgctgatgtcttttcaggagtgaaacccctaaccagagtggagaaaaatgaaaaccttcaagcttggttcagagagatctcaaaacaaatattgtctttaaattatgatgattctactgctgcgggcagaaaaactgtacaactgatacaagctttggaagaggttcaagaattccaccagttggaatccaatctgcaagtatgtcagtttcttgccgatactcgaaagtttcttcatcaaatgatcagaaccattaacattaaagaggaggttctgatcacaatgcagatcgttggggacctttctttcgcttggcagttgattgacagtttcacatccatcatgcaagaaagcataagggtaaatccatccatggttactaaactcagagctaccttcctaaagcttgcctctgccctcgatctgccccttcttcgtattaatcaggcaaatagccccgacctgctcagcgtgtcacagtactattctggagagttggtatcctatgtgagaaaagttttgcagatcatcccagaaagcatgtttacatctcttctaaagatcataaagcttcagacccacgacattattgaagtgcctacccgcctggacaaagacaagctgagggactatgctcagctaggcccacgatacgaggttgccaagcttactcatgctatttccatttttactgaaggcatcttaatgatgaaaacgactttggttggcatcatcaaggtggatccaaagcagttgctggaagatggaataaggaaagagcttgtgaagcgcgttgcctttgccctgcataggggactgatattcaaccctcgagccaagccaagtgaattgatgcccaagctgaaagagttgggagcgaccatggatggattccatcgttcttttgaatacatacaggactatgtcaacatttatggtctgaagatttggcaggaagaagtatctcgtatcataaattacaacgtggagcaagagtgtaataactttctaagaacgaagattcaagattggcaaagcatgtaccagtccactcatattccaatacccaagtttacccctgtggatgagtctgtaacgtttattggtcgactctgcagagaaatcctgcggatcacagacccaaaaatgacatgtcacatagaccagctgaacacttggtatgatatgaaaactcatcaggaagtgaccagcagccgcctcttctcagaaatccagaccaccttgggaacctttggtctaaatggcttagacaggcttctgtgctttatgattgtaaaagagttacagaatttcctcagtatgtttcagaaaattatcctgagagacagaactgttcaggacactttaaaaaccctcatgaatgctgtcagtcccctaaaaagtattgtcgcaaattcaaataaaatttatttttccgccattgccaaaacacagaagatttggactgcgtatctcgaggctataatgaaggttgggcagatgcagattctgagacaacagattgccaatgaattaaattattcttgtcggtttgattctaaacatctggcagctgctctggagaatctcaataaggctctcctagcagacattgaagcccactatcaggacccttcacttccttaccccaaagaagataacacacttttatatgaaatcacagcctatctggaggcagctggcattcacaacccactgaataagatatacataacaacaaagcgcttaccctattttccaattgtaaactttctatttttgatcgctcagttgccaaaacttcaatacaacaaaaatctgggaatggtctgccgaaaaccgaccgacccggttgattggccaccacttgtcctgggactgctcactctgctgaagcagttccattcccggtacaccgagcagttcctggcgctgattggccagtttatctgctccacggtggagcagtgtacaagccagaagatacctgaaattcctgcagatgttgtgggtgcccttctgttcctggaggattatgttcggtacacaaagctacccaggagggttgctgaagcacatgtgcctaatttcatttttgatgagttcagaacagtgctgtaactgtttttcctacttcttcaatggaaggattgtccttagatcttcccaccatcacaaatgaatttgaagatgaaaagaaactcagttgctcatacaactgcattttttctgtctattatgggaaacatcagacgttctgagtaagatatatctcatggcattagttaatataactgatattgtttaaatcatggtattacatgcaatttatatcagataaaagcagaacacatttttgtactgcctctcttaaatgctgaatgtaactgttatgtataaatccatttagttttatgttctaaagaactatttgtgcaactccagattttcagtaaaatagtattactagtacccaaa

SEQ ID NO: 145760 - DNA, 859 bp, Homo sapiens
  Payload ID: 8907
  Gene Symbol: KIAA0196
  Gene Name: KIAA0196
  ENST ID: ENST00000523297
  CDS Start-End: 369-859
actgcggatagaagaggaccgccgccttgagggaggggtggaaactgggtgccggctccgcgcgcgacctccggccctgcgcgtgcgccgtggcgcggcccggctgacagggtccagaattatgggaaagcaaactggatgctaagccagagctacaggatttagatgaagaatttcgtgaaaacaacatagaaattgtgaccagattttatttagcatttcaaagtgtacataaatatattgtagacttaaacagatatctagatgatctcaatgaaggggtttatattcagcaaaccttagaaactgtgcttctcaatgaagatggaaaacaacttctatgtgaagcactgtacttatatggagttatgctactggtcattgaccaaaagattgaaggagaagtcagagagaggatgctggtttcttactaccgatacagtgctgctcgatcttctgctgattcaaatatggacgatatttgtaagctgcttcgaagtacaggttattctagccaaccaggtgccaaaagaccatccaactatcccgagagctatttccagagagtgcctatcaacgaatccttcatcagtatggtcattggtcgactgagatctgatgatatttacaaccaggtctcagcgtatcctttgccggagcatcgcagcacagccctggcaaaccaagctgccatgctgtacgtgattctctactttgagccttccatccttcacacccatcaagcaaaaatgagagagatagtggataaatactttccagataattgggtaattagtatttacatggggatcacagttaatctagtagatgcttgggaaccttacaaagctgcaaaaac

SEQ ID NO: 145761 - DNA, 3667 bp, Homo sapiens
  Payload ID: 8907
  Gene Symbol: KIAA0196
  Gene Name: KIAA0196
  ENST ID: ENST00000517845
  CDS Start-End: 282-3317
atgtgaccgcctggggagtcaggggcggaagtcggggtctgacccgctccaggtccgggactgcggatagaagaggaccgccgccttgagggaggggtggaaactgggtgccggctccgcgcgcgacctccggccctgcgcgtgcgccgtggcgcggcccggctgacagatatctagatgatctcaatgaaggggtttatattcagcaaaccttagaaactgtgcttctcaatgaagatggaaaacaacttctatgtgaagcactgtacttatatggagttatgctactggtcattgaccaaaagattgaaggagaagtcagagagaggatgctggtttcttactaccgatacagtgctgctcgatcttctgctgattcaaatatggacgatatttgtaagctgcttcgaagtacaggttattctagccaaccaggtgccaaaagaccatccaactatcccgagagctatttccagagagtgcctatcaacgaatccttcatcagtatggtcattggtcgactgagatctgatgatatttacaaccaggtctcagcgtatcctttgccggagcatcgcagcacagccctggcaaaccaagctgccatgctgtacgtgattctctactttgagccttccatccttcacacccatcaagcaaaaatgagagagatagtggataaatactttccagataattgggtaattagtatttacatggggatcacagttaatctagtagatgcttgggaaccttacaaagctgcaaaaactgctttaaataataccctggacctttcaaatgtcagagaacaggcaagcagatatgctactgtcagtgaaagagtgcatgctcaagtgcagcaatttctaaaagaaggttatttaagggaggagatggttctggacaatatcccaaagcttctgaactgcctgagagactgcaatgttgccatccgatggctgatgcttcatacagcagactcagcctgtgacccaaacaacaaacgccttcgtcaaatcaaggaccagattctaacagactctcggtacaatcccaggatcctcttccagctgctgttagatactgcacaatttgagtttatactcaaagagatgttcaagcaaatgctttcagaaaagcaaaccaaatgggagcattacaagaaagagggttcggagcggatgactgagcttgctgatgtcttttcaggagtgaaacccctaaccagagtggagaaaaatgaaaaccttcaagcttggttcagagagatctcaaaacaaatattgtctttaaattatgatgattctactgctgcgggcagaaaaactgtacaactgatacaagctttggaagaggttcaagaattccaccagttggaatccaatctgcaagtatgtcagtttcttgccgatactcgaaagtttcttcatcaaatgatcagaaccattaacattaaagaggaggttctgatcacaatgcagatcgttggggacctttctttcgcttggcagttgattgacagtttcacatccatcatgcaagaaagcataagggtaaatccatccatggttactaaactcagagctaccttcctaaagcttgcctctgccctcgatctgccccttcttcgtattaatcaggcaaatagccccgacctgctcagcgtgtcacagtactattctggagagttggtatcctatgtgagaaaagttttgcagatcatcccagaaagcatgtttacatctcttctaaagatcataaagcttcagacccacgacattattgaagtgcctacccgcctggacaaagacaagctgagggactatgctcagctaggcccacgatacgaggttgccaagcttactcatgctatttccatttttactgaaggcatcttaatgatgaaaacgactttggttggcatcatcaaggtggatccaaagcagttgctggaagatggaataaggaaagagcttgtgaagcgcgttgcctttgccctgcataggggactgatattcaaccctcgagccaagccaagtgaattgatgcccaagctgaaagagttgggagcgaccatggatggattccatcgttcttttgaatacatacaggactatgtcaacatttatggtctgaagatttggcaggaagaagtatctcgtatcataaattacaacgtggagcaagagtgtaataactttctaagaacgaagattcaagattggcaaagcatgtaccagtccactcatattccaatacccaagtttacccctgtggatgagtctgtaacgtttattggtcgactctgcagagaaatcctgcggatcacagacccaaaaatgacatgtcacatagaccagctgaacacttggtatgatatgaaaactcatcaggaagtgaccagcagccgcctcttctcagaaatccagaccaccttgggaacctttggtctaaatggcttagacaggcttctgtgctttatgattgtaaaagagttacagaatttcctcagtatgtttcagaaaattatcctgagagacagaactgttcaggacactttaaaaaccctcatgaatgctgtcagtcccctaaaaagtattgtcgcaaattcaaataaaatttatttttccgccattgccaaaacacagaagatttggactgcgtatctcgaggctataatgaaggttgggcagatgcagattctgagacaacagattgccaatgaattaaattattcttgtcggtttgattctaaacatctggcagctgctctggagaatctcaataaggctctcctagcagacattgaagcccactatcaggacccttcacttccttaccccaaagaagataacacacttttatatgaaatcacagcctatctggaggcagctggcattcacaacccactgaataagatatacataacaacaaagcgcttaccctattttccaattgtaaactttctatttttgatcgctcagttgccaaaacttcaatacaacaaaaatctgggaatggtctgccgaaaaccgaccgacccggttgattggccaccacttgtcctgggactgctcactctgctgaagcagttccattcccggtacaccgagcagttcctggcgctgattggccagtttatctgctccacggtggagcagtgtacaagccagaagatacctgaaattcctgcagatgttgtgggtgcccttctgttcctggaggattatgttcggtacacaaagctacccaggagggttgctgaagcacatgtgcctaatttcatttttgatgagttcagaacagtgctgtaactgtttttcctacttcttcaatggaaggattgtccttagatcttcccaccatcacaaatgaatttgaagatgaaaagaaactcagttgctcatacaactgcattttttctgtctattatgggaaacatcagacgttctgagtaagatatatctcatggcattagttaatataactgatattgtttaaatcatggtattacatgcaatttatatcagataaaagcagaacacatttttgtactgcctctcttaaatgctgaatgtaactgttatgtataaatccatttagttttatgttctaaagaactatttgtgcaactccagattttcagtaaaatagtattactagt

SEQ ID NO: 145762 - DNA, 3322 bp, Homo sapiens
  Payload ID: 8908
  Gene Symbol: KIAA0226L
  Gene Name: KIAA0226-like
  ENST ID: ENST00000378781
  CDS Start-End: 420-1937
ggatttctaggaggaccggcagaggcgcgcataggtgcgtggtgctgggcccgggcgccgcggcaccggtgtaggagcgcgcatctccagagtttcttccatctgggcgacgtctcggtgcctgcggcgggaacggcgctttgcttccctgaggagcttctagagagctacggtggcccccgtgtgggaggcggggggcgtggcggcgtcggggcgtcgctgtcccctcctcggtagctctcctccctcccctttctgctgttaccgggagcgcggtggccacggaacgctgcccggagccgcgcgagggaggacccgacgcgcggcgtttacccagcgcagcgttccaccgctcgggtttggctggataaaataaaaaatggggatattgacctcctgtcactactgcatggactttgatggtttccaatcattactttctcctctgtgtcaatctgcctcttcgagaaattcatactcctggtgctgttcaagtcagtagaagaaccatttcttcgaattccttctcaccagaggtatttgtgctgcctgttgatgtagaaaaggaaaatgcccacttttatgttgcagatatgattatatcagcaatggagaaaatgaagtgtaacattctgagtcaacagcagacagagagctggagtaaagaagtcagtgggttacttgggagtgatcagcctgactctgaaatgacttttgataccaacataaagcaagagtctgggtcttctacttcttcatacagtggctatgaaggttgtgctgtgttacaggtcagcccagtgactgaaacacgtacttaccatgatgtgaaagagatttgcaaatgcgatgttgatgaatttgttattttagagcttggagattttaatgatatcacagaaacctgtagctgttcctgcagctcctctaagagtgtcacttatgagccagacttcaattctgcagaactattagccaaagagctgtaccgcgtgttccagaagtgctggatactgtcagtagttaattctcagctggcaggttccctgagtgcagctggctcgatagtcgtaaatgaagagtgtgtccgaaaagactttgaatccagtatgaatgtagtacaggaaattaaatttaagtctaggatcagagggactgaagactgggctcctcctagatttcaaatcatatttaatattcatccaccactcaagagggaccttgtggtggcagcccagaattttttctgtgccggctgtggaactccagtagagcctaagtttgtgaagcggctccggtactgcgaatacctagggaagtatttctgtgactgctgccactcatatgcagagtcgtgcatccctgcccgaatcctgatgatgtgggacttcaagaagtactacgtcagcaatttctccaaacagctgctcgacagcatatggcaccagcccattttcaatttgctgagcatcggccaaagcctgtatgcgaaagccaaggagctggacagagtgaaggaaattcaggagcagctcttccatatcaagaagctgttgaagacctgtaggtttgctaacagtgcattaaaggagttcgagcaggtgccgggacacttgactgatgagctccacctgttctcccttgaggacctggtcaggatcaagaaagggctgctggcacccttactcaaggacattctgaaagcttcccttgcacatgtggctggctgtgagctgtgtcaaggaaagggctttatttgtgaattttgccagaatacgactgtcatcttcccatttcagacagcaacatgtagaagatgttcagcgtgcagggcttgctttcacaaacagtgcttccagtcctccgagtgcccccggtgtgcgaggatcacagcgaggagaaaacttctggaaagtgtggcctctgcagcaacatgatgcccctgagtactgtgaaaaagactgttcaacatgccttatgataacaccgatttgtgtctattattggtgacattgttttagatattgggtattgtatattaaggaaaaagatggtctatattctctttattgcatatacttaatgtttcaaaagaatgcagattctgtgtttaagcacagggctgatagttgtggttttgtttacaaatgttctgttttggctgctattggttttttaaagaggttttttatacttttgtatttgaatagttatgtttcactgatgctgagccagtttgtatgtgtgtgcatatatgtgaactgtaactgacaagatgaattactcagtttctctttctctaaagcttgtttgatgaaactggttggtcctttcagtgaacaaaaatatgaccccaaatctgtttgctctggcttttatttcttcaggaagcagacttccacttaaatgccattttgtgattgtgtcaatcatacacattttatttacttcagagtttgaatagagagtacacatttcttctgcagatttatttcatgatgagtttgagttgcttagcagggcgtgtgggtcccgttgaagtgcagtttgaagcaactgcttctagatggcactctttcaggtggcacaaattgaacctgtatttgtcatctctgttccacacactgcaatgtcaagggatgcagaagtgagtagaattccatccctgcccttgaggatcttgctttaacagatgtaaaactgaacataaggtatttgcagatttaaacgaactgggggaaataatgaacagtgtgattctagtaataacattaaaatcatagacattgactaataaggttaaatgaatcacaaaacctttatgaatttcttttttctaatagttcttatatgttttcctgaaacatgtgagcctattcttttttcttctactttctatatactttctcccacttgagaaaggggccttgaggctgggtcccttcatggtatacctttagactgaacggtttgcaacctagggcttgggcattacattccctgggattcacatgccctaactaaacctaccttgattttctcagacagcacaggcaggcaataaagcgtcacagattgtcccctaaccccatccagccatgtgtatgagtgtgttttattcaatgggatagtactgagcacatgaaagaaatgaatgacttctgtcaatctcttttcattcagtcttctcattctgtcaattgttttctcatccgcagtgcctctgccagaactgtgctcacatccattatttaagccagatcttttctaagtattatagaagtgtagaggcacatagaataaataaaaccagacttcaaac

SEQ ID NO: 145763 - DNA, 2361 bp, Homo sapiens
  Payload ID: 8908
  Gene Symbol: KIAA0226L
  Gene Name: KIAA0226-like
  Uniprot ID: Q9H714
  ENST ID: ENST00000378784
  CDS Start-End: 153-1940
ggagcgcggtggccacggaacgctgcccggagccgcgcgagggaggacccgacgcgcggcgtttacccagcgcagcgttccaccgctcgggtttggctggataaaataaaaaatggggatattgacctcctgtcactactgcatggactttgatggtttccaatcattactttctcctctgtgtcaatctgcctcttcgagaaattcatactcctggcccttcaccttcgtgcctcggggactccctggcagagacaacgttgtctgaggataccacagactccgttggcagcgcttctccccatggctcgagtgaaaagagtagcagcttctctctgtcctcaacagaggtacacatggtccgcccaggatactctcatcgggtgtctctgcccacaagccctgggattttggccacctccccatatcctgagactgacagtgctttttttgagccttcccatctgacatctgctgctgatgaaggtgctgttcaagtcagtagaagaaccatttcttcgaattccttctcaccagaggtatttgtgctgcctgttgatgtagaaaaggaaaatgcccacttttatgttgcagatatgattatatcagcaatggagaaaatgaagtgtaacattctgagtcaacagcagacagagagctggagtaaagaagtcagtgggttacttgggagtgatcagcctgactctgaaatgacttttgataccaacataaagcaagagtctgggtcttctacttcttcatacagtggctatgaaggttgtgctgtgttacaggtcagcccagtgactgaaacacgtacttaccatgatgtgaaagagatttgcaaatgcgatgttgatgaatttgttattttagagcttggagattttaatgatatcacagaaacctgtagctgttcctgcagctcctctaagagtgtcacttatgagccagacttcaattctgcagaactattagccaaagagctgtaccgcgtgttccagaagtgctggatactgtcagtagttaattctcagctggcaggttccctgagtgcagctggctcgatagtcgtaaatgaagagtgtgtccgaaaagactttgaatccagtatgaatgtagtacaggaaattaaatttaagtctaggatcagagggactgaagactgggctcctcctagatttcaaatcatatttaatattcatccaccactcaagagggaccttgtggtggcagcccagaattttttctgtgccggctgtggaactccagtagagcctaagtttgtgaagcggctccggtactgcgaatacctagggaagtatttctgtgactgctgccactcatatgcagagtcgtgcatccctgcccgaatcctgatgatgtgggacttcaagaagtactacgtcagcaatttctccaaacagctgctcgacagcatatggcaccagcccattttcaatttgctgagcatcggccaaagcctgtatgcgaaagccaaggagctggacagagtgaaggaaattcaggagcagctcttccatatcaagaagctgttgaagacctgtaggtttgctaacagtgcattaaaggagttcgagcaggtgccgggacacttgactgatgagctccacctgttctcccttgaggacctggtcaggatcaagaaagggctgctggcacccttactcaaggacattctgaaagcttcccttgcacatgtggctggctgtgagctgtgtcaaggaaagggctttatttgtgaattttgccagaatacgactgtcatcttcccatttcagacagcaacatgtagaagatgttcagcgtgcagggcttgctttcacaaacagtgcttccagtcctccgagtgcccccggtgtgcgaggatcacagcgaggagaaaacttctggaaagtgtggcctctgcagcaacatgatgcccctgagtactgtgaaaaagactgttcaacatgccttatgataacaccgatttgtgtctattattggtgacattgttttagatattgggtattgtatattaaggaaaaagatggtctatattctctttattgcatatacttaatgtttcaaaagaatgcagattctgtgtttaagcacagggctgatagttgtggttttgtttacaaatgttctgttttggctgctattggttttttaaagaggttttttatacttttgtatttgaatagttatgtttcactgatgctgagccagtttgtatgtgtgtgcatatatgtgaactgtaactgacaagatgaattactcagtttctctttctctaaagcttgtttgatgaaactggttggtcctttcagtgaacaaaaatatgaccccaaa

SEQ ID NO: 145764 - DNA, 2731 bp, Homo sapiens
  Payload ID: 8908
  Gene Symbol: KIAA0226L
  Gene Name: KIAA0226-like
  Uniprot ID: Q9H714
  ENST ID: ENST00000378787
  CDS Start-End: 476-2383
accggcagaggcgcgcataggtgcgtggtgctgggcccgggcgccgcggcaccggtgtaggagcgcgcatctccagagtttcttccatctgggcgacgtctcggtgcctgcggcgggaacggcgctttgcttccctgaggagcttctagagagctacggtggcccccgtgtgggaggcggggggcgtggcggcgtcggggcgtcgctgtcccctcctcggtagctctcctccctcccctttctgctgttaccgggagcgcggtggccacggaacgctgcccggagccgcgcgagggaggacccgacgcgcggcgtttacccagcgcagcgttccaccgctcgggtttggctggaatagctctccagacccccagctggccatgtggtgagttcagggcccaaatcaagtagtaccagcaatcagggaactcctatctgttttgaatggattcacaccagccacaagcctggaaagatggtgtcacaatctacagtcaggcaggattctcctgtggagccctgggaagggatcagcgatcactctggcattattgatggttcgcccagactcctgaacactgaccatcctccttgccaattagacatcaggctcatgaggcacaaagctgtctggattaacccccaggatgtgcagcaacagccgcaggacttgcaatctcaggtgccagcagcagggaacagtgggacccattttgtgacagatgctgcctctccctcaggcccttcaccttcgtgcctcggggactccctggcagagacaacgttgtctgaggataccacagactccgttggcagcgcttctccccatggctcgagtgaaaagagtagcagcttctctctgtcctcaacagaggtacacatggtccgcccaggatactctcatcgggtgtctctgcccacaagccctgggattttggccacctccccatatcctgagactgacagtgctttttttgagccttcccatctgacatctgctgctgatgaaggtgctgttcaagtcagtagaagaaccatttcttcgaattccttctcaccagaggtatttgtgctgcctgttgatgtagaaaaggaaaatgcccacttttatgttgcagatatgattatatcagcaatggagaaaatgaagtgtaacattctgagtcaacagcagacagagagctggagtaaagaagtcagtgggttacttgggagtgatcagcctgactctgaaatgacttttgataccaacataaagcaagagtctgggtcttctacttcttcatacagtggctatgaaggttgtgctgtgttacaggtcagcccagtgactgaaacacgtacttaccatgatgtgaaagagatttgcaaatgcgatgttgatgaatttgttattttagagcttggagattttaatgatatcacagaaacctgtagctgttcctgcagctcctctaagagtgtcacttatgagccagacttcaattctgcagaactattagccaaagagctgtaccgcgtgttccagaagtgctggatactgtcagtagttaattctcagctggcaggttccctgagtgcagctggctcgatagtcgtaaatgaagagtgtgtccgaaaagactttgaatccagtatgaatgtagtacaggaaattaaatttaagtctaggatcagagggactgaagactgggctcctcctagatttcaaatcatatttaatattcatccaccactcaagagggaccttgtggtggcagcccagaattttttctgtgccggctgtggaactccagtagagcctaagtttgtgaagcggctccggtactgcgaatacctagggaagtatttctgtgactgctgccactcatatgcagagtcgtgcatccctgcccgaatcctgatgatgtgggacttcaagaagtactacgtcagcaatttctccaaacagctgctcgacagcatatggcaccagcccattttcaatttgctgagcatcggccaaagcctgtatgcgaaagccaaggagctggacagagtgaaggaaattcaggagcagctcttccatatcaagaagctgttgaagacctgtaggtttgctaacagctgtgtcaaggaaagggctttatttgtgaattttgccagaatacgactgtcatcttcccatttcagacagcaacatgtagaagatgttcagcgtgcagggcttgctttcacaaacagtgcttccagtcctccgagtgcccccggtgtgcgaggatcacagcgaggagaaaacttctggaaagtgtggcctctgcagcaacatgatgcccctgagtactgtgaaaaagactgttcaacatgccttatgataacaccgatttgtgtctattattggtgacattgttttagatattgggtattgtatattaaggaaaaagatggtctatattctctttattgcatatacttaatgtttcaaaagaatgcagattctgtgtttaagcacagggctgatagttgtggttttgtttacaaatgttctgttttggctgctattggttttttaaagaggttttttatacttttgtatttgaatagttatgtttcactgatgctgagccagtttgtatgtgtgtgcatatatgtgaactgtaactgacaagatgaattactcagtttctctttctctaaagcttgtttgatgaaactggttggtcctttcagtgaacaaaaatatgaccccaaa

SEQ ID NO: 145765 - DNA, 3206 bp, Homo sapiens
  Payload ID: 8908
  Gene Symbol: KIAA0226L
  Gene Name: KIAA0226-like
  ENST ID: ENST00000378797
  CDS Start-End: 478-1821
ggatttctaggaggaccggcagaggcgcgcataggtgcgtggtgctgggcccgggcgccgcggcaccggtgtaggagcgcgcatctccagagtttcttccatctgggcgacgtctcggtgcctgcggcgggaacggcgctttgcttccctgaggagcttctagagagctacggtggcccccgtgtgggaggcggggggcgtggcggcgtcggggcgtcgctgtcccctcctcggtagctctcctccctcccctttctgctgttaccgggagcgcggtggccacggaacgctgcccggagccgcgcgagggaggacccgacgcgcggcgtttacccagcgcagcgttccaccgctcgggtttggctgggtgctgttcaagtcagtagaagaaccatttcttcgaattccttctcaccagaggtatttgtgctgcctgttgatgtagaaaaggaaaatgcccacttttatgttgcagatatgattatatcagcaatggagaaaatgaagtgtaacattctgagtcaacagcagacagagagctggagtaaagaagtcagtgggttacttgggagtgatcagcctgactctgaaatgacttttgataccaacataaagcaagagtctgggtcttctacttcttcatacagtggctatgaaggttgtgctgtgttacaggtcagcccagtgactgaaacacgtacttaccatgatgtgaaagagatttgcaaatgcgatgttgatgaatttgttattttagagcttggagattttaatgatatcacagaaacctgtagctgttcctgcagctcctctaagagtgtcacttatgagccagacttcaattctgcagaactattagccaaagagctgtaccgcgtgttccagaagtgctggatactgtcagtagttaattctcagctggcaggttccctgagtgcagctggctcgatagtcgtaaatgaagagtgtgtccgaaaagactttgaatccagtatgaatgtagtacaggaaattaaatttaagtctaggatcagagggactgaagactgggctcctcctagatttcaaatcatatttaatattcatccaccactcaagagggaccttgtggtggcagcccagaattttttctgtgccggctgtggaactccagtagagcctaagtttgtgaagcggctccggtactgcgaatacctagggaagtatttctgtgactgctgccactcatatgcagagtcgtgcatccctgcccgaatcctgatgatgtgggacttcaagaagtactacgtcagcaatttctccaaacagctgctcgacagcatatggcaccagcccattttcaatttgctgagcatcggccaaagcctgtatgcgaaagccaaggagctggacagagtgaaggaaattcaggagcagctcttccatatcaagaagctgttgaagacctgtaggtttgctaacagtgcattaaaggagttcgagcaggtgccgggacacttgactgatgagctccacctgttctcccttgaggacctggtcaggatcaagaaagggctgctggcacccttactcaaggacattctgaaagcttcccttgcacatgtggctggctgtgagctgtgtcaaggaaagggctttatttgtgaattttgccagaatacgactgtcatcttcccatttcagacagcaacatgtagaagatgttcagcgtgcagggcttgctttcacaaacagtgcttccagtcctccgagtgcccccggtgtgcgaggatcacagcgaggagaaaacttctggaaagtgtggcctctgcagcaacatgatgcccctgagtactgtgaaaaagactgttcaacatgccttatgataacaccgatttgtgtctattattggtgacattgttttagatattgggtattgtatattaaggaaaaagatggtctatattctctttattgcatatacttaatgtttcaaaagaatgcagattctgtgtttaagcacagggctgatagttgtggttttgtttacaaatgttctgttttggctgctattggttttttaaagaggttttttatacttttgtatttgaatagttatgtttcactgatgctgagccagtttgtatgtgtgtgcatatatgtgaactgtaactgacaagatgaattactcagtttctctttctctaaagcttgtttgatgaaactggttggtcctttcagtgaacaaaaatatgaccccaaatctgtttgctctggcttttatttcttcaggaagcagacttccacttaaatgccattttgtgattgtgtcaatcatacacattttatttacttcagagtttgaatagagagtacacatttcttctgcagatttatttcatgatgagtttgagttgcttagcagggcgtgtgggtcccgttgaagtgcagtttgaagcaactgcttctagatggcactctttcaggtggcacaaattgaacctgtatttgtcatctctgttccacacactgcaatgtcaagggatgcagaagtgagtagaattccatccctgcccttgaggatcttgctttaacagatgtaaaactgaacataaggtatttgcagatttaaacgaactgggggaaataatgaacagtgtgattctagtaataacattaaaatcatagacattgactaataaggttaaatgaatcacaaaacctttatgaatttcttttttctaatagttcttatatgttttcctgaaacatgtgagcctattcttttttcttctactttctatatactttctcccacttgagaaaggggccttgaggctgggtcccttcatggtatacctttagactgaacggtttgcaacctagggcttgggcattacattccctgggattcacatgccctaactaaacctaccttgattttctcagacagcacaggcaggcaataaagcgtcacagattgtcccctaaccccatccagccatgtgtatgagtgtgttttattcaatgggatagtactgagcacatgaaagaaatgaatgacttctgtcaatctcttttcattcagtcttctcattctgtcaattgttttctcatccgcagtgcctctgccagaactgtgctcacatccattatttaagccagatcttttctaagtattatagaagtgtagaggcacatagaataaataaaaccagacttcaaac

SEQ ID NO: 145766 - DNA, 3956 bp, Homo sapiens
  Payload ID: 8908
  Gene Symbol: KIAA0226L
  Gene Name: KIAA0226-like
  Uniprot ID: Q9H714
  ENST ID: ENST00000389908
  CDS Start-End: 584-2572
agctgacacagtgagttgtccctgacactcatgactttcaagccctgtgtcttggagggcactgtgatctggaagttcaccttccccatgaaaaaacccaaaccagcctctccttttcctgcatggtgatccgtctgtaatgatcagtgacattctcagaattaaccaatcaggaaattcttggaaagtccacgcctcagcatttagtgcttgggaaattctacttccagatcccagaggggacagagcagatttccagttctcctagcaccaccatgatctcaggactaaccactgcacacccgtgatgggattccaaaccttcgctgcaagaggacaaggtgacgagttgctgacagtgaaggctaaactaacgcggacagtgaagtgctacatgagtcggactcagactccaggtgaagcagccagcagaggtcagagagagacagctcacgttccggaatagctctccagacccccagctggccatgtggtgagttcagggcccaaatcaagtagtaccagcaatcagggaactcctatctgttttgaatggattcacaccagccacaagcctggaaagatggtgtcacaatctacagtcaggcaggattctcctgtggagccctgggaagggatcagcgatcactctggcattattgatggttcgcccagactcctgaacactgaccatcctccttgccaattagacatcaggctcatgaggcacaaagctgtctggattaacccccaggatgtgcagcaacagccgcaggacttgcaatctcaggtgccagcagcagggaacagtgggacccattttgtgacagatgctgcctctccctcaggcccttcaccttcgtgcctcggggactccctggcagagacaacgttgtctgaggataccacagactccgttggcagcgcttctccccatggctcgagtgaaaagagtagcagcttctctctgtcctcaacagaggtacacatggtccgcccaggatactctcatcgggtgtctctgcccacaagccctgggattttggccacctccccatatcctgagactgacagtgctttttttgagccttcccatctgacatctgctgctgatgaaggtgctgttcaagtcagtagaagaaccatttcttcgaattccttctcaccagaggtatttgtgctgcctgttgatgtagaaaaggaaaatgcccacttttatgttgcagatatgattatatcagcaatggagaaaatgaagtgtaacattctgagtcaacagcagacagagagctggagtaaagaagtcagtgggttacttgggagtgatcagcctgactctgaaatgacttttgataccaacataaagcaagagtctgggtcttctacttcttcatacagtggctatgaaggttgtgctgtgttacaggtcagcccagtgactgaaacacgtacttaccatgatgtgaaagagatttgcaaatgcgatgttgatgaatttgttattttagagcttggagattttaatgatatcacagaaacctgtagctgttcctgcagctcctctaagagtgtcacttatgagccagacttcaattctgcagaactattagccaaagagctgtaccgcgtgttccagaagtgctggatactgtcagtagttaattctcagctggcaggttccctgagtgcagctggctcgatagtcgtaaatgaagagtgtgtccgaaaagactttgaatccagtatgaatgtagtacaggaaattaaatttaagtctaggatcagagggactgaagactgggctcctcctagatttcaaatcatatttaatattcatccaccactcaagagggaccttgtggtggcagcccagaattttttctgtgccggctgtggaactccagtagagcctaagtttgtgaagcggctccggtactgcgaatacctagggaagtatttctgtgactgctgccactcatatgcagagtcgtgcatccctgcccgaatcctgatgatgtgggacttcaagaagtactacgtcagcaatttctccaaacagctgctcgacagcatatggcaccagcccattttcaatttgctgagcatcggccaaagcctgtatgcgaaagccaaggagctggacagagtgaaggaaattcaggagcagctcttccatatcaagaagctgttgaagacctgtaggtttgctaacagtgcattaaaggagttcgagcaggtgccgggacacttgactgatgagctccacctgttctcccttgaggacctggtcaggatcaagaaagggctgctggcacccttactcaaggacattctgaaagcttcccttgcacatgtggctggctgtgagctgtgtcaaggaaagggctttatttgtgaattttgccagaatacgactgtcatcttcccatttcagacagcaacatgtagaagatgttcagcgtgcagggcttgctttcacaaacagtgcttccagtcctccgagtgcccccggtgtgcgaggatcacagcgaggagaaaacttctggaaagtgtggcctctgcagcaacatgatgcccctgagtactgtgaaaaagactgttcaacatgccttatgataacaccgatttgtgtctattattggtgacattgttttagatattgggtattgtatattaaggaaaaagatggtctatattctctttattgcatatacttaatgtttcaaaagaatgcagattctgtgtttaagcacagggctgatagttgtggttttgtttacaaatgttctgttttggctgctattggttttttaaagaggttttttatacttttgtatttgaatagttatgtttcactgatgctgagccagtttgtatgtgtgtgcatatatgtgaactgtaactgacaagatgaattactcagtttctctttctctaaagcttgtttgatgaaactggttggtcctttcagtgaacaaaaatatgaccccaaatctgtttgctctggcttttatttcttcaggaagcagacttccacttaaatgccattttgtgattgtgtcaatcatacacattttatttacttcagagtttgaatagagagtacacatttcttctgcagatttatttcatgatgagtttgagttgcttagcagggcgtgtgggtcccgttgaagtgcagtttgaagcaactgcttctagatggcactctttcaggtggcacaaattgaacctgtatttgtcatctctgttccacacactgcaatgtcaagggatgcagaagtgagtagaattccatccctgcccttgaggatcttgctttaacagatgtaaaactgaacataaggtatttgcagatttaaacgaactgggggaaataatgaacagtgtgattctagtaataacattaaaatcatagacattgactaataaggttaaatgaatcacaaaacctttatgaatttcttttttctaatagttcttatatgttttcctgaaacatgtgagcctattcttttttcttctactttctatatactttctcccacttgagaaaggggccttgaggctgggtcccttcatggtatacctttagactgaacggtttgcaacctagggcttgggcattacattccctgggattcacatgccctaactaaacctaccttgattttctcagacagcacaggcaggcaataaagcgtcacagattgtcccctaaccccatccagccatgtgtatgagtgtgttttattcaatgggatagtactgagcacatgaaagaaatgaatgacttctgtcaatctcttttcattcagtcttctcattctgtcaattgttttctcatccgcagtgcctctgccagaactgtgctcacatccattatttaagccagatcttttctaagtattatagaagtgtagaggcacatagaataaataaaaccagacttcaaa

SEQ ID NO: 145767 - DNA, 2997 bp, Homo sapiens
  Payload ID: 8908
  Gene Symbol: KIAA0226L
  Gene Name: KIAA0226-like
  ENST ID: ENST00000409879
  CDS Start-End: 1062-2579
actccttcggcgttggctcttgcgccggggtcgttgtttcgtgacaaccactcaggtagccgtttctgagacggcagatgcggccgctttagccctgagcgggctccgcggctccctggacggtctctgccagtgcccgactcttctcttccggactccacgccaagcagcgaccctgagccaacagccagagcgcccagaaatggcggcctggactgcctcgcactggccagtcaaggggatcctgaagaacaagacctctacagcttcctctatggtggcctcggctgaacagcccagcgggagtgtcgaggaggagctgagcaaaaaatcccagaagtgggaagaaatgaacatcctggcgacatatcatccagcggacaaagactatggtttaatgaaaatagttgaaccaagcactccttcctgtcgtaagatgggtgatggtgaagatgcgtgtagtggtatagaaaccactgaagccgtggcaccagatatcttagctaagaaattagctgttgctgaaggcttgaacccaaagtatcgggttcaggaacaagaaagcagtggagaggaggctagtgacctctcacctgaagaacgagaaaaaaggcgacaatttcaaatgaaaaggaagcttcactacaatgagggactcaatatcaaactagctagagaattaatttgaaaagacctacatgatgacaaagatgaagaaatgttaaagactgcaggtggagaaagcatgaagacggaagaatcaaatcaaagctctacaacaagtgaccaacggcaaaacacattcagttctcctagcaccaccatgatctcaggactaaccactgcacacccgtgatgggattccaaaccttcgctgcaagaggacaaggtgacgagttgctgacagtgaaggctaaactaacgcggacagtgaagtgctacatgagtcggactcagactccaggtgaagcagccagcagaggtcagagagagacagctcacgttccggataaaataaaaaatggggatattgacctcctgtcactactgcatggactttgatggtttccaatcattactttctcctctgtgtcaatctgcctcttcgagaaattcatactcctggtgctgttcaagtcagtagaagaaccatttcttcgaattccttctcaccagaggtatttgtgctgcctgttgatgtagaaaaggaaaatgcccacttttatgttgcagatatgattatatcagcaatggagaaaatgaagtgtaacattctgagtcaacagcagacagagagctggagtaaagaagtcagtgggttacttgggagtgatcagcctgactctgaaatgacttttgataccaacataaagcaagagtctgggtcttctacttcttcatacagtggctatgaaggttgtgctgtgttacaggtcagcccagtgactgaaacacgtacttaccatgatgtgaaagagatttgcaaatgcgatgttgatgaatttgttattttagagcttggagattttaatgatatcacagaaacctgtagctgttcctgcagctcctctaagagtgtcacttatgagccagacttcaattctgcagaactattagccaaagagctgtaccgcgtgttccagaagtgctggatactgtcagtagttaattctcagctggcaggttccctgagtgcagctggctcgatagtcgtaaatgaagagtgtgtccgaaaagactttgaatccagtatgaatgtagtacaggaaattaaatttaagtctaggatcagagggactgaagactgggctcctcctagatttcaaatcatatttaatattcatccaccactcaagagggaccttgtggtggcagcccagaattttttctgtgccggctgtggaactccagtagagcctaagtttgtgaagcggctccggtactgcgaatacctagggaagtatttctgtgactgctgccactcatatgcagagtcgtgcatccctgcccgaatcctgatgatgtgggacttcaagaagtactacgtcagcaatttctccaaacagctgctcgacagcatatggcaccagcccattttcaatttgctgagcatcggccaaagcctgtatgcgaaagccaaggagctggacagagtgaaggaaattcaggagcagctcttccatatcaagaagctgttgaagacctgtaggtttgctaacagtgcattaaaggagttcgagcaggtgccgggacacttgactgatgagctccacctgttctcccttgaggacctggtcaggatcaagaaagggctgctggcacccttactcaaggacattctgaaagcttcccttgcacatgtggctggctgtgagctgtgtcaaggaaagggctttatttgtgaattttgccagaatacgactgtcatcttcccatttcagacagcaacatgtagaagatgttcagcgtgcagggcttgctttcacaaacagtgcttccagtcctccgagtgcccccggtgtgcgaggatcacagcgaggagaaaacttctggaaagtgtggcctctgcagcaacatgatgcccctgagtactgtgaaaaagactgttcaacatgccttatgataacaccgatttgtgtctattattggtgacattgttttagatattgggtattgtatattaaggaaaaagatggtctatattctctttattgcatatacttaatgtttcaaaagaatgcagattctgtgtttaagcacagggctgatagttgtggttttgtttacaaatgttctgttttggctgctattggttttttaaagaggttttttatacttttgtatttgaatagttatgtttcactgatgctgagccagtttgtatgtgtgtgcatatatgtgaactgtaactgacaagatgaattactcagtttctctttctctaaagcttgtttgatgaaactggttggtcctttcagtgaacaaaaatatgacccc

SEQ ID NO: 145768 - DNA, 3979 bp, Homo sapiens
  Payload ID: 8908
  Gene Symbol: KIAA0226L
  Gene Name: KIAA0226-like
  Uniprot ID: Q9H714
  ENST ID: ENST00000429979
  CDS Start-End: 606-2594
ggatttctaggaggaccggcagaggcgcgcataggtgcgtggtgctgggcccgggcgccgcggcaccggtgtaggagcgcgcatctccagagtttcttccatctgggcgacgtctcggtgcctgcggcgggaacggcgctttgcttccctgaggagcttctagagagctacggtggcccccgtgtgggaggcggggggcgtggcggcgtcggggcgtcgctgtcccctcctcggtagctctcctccctcccctttctgctgttaccgggagcgcggtggccacggaacgctgcccggagccgcgcgagggaggacccgacgcgcggcgtttacccagcgcagcgttccaccgctcgggtttggctggataaaataaaaaatggggatattgacctcctgtcactactgcatggactttgatggtttccaatcattactttctcctctgtgtcaatctgcctcttcgagaaattcatactcctgaatagctctccagacccccagctggccatgtggtgagttcagggcccaaatcaagtagtaccagcaatcagggaactcctatctgttttgaatggattcacaccagccacaagcctggaaagatggtgtcacaatctacagtcaggcaggattctcctgtggagccctgggaagggatcagcgatcactctggcattattgatggttcgcccagactcctgaacactgaccatcctccttgccaattagacatcaggctcatgaggcacaaagctgtctggattaacccccaggatgtgcagcaacagccgcaggacttgcaatctcaggtgccagcagcagggaacagtgggacccattttgtgacagatgctgcctctccctcaggcccttcaccttcgtgcctcggggactccctggcagagacaacgttgtctgaggataccacagactccgttggcagcgcttctccccatggctcgagtgaaaagagtagcagcttctctctgtcctcaacagaggtacacatggtccgcccaggatactctcatcgggtgtctctgcccacaagccctgggattttggccacctccccatatcctgagactgacagtgctttttttgagccttcccatctgacatctgctgctgatgaaggtgctgttcaagtcagtagaagaaccatttcttcgaattccttctcaccagaggtatttgtgctgcctgttgatgtagaaaaggaaaatgcccacttttatgttgcagatatgattatatcagcaatggagaaaatgaagtgtaacattctgagtcaacagcagacagagagctggagtaaagaagtcagtgggttacttgggagtgatcagcctgactctgaaatgacttttgataccaacataaagcaagagtctgggtcttctacttcttcatacagtggctatgaaggttgtgctgtgttacaggtcagcccagtgactgaaacacgtacttaccatgatgtgaaagagatttgcaaatgcgatgttgatgaatttgttattttagagcttggagattttaatgatatcacagaaacctgtagctgttcctgcagctcctctaagagtgtcacttatgagccagacttcaattctgcagaactattagccaaagagctgtaccgcgtgttccagaagtgctggatactgtcagtagttaattctcagctggcaggttccctgagtgcagctggctcgatagtcgtaaatgaagagtgtgtccgaaaagactttgaatccagtatgaatgtagtacaggaaattaaatttaagtctaggatcagagggactgaagactgggctcctcctagatttcaaatcatatttaatattcatccaccactcaagagggaccttgtggtggcagcccagaattttttctgtgccggctgtggaactccagtagagcctaagtttgtgaagcggctccggtactgcgaatacctagggaagtatttctgtgactgctgccactcatatgcagagtcgtgcatccctgcccgaatcctgatgatgtgggacttcaagaagtactacgtcagcaatttctccaaacagctgctcgacagcatatggcaccagcccattttcaatttgctgagcatcggccaaagcctgtatgcgaaagccaaggagctggacagagtgaaggaaattcaggagcagctcttccatatcaagaagctgttgaagacctgtaggtttgctaacagtgcattaaaggagttcgagcaggtgccgggacacttgactgatgagctccacctgttctcccttgaggacctggtcaggatcaagaaagggctgctggcacccttactcaaggacattctgaaagcttcccttgcacatgtggctggctgtgagctgtgtcaaggaaagggctttatttgtgaattttgccagaatacgactgtcatcttcccatttcagacagcaacatgtagaagatgttcagcgtgcagggcttgctttcacaaacagtgcttccagtcctccgagtgcccccggtgtgcgaggatcacagcgaggagaaaacttctggaaagtgtggcctctgcagcaacatgatgcccctgagtactgtgaaaaagactgttcaacatgccttatgataacaccgatttgtgtctattattggtgacattgttttagatattgggtattgtatattaaggaaaaagatggtctatattctctttattgcatatacttaatgtttcaaaagaatgcagattctgtgtttaagcacagggctgatagttgtggttttgtttacaaatgttctgttttggctgctattggttttttaaagaggttttttatacttttgtatttgaatagttatgtttcactgatgctgagccagtttgtatgtgtgtgcatatatgtgaactgtaactgacaagatgaattactcagtttctctttctctaaagcttgtttgatgaaactggttggtcctttcagtgaacaaaaatatgaccccaaatctgtttgctctggcttttatttcttcaggaagcagacttccacttaaatgccattttgtgattgtgtcaatcatacacattttatttacttcagagtttgaatagagagtacacatttcttctgcagatttatttcatgatgagtttgagttgcttagcagggcgtgtgggtcccgttgaagtgcagtttgaagcaactgcttctagatggcactctttcaggtggcacaaattgaacctgtatttgtcatctctgttccacacactgcaatgtcaagggatgcagaagtgagtagaattccatccctgcccttgaggatcttgctttaacagatgtaaaactgaacataaggtatttgcagatttaaacgaactgggggaaataatgaacagtgtgattctagtaataacattaaaatcatagacattgactaataaggttaaatgaatcacaaaacctttatgaatttcttttttctaatagttcttatatgttttcctgaaacatgtgagcctattcttttttcttctactttctatatactttctcccacttgagaaaggggccttgaggctgggtcccttcatggtatacctttagactgaacggtttgcaacctagggcttgggcattacattccctgggattcacatgccctaactaaacctaccttgattttctcagacagcacaggcaggcaataaagcgtcacagattgtcccctaaccccatccagccatgtgtatgagtgtgttttattcaatgggatagtactgagcacatgaaagaaatgaatgacttctgtcaatctcttttcattcagtcttctcattctgtcaattgttttctcatccgcagtgcctctgccagaactgtgctcacatccattatttaagccagatcttttctaagtattatagaagtgtagaggcacatagaataaataaaaccagacttcaaac

SEQ ID NO: 145769 - DNA, 494 bp, Homo sapiens
  Payload ID: 8908
  Gene Symbol: KIAA0226L
  Gene Name: KIAA0226-like
  ENST ID: ENST00000417405
  CDS Start-End: 106-494
gcgcggtggccacggaacgctgcccggagccgcgcgagggaggacccgacgcgcggcgtttacccagcgcagcgttccaccgctcgggtttggctggaggtacacatggtccgcccaggatactctcatcgggtgtctctgcccacaagccctgggattttggccacctccccatatcctgagactgacagtgctttttttgagccttcccatctgacatctgctgctgatgaaggtgctgttcaagtcagtagaagaaccatttcttcgaattccttctcaccagaggtatttgtgctgcctgttgatgtagaaaaggaaaatgcccacttttatgttgcagatatgattatatcagcaatggagaaaatgaagtgtaacattctgagtcaacagcagacagagagctggagtaaagaagtcagtgggttacttgggagtgatcagcctgactctgaaatgacttttgataccaacataaagcaagagtctgg

SEQ ID NO: 145770 - DNA, 2754 bp, Homo sapiens
  Payload ID: 8908
  Gene Symbol: KIAA0226L
  Gene Name: KIAA0226-like
  ENST ID: ENST00000441284
  CDS Start-End: 341-1204
cgggagcgcggtggccacggaacgctgcccggagccgcgcgagggaggacccgacgcgcggcgtttacccagcgcagcgttccaccgctcgggtttggctggataaaataaaaaatggggatattgacctcctgtcactactgcatggactttgatggtttccaatcattactttctcctctgtgtcaatctgcctcttcgagaaattcatactcctgaatagctctccagacccccagctggccatgtggtgagttcagggcccaaatcaagtagtaccagcaatcagggaactcctatctgttttgaatggattcacaccagccacaagcctggaaagatggtgtcacaatctacagtcaggcaggattctcctgtggagccctgggaagggatcagcgatcactctggcattattgatggttcgcccagactcctgaacactgaccatcctccttgccaattagacatcaggctcatgaggcacaaagctgtctggattaacccccaggatgtgcagcaacagccgcaggacttgcaatctcaggtgccagcagcagggaacagtgggacccattttgtgacagatgctgcctctccctcaggcccttcaccttcgtgcctcggggactccctggcagagacaacgttgtctgaggataccacagactccgttggcagcgcttctccccatggctcgagtgaaaagagtagcagcttctctctgtcctcaacagaggtacacatggtccgcccaggatactctcatcgggtgtctctgcccacaagccctgggattttggccacctccccatatcctgagactgacagtgctttttttgagccttcccatctgacatctgctgctgatgaaggtgctgttcaagtcagtagaagaaccatttcttcgaattccttctcaccagaggtatttgtgctgcctgttgatgtagaaaaggaaaatgcccacttttatgttgcagatatgattatatcagcaatggagaaaatgaagtgtaacattctgagtcaacagcagacagagagctggagtaaagaagtcagtgggttacttgggagtgatcagcctgactctgaaatgacttttgataccaacataaagcaagagtctgggtcttctacttcttcatacagtggctatgaaggcaagttgtgctgtgttacaggtcagcccagtgactgaaacacgtacttaccatgatgtgaaagagatttgcaaatgcgatgttgatgaatttgttattttagagcttggagattttaatgatatcacagaaacctgtagctgttcctgcagctcctctaagagtgtcacttatgagccagacttcaattctgcagaactattagccaaagagctgtaccgcgtgttccagaagtgctggatactgtcagtagttaattctcagctggcaggttccctgagtgcagctggctcgatagtcgtaaatgaagagtgtgtccgaaaagactttgaatccagtatgaatgtagtacaggaaattaaatttaagtctaggatcagagggactgaagactgggctcctcctagatttcaaatcatatttaatattcatccaccactcaagagggaccttgtggtggcagcccagaattttttctgtgccggctgtggaactccagtagagcctaagtttgtgaagcggctccggtactgcgaatacctagggaagtatttctgtgactgctgccactcatatgcagagtcgtgcatccctgcccgaatcctgatgatgtgggacttcaagaagtactacgtcagcaatttctccaaacagctgctcgacagcatatggcaccagcccattttcaatttgctgagcatcggccaaagcctgtatgcgaaagccaaggagctggacagagtgaaggaaattcaggagcagctcttccatatcaagaagctgttgaagacctgtaggtttgctaacagtgcattaaaggagttcgagcaggtgccgggacacttgactgatgagctccacctgttctcccttgaggacctggtcaggatcaagaaagggctgctggcacccttactcaaggacattctgaaagcttcccttgcacatgtggctggctgtgagctgtgtcaaggaaagggctttatttgtgaattttgccagaatacgactgtcatcttcccatttcagacagcaacatgtagaagatgttcagcgtgcagggcttgctttcacaaacagtgcttccagtcctccgagtgcccccggtgtgcgaggatcacagcgaggagaaaacttctggaaagtgtggcctctgcagcaacatgatgcccctgagtactgtgaaaaagactgttcaacatgccttatgataacaccgatttgtgtctattattggtgacattgttttagatattgggtattgtatattaaggaaaaagatggtctatattctctttattgcatatacttaatgtttcaaaagaatgcagattctgtgtttaagcacagggctgatagttgtggttttgtttacaaatgttctgttttggctgctattggttttttaaagaggttttttatacttttgtatttgaatagttatgtttcactgatgctgagccagtttgtatgtgtgtgcatatatgtgaactgtaactgacaagatgaattactcagtttctctttctctaaagcttgtttgatgaaactggttggtcctttcagtgaacaaaaatatgaccccaaa

SEQ ID NO: 145771 - DNA, 972 bp, Homo sapiens
  Payload ID: 8908
  Gene Symbol: KIAA0226L
  Gene Name: KIAA0226-like
  ENST ID: ENST00000439642
  CDS Start-End: 438-972
ttaatactgtgtctctggtggctctagtgatgcaatcattctcgatggggccactgactctgatgtcacaatgacttggctggaggtgtcctgaagtctcttgtttgtccagggcctttgctgcagcttatatgttcactagtaatctggcctgtgcctaccttttaatcccagctggaaaatctcagtaagaatgatgataaaataaaaaatggggatattgacctcctgtcactactgcatggactttgatggtttccaatcattactttctcctctgtgtcaatctgcctcttcgagaaattcatactcctgaatagctctccagacccccagctggccatgtggtgagttcagggcccaaatcaagtagtaccagcaatcagggaactcctatctgttttgaatggattcacaccagccacaagcctggaaagatggtgtcacaatctacagtcaggcaggattctcctgtggagccctgggaagggatcagcgatcactctggcattattgatggttcgcccagactcctgaacactgaccatcctccttgccaattagacatcaggctcatgaggcacaaagctgtctggattaacccccaggatgtgcagcaacagccgcaggacttgcaatctcaggtgccagcagcagggaacagtgggacccattttgtgacagatgctgcctctccctcaggcccttcaccttcgtgcctcggggactccctggcagagacaacgttgtctgaggataccacagactccgttggcagcgcttctccccatggctcgagtgaaaagagtagcagcttctctctgtcctcaacagaggtacacatggtccgcccaggatactctcatcgggtgtctctgcccacaagccctgggattttggccacctccccatatcctgagactgacagtgctttttttgagccttcccatctgacatctgctgctgatgaag

SEQ ID NO: 145772 - DNA, 1948 bp, Homo sapiens
  Payload ID: 8908
  Gene Symbol: KIAA0226L
  Gene Name: KIAA0226-like
  Uniprot ID: Q9H714
  ENST ID: ENST00000631139
  CDS Start-End: 260-1843
cccctttctgctgttaccgggagcgcggtggccacggaacgctgcccggagccgcgcgagggaggacccgacgcgcggcgtttacccagcgcagcgttccaccgctcgggtttggctgggcccttcaccttcgtgcctcggggactccctggcagagacaacgttgtctgaggataccacagactccgttggcagcgcttctccccatggctcgagtgaaaagagtagcagcttctctctgtcctcaacagaggtacacatggtccgcccaggatactctcatcgggtgtctctgcccacaagccctgggattttggccacctccccatatcctgagactgacagtgctttttttgagccttcccatctgacatctgctgctgatgaaggtgctgttcaagtcagtagaagaaccatttcttcgaattccttctcaccagaggtatttgtgctgcctgttgatgtagaaaaggaaaatgcccacttttatgttgcagatatgattatatcagcaatggagaaaatgaagtgtaacattctgagtcaacagcagacagagagctggagtaaagaagtcagtgggttacttgggagtgatcagcctgactctgaaatgacttttgataccaacataaagcaagagtctgggtcttctacttcttcatacagtggctatgaaggttgtgctgtgttacaggtcagcccagtgactgaaacacgtacttaccatgatgtgaaagagatttgcaaatgcgatgttgatgaatttgttattttagagcttggagattttaatgatatcacagaaacctgtagctgttcctgcagctcctctaagagtgtcacttatgagccagacttcaattctgcagaactattagccaaagagctgtaccgcgtgttccagaagtgctggatactgtcagtagttaattctcagctggcaggttccctgagtgcagctggctcgatagtcgtaaatgaagagtgtgtccgaaaagactttgaatccagtatgaatgtagtacaggaaattaaatttaagtctaggatcagagggactgaagactgggctcctcctagatttcaaatcatatttaatattcatccaccactcaagagggaccttgtggtggcagcccagaattttttctgtgccggctgtggaactccagtagagcctaagtttgtgaagcggctccggtactgcgaatacctagggaagtatttctgtgactgctgccactcatatgcagagtcgtgcatccctgcccgaatcctgatgatgtgggacttcaagaagtactacgtcagcaatttctccaaacagctgctcgacagcatatggcaccagcccattttcaatttgctgagcatcggccaaagcctgtatgcgaaagccaaggagctggacagagtgaaggaaattcaggagcagctcttccatatcaagaagctgttgaagacctgtaggtttgctaacagtgcattaaaggagttcgagcaggtgccgggacacttgactgatgagctccacctgttctcccttgaggacctggtcaggatcaagaaagggctgctggcacccttactcaaggacattctgaaagcttcccttgcacatgtggctggctgtgagctgtgtcaaggaaagggctttatttgtgaattttgccagaatacgactgtcatcttcccatttcagacagcaacatgtagaagatgttcagcgtgcagggcttgctttcacaaacagtgcttccagtcctccgagtgcccccggtgtgcgaggatcacagcgaggagaaaacttctggaaagtgtggcctctgcagcaacatgatgcccctgagtactgtgaaaaagactgttcaacatgccttatgataacaccgatttgtgtctattattggtgacattgttttagatattgggtattgtatattaa

SEQ ID NO: 145773 - DNA, 7841 bp, Homo sapiens
  Payload ID: 8909
  Gene Symbol: KIAA0232
  Gene Name: KIAA0232
  Uniprot ID: Q92628
  ENST ID: ENST00000307659
  CDS Start-End: 456-4643
cgcaggccagggccgcccggcgctcggcagccgcccgcagcccctcggagccagaggagaggcgcccccgccggccgccgcgccgcccggcagcctcggcaggtagtgtacactgataaaggtagggcgcggtggactctgcccctgtaaccgttccggagaatgcgttgagaatgaagacaaccagttctgccggagacttccatttggcctcaatgtgaaattaaagtagaaaatcacatctacatgcatgttgctatcaggatgttgattcattagtcatgcctgaagagggaaagtctgttttaggtggctgactaccagcaaaaataaatgcttatcctacatgtcaagcatctctactttttactggagtgaaaatcccctccagataccaacagaatatcaactgcagaaaatgcttcacattttaaggatgtcggcaacctaaattcatgtaccctatctgtacagttgttgtggatggtttgccatctgaaagctcctcaagttcttatccaggccctgtgtctgtttctgaaatgtctctgcttcatgctttgggtccagtgcagacctggctgggacaagagctcgagaaatgtggcattgatgccatgatttacactcggtatgtcctcagtcttctgctgcatgacagctatgactacgacctgcaggaacaggagaatgacatcttcctgggctgggaaaaaggagcttataagaaatggggaaagagtaagaaaaaatgttcagatctaactctagaagaaatgaaaaaacaggctgctgtccagtgtcttcgatctgcttctgatgaaagctctggtatcgagactttagtggaggagctctgctccagactgaaagaccttcagagtaagcaagaagagaagattcacaaaaagttagaggggtctccctctccagaggcagaattatcccctccagcaaaggatcaagtggaaatgtactatgaagcatttccaccactttctgagaaaccagtttgcctgcaagaaatcatgactgtgtggaacaagtctaaagtctgttcttactctagctcttcttcatcatccacagccccaccagctagcacagatacttcctctcctaaggactgcaacagtgaaagtgaagtcaccaaggaaagaagcagtgaagtacccaccactgtgcatgagaaaacccagagcaaaagcaaaaacgagaaggaaaacaaatttagtaatggcacaattgaagaaaagcctgctttgtacaaaaagcaaatccgacataaacctgaaggaaagattcgccctcgctcgtggtcttctggctccagtgaagcaggctcaagttccagtgggaatcagggagaattaaaagcatccatgaagtatgttaaagtaagacacaaggcacgagagattcgaaacaaaaaagggcggaatgggcaaagcaggctttctttgaagcacggtgaaaaggctgaaaggaacattcatactggaagtagtagcagtagcagcagtggttctgtcaaacagctgtgcaagcggggtaagagacctttaaaagaaatagggagaaaagatcctgggagcactgaaggaaaagacctgtacatggagaatagaaaggacacagagtataaagaggagcccttgtggtacaccgagccaattgctgaatattttgttcctctgagcagaaaaagtaaactagagaccacataccgaaacagacaggatacaagtgatctgacatcagaggcagtggaagaattgtctgaatcagtgcatggtctttgtatcagcaacaataatcttcataaaacatacctcgcagcaggtactttcattgatggtcattttgtagaaatgcctgcagttataaatgaggatattgacctcactgggacctcattatgttctctaccagaggacaataaatacctggatgatattcatctatcagaattaacgcacttctatgaagtggatattgatcaatccatgttggatcctggtgcctcagaaacaatgcaaggagaaagtcggattttgaatatgattcgacagaaaagcaaagagaacacagattttgaggcagaatgttgcatagtgttagatggtatggagttgcaaggggaacgtgcaatatggacagattctaccagctccgtaggtgctgagggcttattcctgcaggaccttggcaatctggctcagttttgggagtgctgttcatccagctccggtgatgctgatggggagagttttggaggagactctccagttagactctctcccatcttagacagcacagtgctcaattcacacctgcttgctggcaatcaagagctcttttcagatattaatgaaggatctggtataaactcttgtttttcagtgtttgaagtgcaatgcagtaattctgttttaccattttcttttgaaacactcaacttgggaaatgaaaatacagattctagtgctaatatgcttgggaaaacacagtctagattgctaatatggaccaaaaatagtgcctttgaagaaaatgaacactgttctaatctttcaacaagaacttgtagtccatggtcccattcagaagaaacacgttcagacaatgaaacattaaatattcagtttgaagaatccacacagtttaatgccgaagatattaattatgtagttcctagagtctcgtcaaattatgtagatgaagaacttctagattttttgcaagatgaaacttgccagcaaaacagtagaactttaggtgagattcctacattagttttcaaaaaaacatctaaactagaatccgtctgtggtattcagctagaacaaaaaacagaaaacaaaaattttgaaactacacaagtatgtaatgaaagtccacatggagatggctacagctcaggggttattaaagacatttggacaaagatggcagacacaaattctgtggctacagtagaaatagaaagaactgatgctgagttgttttcggcagatgtaaataactactgctgctgtctagatgctgaagctgaactggagacccttcaggagcctgataaggctgtgcggaggtcagagtaccatctgtgggagggacagaaagagagcctggagaaaagagcatttgcttctagtgagctatcaaacgtggatggtggtgattatacaacaccctctaaaccctgggatgtagcccaagataaagaaaacacattcattcttggaggagtttatggagaactcaaaaccttcaatagtgatggggagtgggcagtcgtaccacctagtcacacaaaaggaagtctgttacagtgtgcagcttctgatgttgtgacgatagctggtacagatgtctttatgaccccaggaaacagttttgctcctgggcacaggcagttatggaaacccttcgtgtcatttgaacagaatgatcagccgaagagtggggaaaatgggttaaataagggattttcttttatcttccatgaagacttactaggagcttgtggcaactttcaagtcgaagatcctggacttgaatactcattttcttcctttgacttaagcaatccattttcacaagttcttcatgtagaatgctcatttgaacctgaagggattgcatctttcagccccagttttaaaccgaaatcaatcctctgttctgattcagacagtgaagtgtttcaccccaggatatgtggtgttgacagaacacaatacagggctattcggatctctcctcggactcactttcgcccaatttctgcatccgaactgtccccaggaggaggaagcgagtcagaatttgaatctgagaaagatgaagcaaatattcccattccttctcaagttgatatatttgaagatccgcaggcagatctcaaacctttggaagaagatgcagagaaagaaggccattactatggaaaatcagagcttgagtctggaaaattccttcccaggttaaaaaaatctgggatggaaaagagtgctcagacatcactggattcccaggaggaatcaactgggattctttcagtaggaaagcaaaatcagtgtttggaatgtagcatgaatgaatccctggaaatagatttagaaagctcagaagcaaattgtaaaataatggcacaatgcgaggaagaaattaataatttttgtggttgcaaagcaggttgtcagtttcctgcttatgaagataatccagtttcttcgggacagctggaagagttccctgtattgaacactgatatacaaggaatgaatagaagtcaagaaaaacagacctggtgggaaaaagccttgtactctcctctttttcctgcatcagagtgtgaagaatgttacacaaatgccaagggagagagtggtttagaagaatatccagatgctaaagagacacccagtaatgaagagcgcctgttagattttaatagggtgtcttctgtttatgaagcaagatgtacaggagagagagattctggagcaaagtcagatggcttccgcggaaagatgtgctccagcgccagctccacctcggaagagacaggctcagaaggcggaggcgagtgggtgggccctagtgaagaggagctcttttctcgaactcatctctaaacctgcaaaatagtacaaattattgtttaaaaatgatatgtgatggaaaattactcttcagtgagacctgttaatctaaaacaacaacttaggtttcctcttcaattaactgattcagattggtaataattatctttctcttcttgcttattttagagttgaggacagctatcctgttaaagattttttttcccagctgttaaattcttggctatttgaaatagactagattgtgttgtcaaatcaagaatgggtgtgcatgtgcttgtcttagaagtatcactgctttttgcatcttaactgcagttaattttccttccgactgcggttatatcactatgaccttactagcattgcagtgtcaacaaccacttctgctcttcagagacttcagctttggagcatttaggctttgttctccaagaactgggatatccattcttaccctacagtggcttgatgcctttctgaaggcgagagggaagcctgggtgactcagcggtggtctccattcagcaaaatctcatgtacatttccagtaggaaccgcagaggtgtgcttttcaagactcaccaaatactgtgttttctctcttaggatttcttttcccctaaagtatcacggaagatactatggttcgtgactttcttgctaactgaagaagccaaggatttggggtgtggggtcgtatgcgagacacagtggggtaagggtgcataccccaccccttacctgctctcatactgcagttacatttacaccaaaaccccatgcagggttctttgtggtgagtgttccatacgtgctaaggaccttagttacagattgttactttctggtgacctatgttgaattgaaacccccaaaacttgaaattgtgaacatttgacatgcagtaaaggccacctcatcacccagagaaatctttggctgctgcagctagccgcttcttggctgtgatgtagtatagcttcgatctcattttgtgtttgagagaatgttctgggcaagttctgtgtgtggtgggttggggcgggtagagtcatgagttttccacatccctgtgtggtggttttgctgactgtcgctccgtgggactggctcccgtttctccttggtgagcccggggagccggcgcatcttgtgagtcgcgtctgtgcatggcgatccgctcctccggctctcatggcattgtgccacaggcagaggccaggaggagcagtatgtgcacagccgaaacattttacattttttacattgtttttcttttttaaccaactcattgtttaaaaaacaaaaacaaaaaaaacctaatctgtgaaatcagcgtagcatgcctggagcatcaggaatggcagaaaagtctgatgcgctctagacagcttcaccactcatttgggcaggcagtaaacacacatataatttattagctgggagctgaactggctgtgaaatctatgatttgctttgaacatttgggttttgttgcctttttcttaattgataacacagaaaagaaagtaccatcaaagactgtggagtcattgagggtctgtgtgtcctcaccgagagggacctggtgtgcccgccgggtcgatcttcccacgtgttagggtttatttttatacaacacattttttgacactttaaggtgggtgggtgtgtgtgtgtgtgtgtgtgtgcgcgcgtgcgcgcgcgcatgtgtaaggttttatgttgctgttatttatttacgaacttcagatacgtttttatgtatttttcattcttctggagcttcctaaaaattgataagcatctgcactgaaatataatttaacagcaaaagtaaaaaaggattgaaagttgtaaattcctcatatcactacagtgacgattattctagaaatcgttgcttgtgtagcaaagaccaaataaatagatttcagacacaaccttgagcacagttgattttggacagctgctgtttattaggaaagggctccaggtggcaaaggtgcacacttcctcagacacaggtgagaagatgcagcaccttccacaggtgaatgggacggattcgaagtgagcaaagggattcacaaattatgtatttatttgttttcatagttaagtagctgaagctcagaggctttcagcaacagagatgaaagtgtggctttttagttttgtgaatggatgatcacaaagaaaaagcatttttaaaaagttggcaaacgctgaaacgcactgtggtatgaagcgcattgcatttccatagcactgaagtaccagtttccattcctgggctgagattgtttttcccgtggttgtattgttctgatttcacgtacaccagagtaactgatttttttttgtttgttttcttgtggagttaacaccaaataaaaattgtaaaaaacagtttgttgtttttatttctcatagcaaagcttcttttgtaaagaactccagcttccttttactcatgagcatccgtggaagagcaagtgcccaggttacatttgttctagatggaggtcatttagctctcattgcagacactgctgaaaacattgtgcagctttgctagggaagaaagtggtgtggcctgctgagaaatcagcggctcctccccatctcacccccagcacacgcagggactactacctgagtctgcaaaacacatagcatttttgtccgtggatggtacacaaagctcaatctttttgttttcttctggggaaaaaattaaatctttatatgttaatatgattgatattcattgtgcaaaaaaaatcagtgtgtttttaaagaagtataagggaaaaggaaaactcatatgtccttctgtcactctgagacatacactggtaacatctgtgcaagcccctttccaggattctgaatgtacagtatatatgaatgcatacacagagaaatttacattcaagagtgtactatacttgttcttctataacatcagaaataggtttttactcagatgtcttcatgtcggtaattatagaactacataattatttttatagctgtattatgtagatttaacaggttcctcattgataaaacaatgtttttttggttgtttattcagtatctgaataacgtttctatggacatctgtaaacatgtatgaggggacttttaaaagttcatggaaaatggaattaaaagaaaaataaaaaaatataaacttta

SEQ ID NO: 145774 - DNA, 7771 bp, Homo sapiens
  Payload ID: 8909
  Gene Symbol: KIAA0232
  Gene Name: KIAA0232
  Uniprot ID: Q92628
  ENST ID: ENST00000425103
  CDS Start-End: 380-4567
acgtaaggcgcaggccagggccgcccggcgctcggcagccgcccgcagcccctcggagccagaggagaggcgcccccgccggccgccgcgccgcccggcagcctcggcaggttctgccggagacttccatttggcctcaatgtgaaattaaagtagaaaatcacatctacatgcatgttgctatcaggatgttgattcattagtcatgcctgaagagggaaagtctgttttaggtggctgactaccagcaaaaataaatgcttatcctacatgtcaagcatctctactttttactggagtgaaaatcccctccagataccaacagaatatcaactgcagaaaatgcttcacattttaaggatgtcggcaacctaaattcatgtaccctatctgtacagttgttgtggatggtttgccatctgaaagctcctcaagttcttatccaggccctgtgtctgtttctgaaatgtctctgcttcatgctttgggtccagtgcagacctggctgggacaagagctcgagaaatgtggcattgatgccatgatttacactcggtatgtcctcagtcttctgctgcatgacagctatgactacgacctgcaggaacaggagaatgacatcttcctgggctgggaaaaaggagcttataagaaatggggaaagagtaagaaaaaatgttcagatctaactctagaagaaatgaaaaaacaggctgctgtccagtgtcttcgatctgcttctgatgaaagctctggtatcgagactttagtggaggagctctgctccagactgaaagaccttcagagtaagcaagaagagaagattcacaaaaagttagaggggtctccctctccagaggcagaattatcccctccagcaaaggatcaagtggaaatgtactatgaagcatttccaccactttctgagaaaccagtttgcctgcaagaaatcatgactgtgtggaacaagtctaaagtctgttcttactctagctcttcttcatcatccacagccccaccagctagcacagatacttcctctcctaaggactgcaacagtgaaagtgaagtcaccaaggaaagaagcagtgaagtacccaccactgtgcatgagaaaacccagagcaaaagcaaaaacgagaaggaaaacaaatttagtaatggcacaattgaagaaaagcctgctttgtacaaaaagcaaatccgacataaacctgaaggaaagattcgccctcgctcgtggtcttctggctccagtgaagcaggctcaagttccagtgggaatcagggagaattaaaagcatccatgaagtatgttaaagtaagacacaaggcacgagagattcgaaacaaaaaagggcggaatgggcaaagcaggctttctttgaagcacggtgaaaaggctgaaaggaacattcatactggaagtagtagcagtagcagcagtggttctgtcaaacagctgtgcaagcggggtaagagacctttaaaagaaatagggagaaaagatcctgggagcactgaaggaaaagacctgtacatggagaatagaaaggacacagagtataaagaggagcccttgtggtacaccgagccaattgctgaatattttgttcctctgagcagaaaaagtaaactagagaccacataccgaaacagacaggatacaagtgatctgacatcagaggcagtggaagaattgtctgaatcagtgcatggtctttgtatcagcaacaataatcttcataaaacatacctcgcagcaggtactttcattgatggtcattttgtagaaatgcctgcagttataaatgaggatattgacctcactgggacctcattatgttctctaccagaggacaataaatacctggatgatattcatctatcagaattaacgcacttctatgaagtggatattgatcaatccatgttggatcctggtgcctcagaaacaatgcaaggagaaagtcggattttgaatatgattcgacagaaaagcaaagagaacacagattttgaggcagaatgttgcatagtgttagatggtatggagttgcaaggggaacgtgcaatatggacagattctaccagctccgtaggtgctgagggcttattcctgcaggaccttggcaatctggctcagttttgggagtgctgttcatccagctccggtgatgctgatggggagagttttggaggagactctccagttagactctctcccatcttagacagcacagtgctcaattcacacctgcttgctggcaatcaagagctcttttcagatattaatgaaggatctggtataaactcttgtttttcagtgtttgaagtgcaatgcagtaattctgttttaccattttcttttgaaacactcaacttgggaaatgaaaatacagattctagtgctaatatgcttgggaaaacacagtctagattgctaatatggaccaaaaatagtgcctttgaagaaaatgaacactgttctaatctttcaacaagaacttgtagtccatggtcccattcagaagaaacacgttcagacaatgaaacattaaatattcagtttgaagaatccacacagtttaatgccgaagatattaattatgtagttcctagagtctcgtcaaattatgtagatgaagaacttctagattttttgcaagatgaaacttgccagcaaaacagtagaactttaggtgagattcctacattagttttcaaaaaaacatctaaactagaatccgtctgtggtattcagctagaacaaaaaacagaaaacaaaaattttgaaactacacaagtatgtaatgaaagtccacatggagatggctacagctcaggggttattaaagacatttggacaaagatggcagacacaaattctgtggctacagtagaaatagaaagaactgatgctgagttgttttcggcagatgtaaataactactgctgctgtctagatgctgaagctgaactggagacccttcaggagcctgataaggctgtgcggaggtcagagtaccatctgtgggagggacagaaagagagcctggagaaaagagcatttgcttctagtgagctatcaaacgtggatggtggtgattatacaacaccctctaaaccctgggatgtagcccaagataaagaaaacacattcattcttggaggagtttatggagaactcaaaaccttcaatagtgatggggagtgggcagtcgtaccacctagtcacacaaaaggaagtctgttacagtgtgcagcttctgatgttgtgacgatagctggtacagatgtctttatgaccccaggaaacagttttgctcctgggcacaggcagttatggaaacccttcgtgtcatttgaacagaatgatcagccgaagagtggggaaaatgggttaaataagggattttcttttatcttccatgaagacttactaggagcttgtggcaactttcaagtcgaagatcctggacttgaatactcattttcttcctttgacttaagcaatccattttcacaagttcttcatgtagaatgctcatttgaacctgaagggattgcatctttcagccccagttttaaaccgaaatcaatcctctgttctgattcagacagtgaagtgtttcaccccaggatatgtggtgttgacagaacacaatacagggctattcggatctctcctcggactcactttcgcccaatttctgcatccgaactgtccccaggaggaggaagcgagtcagaatttgaatctgagaaagatgaagcaaatattcccattccttctcaagttgatatatttgaagatccgcaggcagatctcaaacctttggaagaagatgcagagaaagaaggccattactatggaaaatcagagcttgagtctggaaaattccttcccaggttaaaaaaatctgggatggaaaagagtgctcagacatcactggattcccaggaggaatcaactgggattctttcagtaggaaagcaaaatcagtgtttggaatgtagcatgaatgaatccctggaaatagatttagaaagctcagaagcaaattgtaaaataatggcacaatgcgaggaagaaattaataatttttgtggttgcaaagcaggttgtcagtttcctgcttatgaagataatccagtttcttcgggacagctggaagagttccctgtattgaacactgatatacaaggaatgaatagaagtcaagaaaaacagacctggtgggaaaaagccttgtactctcctctttttcctgcatcagagtgtgaagaatgttacacaaatgccaagggagagagtggtttagaagaatatccagatgctaaagagacacccagtaatgaagagcgcctgttagattttaatagggtgtcttctgtttatgaagcaagatgtacaggagagagagattctggagcaaagtcagatggcttccgcggaaagatgtgctccagcgccagctccacctcggaagagacaggctcagaaggcggaggcgagtgggtgggccctagtgaagaggagctcttttctcgaactcatctctaaacctgcaaaatagtacaaattattgtttaaaaatgatatgtgatggaaaattactcttcagtgagacctgttaatctaaaacaacaacttaggtttcctcttcaattaactgattcagattggtaataattatctttctcttcttgcttattttagagttgaggacagctatcctgttaaagattttttttcccagctgttaaattcttggctatttgaaatagactagattgtgttgtcaaatcaagaatgggtgtgcatgtgcttgtcttagaagtatcactgctttttgcatcttaactgcagttaattttccttccgactgcggttatatcactatgaccttactagcattgcagtgtcaacaaccacttctgctcttcagagacttcagctttggagcatttaggctttgttctccaagaactgggatatccattcttaccctacagtggcttgatgcctttctgaaggcgagagggaagcctgggtgactcagcggtggtctccattcagcaaaatctcatgtacatttccagtaggaaccgcagaggtgtgcttttcaagactcaccaaatactgtgttttctctcttaggatttcttttcccctaaagtatcacggaagatactatggttcgtgactttcttgctaactgaagaagccaaggatttggggtgtggggtcgtatgcgagacacagtggggtaagggtgcataccccaccccttacctgctctcatactgcagttacatttacaccaaaaccccatgcagggttctttgtggtgagtgttccatacgtgctaaggaccttagttacagattgttactttctggtgacctatgttgaattgaaacccccaaaacttgaaattgtgaacatttgacatgcagtaaaggccacctcatcacccagagaaatctttggctgctgcagctagccgcttcttggctgtgatgtagtatagcttcgatctcattttgtgtttgagagaatgttctgggcaagttctgtgtgtggtgggttggggcgggtagagtcatgagttttccacatccctgtgtggtggttttgctgactgtcgctccgtgggactggctcccgtttctccttggtgagcccggggagccggcgcatcttgtgagtcgcgtctgtgcatggcgatccgctcctccggctctcatggcattgtgccacaggcagaggccaggaggagcagtatgtgcacagccgaaacattttacattttttacattgtttttcttttttaaccaactcattgtttaaaaaacaaaaacaaaaaaaacctaatctgtgaaatcagcgtagcatgcctggagcatcaggaatggcagaaaagtctgatgcgctctagacagcttcaccactcatttgggcaggcagtaaacacacatataatttattagctgggagctgaactggctgtgaaatctatgatttgctttgaacatttgggttttgttgcctttttcttaattgataacacagaaaagaaagtaccatcaaagactgtggagtcattgagggtctgtgtgtcctcaccgagagggacctggtgtgcccgccgggtcgatcttcccacgtgttagggtttatttttatacaacacattttttgacactttaaggtgggtgggtgtgtgtgtgtgtgtgtgtgtgcgcgcgtgcgcgcgcgcatgtgtaaggttttatgttgctgttatttatttacgaacttcagatacgtttttatgtatttttcattcttctggagcttcctaaaaattgataagcatctgcactgaaatataatttaacagcaaaagtaaaaaaggattgaaagttgtaaattcctcatatcactacagtgacgattattctagaaatcgttgcttgtgtagcaaagaccaaataaatagatttcagacacaaccttgagcacagttgattttggacagctgctgtttattaggaaagggctccaggtggcaaaggtgcacacttcctcagacacaggtgagaagatgcagcaccttccacaggtgaatgggacggattcgaagtgagcaaagggattcacaaattatgtatttatttgttttcatagttaagtagctgaagctcagaggctttcagcaacagagatgaaagtgtggctttttagttttgtgaatggatgatcacaaagaaaaagcatttttaaaaagttggcaaacgctgaaacgcactgtggtatgaagcgcattgcatttccatagcactgaagtaccagtttccattcctgggctgagattgtttttcccgtggttgtattgttctgatttcacgtacaccagagtaactgatttttttttgtttgttttcttgtggagttaacaccaaataaaaattgtaaaaaacagtttgttgtttttatttctcatagcaaagcttcttttgtaaagaactccagcttccttttactcatgagcatccgtggaagagcaagtgcccaggttacatttgttctagatggaggtcatttagctctcattgcagacactgctgaaaacattgtgcagctttgctagggaagaaagtggtgtggcctgctgagaaatcagcggctcctccccatctcacccccagcacacgcagggactactacctgagtctgcaaaacacatagcatttttgtccgtggatggtacacaaagctcaatctttttgttttcttctggggaaaaaattaaatctttatatgttaatatgattgatattcattgtgcaaaaaaaatcagtgtgtttttaaagaagtataagggaaaaggaaaactcatatgtccttctgtcactctgagacatacactggtaacatctgtgcaagcccctttccaggattctgaatgtacagtatatatgaatgcatacacagagaaatttacattcaagagtgtactatacttgttcttctataacatcagaaataggtttttactcagatgtcttcatgtcggtaattatagaactacataattatttttatagctgtattatgtagatttaacaggttcctcattgataaaacaatgtttttttggttgtttattcagtatctgaataacgtttctatggacatctgtaaacatgtatgaggggacttttaaaagttcatggaaaatggaattaaaagaaaaataaaaaaatataaactttatttctc

SEQ ID NO: 145775 - DNA, 700 bp, Homo sapiens
  Payload ID: 8909
  Gene Symbol: KIAA0232
  Gene Name: KIAA0232
  ENST ID: ENST00000508423
  CDS Start-End: 470-696
ggccagttgccgggtaacggagcggagcggctcccggcgcgccgcctcccgccctccgcggagtggcgctggggccgccgccgccgctttacgtaaggcgcaggccagggccgcccggcgctcggcagccgcccgcagcccctcggagccagaggagaggcgcccccgccggccgccgcgccgcccggcagcctcggcaggttctgccggagacttccatttggcctcaatgtgaaattaaagtagaaaatcacatctacatgcatgttgctatcaggatgttgattcattagtcatgcctgaagagggaaagtctgttttaggtggctgactaccagcaaaaataaatgcttatcctacatgtcaagcatctctactttttactggagtgaaaatcccctccagataccaacagaatatcaactgcagaaaatgcttcacattttaaggatgtcggcaacctaaattcatgtaccctatctgtacagttgttgtggatggtttgccatctgaaagctcctcaagttcttatccaggccctgtgtctgtttctgaaatgtctctgcttcatgctttgggtccagtgcagacctggctgggacaagagctcgagaaatgtggcattgatgccatgatttacactcggtatgtcctcagtcttctgctgcatgacagctatgactacgacctgcaggaacag

SEQ ID NO: 145776 - DNA, 6802 bp, Homo sapiens
  Payload ID: 8910
  Gene Symbol: KIAA0319
  Gene Name: KIAA0319
  Uniprot ID: Q5VV43
  ENST ID: ENST00000378214
  CDS Start-End: 526-3744
gctgccgcgggcggtgggcggggatcccccgggggtgcaaccttgctccacctgtgctgccctcggcgggcctggctggccccgcgcagagcggcggcggcgctcgctgtcactgccggaggtgagagcgcagcagtagcttcagcctgtcttgggcttggtccagattcgctcctctggggctacgtcccggggaagaggaagcgaggattttgctggggtggggctgtacctcttaacagcaggtgcgcgcgcgagggtgtgaacgtgtgtgtgtgtgtgtgtgtgtgtgtgtgtgtgtgtgtgtgtgtgtgtaagacctgcgatgacgacgaggaggaacaagtgggacggcgagtgatgctcagggccagcagcaacgcatggggcgagcttcagtgtcgccagcagtgaccacagttcttgaggccaaatctggctcctaaaaaacatcaaaggaagcttgcaccaaactctcttcagggccgcctcagaagcctgccatcacccactgtgtggtgcacaatggcgccccccacaggtgtgctctcttcattgctgctgctggtgacaattgcaggttgtgcccgtaagcagtgcagcgaggggaggacatattccaatgcagtcatttcacctaacttggaaaccaccagaatcatgcgggtgtctcacaccttccctgtcgtagactgcacggccgcttgctgtgacctgtccagctgtgacctggcctggtggttcgagggccgctgctacctggtgagctgcccccacaaagagaactgtgagcccaagaagatgggccccatcaggtcttatctcacttttgtgctccggcctgttcagaggcctgcacagctgctggactatggggacatgatgctgaacaggggctccccctcggggatctggggggactcacctgaggatatcagaaaggacttgacctttctaggcaaagattggggcctagaggagatgtctgagtactcagatgactaccgggagctggagaaggacctcttgcaacccagtggcaagcaggagcccagagggagtgccgagtacacggactggggcctactgccgggcagcgagggggccttcaactcctctgttggagacagtcctgcggtgccagcggagacgcagcaggaccctgagctccattacctgaatgagtcggcttcaacccctgccccaaaactccctgagagaagtgtgttgcttcccttgccgactactccatcttcaggagaggtgttggagaaagaaaaggcttctcagctccaggaacaatccagcaacagctctggaaaagaggttctaatgccttcccatagtcttcctccggcaagcctggagctcagctcagtcaccgtggagaaaagcccagtgctcacagtcaccccggggagtacagagcacagcatcccaacacctcccactagcgcagccccctctgagtccaccccatctgagctacccatatctcctaccactgctcccaggacagtgaaagaacttacggtatcggctggagataacctaattataactttacccgacaatgaagttgaactgaaggcctttgttgcgccagcgccacctgtagaaacaacctacaactatgaatggaatttaataagccaccccacagactaccaaggtgaaataaaacaaggacacaagcaaactcttaacctctctcaattgtccgtcggactttatgtcttcaaagtcactgtttctagtgaaaacgcctttggagaaggatttgtcaatgtcactgttaagcctgccagaagagtcaacctgccacctgtagcagttgtttctccccaactgcaagagctcactttgcctttgacgtcagccctcattgatggcagccaaagtacagatgatactgaaatagtgagttatcattgggaagaaataaacgggcccttcatagaagagaagacttcagttgactctcccgtcttacgcttgtctaaccttgatcctggtaactatagtttcaggttgactgttacagactcggacggagccactaactctacaactgcagccctaatagtgaacaatgctgtggactacccaccagttgctaatgcaggaccaaatcacaccataactttgccccaaaactccatcactttgaatggaaaccagagcagtgacgatcaccagattgtcctctatgagtggtccctgggtcctgggagtgagggcaaacatgtggtcatgcagggagtacagacgccataccttcatttatctgcaatgcaggaaggagattatacatttcagctgaaggtgacagattcttcaaggcaacagtctactgctgtggtgactgtgattgtccagcctgaaaacaatagacctccagtggctgtggccggccctgataaagagctgatcttcccagtggaaagtgctaccctggatgggagcagcagcagcgatgaccacggcattgtcttctaccactgggagcacgtcagaggccccagtgcagtggagatggaaaatattgacaaagcaatagccactgtgactggtctccaggtggggacctaccacttccgtttgacagtgaaagaccagcagggactgagcagcacgtccaccctcactgtggctgtgaagaaggaaaataatagtcctcccagagcccgggctggtggcagacatgttcttgtgcttcccaataattccattactttggatggttcaaggtctactgatgaccaaagaattgtgtcctatctgtggatccgggatggccagagtccagcagctggagatgtcatcgatggctctgaccacagtgtggctctgcagcttacgaatctggtggagggggtgtacactttccacttgcgagtcaccgacagtcagggggcctcggacacagacactgccactgtggaagtgcagccagaccctaggaagagtggcctggtggagctgaccctgcaggttggtgttgggcagctgacagagcagcggaaggacacccttgtgaggcagctggctgtgctgctgaacgtgctggactcggacattaaggtccagaagattcgggcccactcggatctcagcaccgtgattgtgttttatgtacagagcaggccgcctttcaaggttctcaaagctgctgaagtggcccgaaatctgcacatgcggctctcaaaggagaaggctgacttcttgcttttcaaggtcttgagggttgatacagcaggttgccttctgaagtgttctggccatggtcactgcgaccccctcacaaagcgctgcatttgctctcacttatggatggagaaccttatacagcgttatatctgggatggagagagcaactgtgagtggagtatattctatgtgacagtgttggcttttactcttattgtgctaacaggaggtttcacttggctttgcatctgctgctgcaaaagacaaaaaaggactaaaatcaggaaaaaaacaaagtacaccatcctggataacatggatgaacaggaaagaatggaactgaggcccaaatatggtatcaagcaccgaagcacagagcacaactccagcctgatggtatccgagtctgagtttgacagtgaccaggacacaatcttcagccgagaaaagatggagagagggaatccaaaggtttccatgaatggttccatcagaaatggagcttccttcagttattgctcaaaggacagataatggcgcagttcattgtaaagtggaaggaccccttgaatccaagaccagtcagtgggagttacagcacaaaacccactcttttagaatagttcattgaccttcttccccagtgggttagatgtgtatccccacgtactaaaagaccggtttttgaaggcacaaaacaaaaactttgctcttttaactgagatgcttgttaatagaaataaaggctgggtaaaactctaaggtatatacttaaaagagttttgagtttttgtagctggcacaatctcatattaaagatgaacaacgatttctatctgtagaaccttagagaaggtgaatgaaacaaggttttaaaaagggatgatttctgtcttagctgctgtgattgcctctaaggaacagcattctaaacacggtttctcttgtaggacctgcagtcagatggctgtgtatgttaaaatagcttgtctaagaggcacgggccatctgtggaggtacggagtcttgcatgtagcaagctttctgtgctgacggcaacactcgcacagtgccaagccctcctggtttttaattctgtgctatgtcaatggcagttttcatctctctcaagaaagcagctgttggccattcaagagctaaggaagaatcgtattctaaggactgaggcaatagaaaggggaggaggagcttaatgccgtgcaggttgaaggtagcattgtaacattatcttttctttctctaagaaaaactacactgactcctctcggtgttgtttagcagtatagttctctaatgtaaacggatccccagtttacattaaatgcaatagaagtgattaattcattaagcatttattatgttctgtaggctgtgcgtttggactgccatagatagggataacgactcagcaattgtgtatatattccaaaactctgaaatacagtcagtcttaacttggatggcgtggttatgatactctggtccccgacaggtactttccaaaataacttgacatagatgtattcacttcatatgtttaaaaatacatttaagtttttctaccgaataaatcttatttcaaacatgaaagacaattaaaacattcccacccacaaagcagtactcccgagcaattaactggagttaattgtagcctgctacgttgactggttcagggtagttccccatccacccttggtcctgaggctggtggccttggtggtgcccttggcattttttgtgggaagattagaatgagagatagaaccagtgttgtggtaccaagtgtgagcacacctaaacaatatcctgttgcacaatgcttttttaacacatgggaaaactaggaatgcattgctgatgaagaagcaaggtatttaaacaccagggcaggagtgccagagaaaatgtttccccatgggttcttaaaaaaaattcagcttttaggtgcttttgtcatctcccgcagtattcatcctcatgggaccatcttatttttacttattgtaatttactggggaaaggcagaactaaaaagtgtgtcattttatttttaaaataattgctttgcttatgcctacactttctgtataactagccaattcaatactgtctatagtgttagaaggaaaatgtgatttttttttttaaccagtattgagcttcataagcctagaatctgccttatcaggtgaccagggttatggttgtttgcatgcaaatgtgaatttctggcataggggacagcagcccaaatgtaaagtcatcgggcgtaatgaggaagaagggagtgaacatttaccgctttatgtacataacatatgcagtttacatactcatttgatccttataatcaaccttgaagaggagatactatcattcttatgttgcagatagccctctgaaggcccagagaggttaaataacttcccagaggtcatggccaagaagtagtggctccaagaactgaatgcaaattttttaaactgtagagttctgctttccactaaacaaagaactcctgccttgatggatggagggcaaattctggtggaacttttgggccacctgaaagttctattcccaggactaagaggaatttcttttaatggatccagagagccaaggtcagagggagagatggcctgcatagtctcctgtggatcacacccgggccacccctccctctaggtttacagtggacttcttctgcccctcctccttttctgtccttggccatctcagcctggcctctctgatccttccatcacagaaggatcttgaatctctgggaaatcaaacatcacagtagtgatcagaaagtgagtcctgtcttgtcaccccatttctcatcagaacaaagcacgagatggaatgaccaaccagcattcttcatggtggactgcttatcattgaggatctttgggagataaagcacgctaagagctctggacagagaaaaacaggccctagaatatgggagtgggtgtttgtagggctcacaggctaacaagcactttagttgctggtttacattcaatgaaggaggattcatacccatggcattacaaggctaagcatgtgtatgactaaggaactatctgaaaaacatgcagcaaggtaagaaaatgtaccactcaacaagccagtgatgccaccttttgtgcgcggggaggagagtgactaccattgttttttgtgtgacaaagctatcatggactattttaatcttggttttattgcttaaaatatattatttttccctatgtgttgacaaggtatttctaatatcacactattaaatatatgcactaatctaaataaaggtgtctgtattttctgtaatgcttatttttagggggaaatttgttttctttatgcttcagggtagagggatttcccttgagtataggtcagcaaactgtggcctacagcctgtgtgtgcacgccccatgagccgaaaagtgggtcttatgttttcaaatggttaaaaataaataaaaaaatttgaaacatgtgaactatatgacattcagatttgtgttcataaataaagttttattggaacata

SEQ ID NO: 145777 - DNA, 6620 bp, Homo sapiens
  Payload ID: 8910
  Gene Symbol: KIAA0319
  Gene Name: KIAA0319
  Uniprot ID: Q5VV43
  ENST ID: ENST00000430948
  CDS Start-End: 476-3559
agtagcttcagcctgtcttgggcttggtccagattcgctcctctggggctacgtcccggggaagaggaagcgaggattttgctggggtggggctgtacctcttaacagcaggtgcgcgcgcgagggtgtgaacgtgtgtgtgtgtgtgtgtgtgtgtgtgtgtgtgtgtgtgtgtgtgtgtaagacctgcgatgacgacgaggaggaacaagtgggacggcgagtgatgctcagggccagcagcaacgcatggggcgagcttcagtgtcgccagcagtgaccacaggtacggtatctacttcccagagcgcctggccgagaaataggaaagagggcagccagtaggcaggccaatacccaacaaaagtagaatcgagacgccctgagttcagaaggttgtgcccgtaagcagtgcagcgaggggaggacatattccaatgcagtcatttcacctaacttggaaaccaccagaatcatgcgggtgtctcacaccttccctgtcgtagactgcacggccgcttgctgtgacctgtccagctgtgacctggcctggtggttcgagggccgctgctacctggtgagctgcccccacaaagagaactgtgagcccaagaagatgggccccatcaggtcttatctcacttttgtgctccggcctgttcagaggcctgcacagctgctggactatggggacatgatgctgaacaggggctccccctcggggatctggggggactcacctgaggatatcagaaaggacttgacctttctaggcaaagattggggcctagaggagatgtctgagtactcagatgactaccgggagctggagaaggacctcttgcaacccagtggcaagcaggagcccagagggagtgccgagtacacggactggggcctactgccgggcagcgagggggccttcaactcctctgttggagacagtcctgcggtgccagcggagacgcagcaggaccctgagctccattacctgaatgagtcggcttcaacccctgccccaaaactccctgagagaagtgtgttgcttcccttgccgactactccatcttcaggagaggtgttggagaaagaaaaggcttctcagctccaggaacaatccagcaacagctctggaaaagaggttctaatgccttcccatagtcttcctccggcaagcctggagctcagctcagtcaccgtggagaaaagcccagtgctcacagtcaccccggggagtacagagcacagcatcccaacacctcccactagcgcagccccctctgagtccaccccatctgagctacccatatctcctaccactgctcccaggacagtgaaagaacttacggtatcggctggagataacctaattataactttacccgacaatgaagttgaactgaaggcctttgttgcgccagcgccacctgtagaaacaacctacaactatgaatggaatttaataagccaccccacagactaccaaggtgaaataaaacaaggacacaagcaaactcttaacctctctcaattgtccgtcggactttatgtcttcaaagtcactgtttctagtgaaaacgcctttggagaaggatttgtcaatgtcactgttaagcctgccagaagagtcaacctgccacctgtagcagttgtttctccccaactgcaagagctcactttgcctttgacgtcagccctcattgatggcagccaaagtacagatgatactgaaatagtgagttatcattgggaagaaataaacgggcccttcatagaagagaagacttcagttgactctcccgtcttacgcttgtctaaccttgatcctggtaactatagtttcaggttgactgttacagactcggacggagccactaactctacaactgcagccctaatagtgaacaatgctgtggactacccaccagttgctaatgcaggaccaaatcacaccataactttgccccaaaactccatcactttgaatggaaaccagagcagtgacgatcaccagattgtcctctatgagtggtccctgggtcctgggagtgagggcaaacatgtggtcatgcagggagtacagacgccataccttcatttatctgcaatgcaggaaggagattatacatttcagctgaaggtgacagattcttcaaggcaacagtctactgctgtggtgactgtgattgtccagcctgaaaacaatagacctccagtggctgtggccggccctgataaagagctgatcttcccagtggaaagtgctaccctggatgggagcagcagcagcgatgaccacggcattgtcttctaccactgggagcacgtcagaggccccagtgcagtggagatggaaaatattgacaaagcaatagccactgtgactggtctccaggtggggacctaccacttccgtttgacagtgaaagaccagcagggactgagcagcacgtccaccctcactgtggctgtgaagaaggaaaataatagtcctcccagagcccgggctggtggcagacatgttcttgtgcttcccaataattccattactttggatggttcaaggtctactgatgaccaaagaattgtgtcctatctgtggatccgggatggccagagtccagcagctggagatgtcatcgatggctctgaccacagtgtggctctgcagcttacgaatctggtggagggggtgtacactttccacttgcgagtcaccgacagtcagggggcctcggacacagacactgccactgtggaagtgcagccagaccctaggaagagtggcctggtggagctgaccctgcaggttggtgttgggcagctgacagagcagcggaaggacacccttgtgaggcagctggctgtgctgctgaacgtgctggactcggacattaaggtccagaagattcgggcccactcggatctcagcaccgtgattgtgttttatgtacagagcaggccgcctttcaaggttctcaaagctgctgaagtggcccgaaatctgcacatgcggctctcaaaggagaaggctgacttcttgcttttcaaggtcttgagggttgatacagcaggttgccttctgaagtgttctggccatggtcactgcgaccccctcacaaagcgctgcatttgctctcacttatggatggagaaccttatacagcgttatatctgggatggagagagcaactgtgagtggagtatattctatgtgacagtgttggcttttactcttattgtgctaacaggaggtttcacttggctttgcatctgctgctgcaaaagacaaaaaaggactaaaatcaggaaaaaaacaaagtacaccatcctggataacatggatgaacaggaaagaatggaactgaggcccaaatatggtatcaagcaccgaagcacagagcacaactccagcctgatggtatccgagtctgagtttgacagtgaccaggacacaatcttcagccgagaaaagatggagagagggaatccaaaggtttccatgaatggttccatcagaaatggagcttccttcagttattgctcaaaggacagataatggcgcagttcattgtaaagtggaaggaccccttgaatccaagaccagtcagtgggagttacagcacaaaacccactcttttagaatagttcattgaccttcttccccagtgggttagatgtgtatccccacgtactaaaagaccggtttttgaaggcacaaaacaaaaactttgctcttttaactgagatgcttgttaatagaaataaaggctgggtaaaactctaaggtatatacttaaaagagttttgagtttttgtagctggcacaatctcatattaaagatgaacaacgatttctatctgtagaaccttagagaaggtgaatgaaacaaggttttaaaaagggatgatttctgtcttagctgctgtgattgcctctaaggaacagcattctaaacacggtttctcttgtaggacctgcagtcagatggctgtgtatgttaaaatagcttgtctaagaggcacgggccatctgtggaggtacggagtcttgcatgtagcaagctttctgtgctgacggcaacactcgcacagtgccaagccctcctggtttttaattctgtgctatgtcaatggcagttttcatctctctcaagaaagcagctgttggccattcaagagctaaggaagaatcgtattctaaggactgaggcaatagaaaggggaggaggagcttaatgccgtgcaggttgaaggtagcattgtaacattatcttttctttctctaagaaaaactacactgactcctctcggtgttgtttagcagtatagttctctaatgtaaacggatccccagtttacattaaatgcaatagaagtgattaattcattaagcatttattatgttctgtaggctgtgcgtttggactgccatagatagggataacgactcagcaattgtgtatatattccaaaactctgaaatacagtcagtcttaacttggatggcgtggttatgatactctggtccccgacaggtactttccaaaataacttgacatagatgtattcacttcatatgtttaaaaatacatttaagtttttctaccgaataaatcttatttcaaacatgaaagacaattaaaacattcccacccacaaagcagtactcccgagcaattaactggagttaattgtagcctgctacgttgactggttcagggtagttccccatccacccttggtcctgaggctggtggccttggtggtgcccttggcattttttgtgggaagattagaatgagagatagaaccagtgttgtggtaccaagtgtgagcacacctaaacaatatcctgttgcacaatgcttttttaacacatgggaaaactaggaatgcattgctgatgaagaagcaaggtatttaaacaccagggcaggagtgccagagaaaatgtttccccatgggttcttaaaaaaaattcagcttttaggtgcttttgtcatctcccgcagtattcatcctcatgggaccatcttatttttacttattgtaatttactggggaaaggcagaactaaaaagtgtgtcattttatttttaaaataattgctttgcttatgcctacactttctgtataactagccaattcaatactgtctatagtgttagaaggaaaatgtgatttttttttttaaccagtattgagcttcataagcctagaatctgccttatcaggtgaccagggttatggttgtttgcatgcaaatgtgaatttctggcataggggacagcagcccaaatgtaaagtcatcgggcgtaatgaggaagaagggagtgaacatttaccgctttatgtacataacatatgcagtttacatactcatttgatccttataatcaaccttgaagaggagatactatcattcttatgttgcagatagccctctgaaggcccagagaggttaaataacttcccagaggtcatggccaagaagtagtggctccaagaactgaatgcaaattttttaaactgtagagttctgctttccactaaacaaagaactcctgccttgatggatggagggcaaattctggtggaacttttgggccacctgaaagttctattcccaggactaagaggaatttcttttaatggatccagagagccaaggtcagagggagagatggcctgcatagtctcctgtggatcacacccgggccacccctccctctaggtttacagtggacttcttctgcccctcctccttttctgtccttggccatctcagcctggcctctctgatccttccatcacagaaggatcttgaatctctgggaaatcaaacatcacagtagtgatcagaaagtgagtcctgtcttgtcaccccatttctcatcagaacaaagcacgagatggaatgaccaaccagcattcttcatggtggactgcttatcattgaggatctttgggagataaagcacgctaagagctctggacagagaaaaacaggccctagaatatgggagtgggtgtttgtagggctcacaggctaacaagcactttagttgctggtttacattcaatgaaggaggattcatacccatggcattacaaggctaagcatgtgtatgactaaggaactatctgaaaaacatgcagcaaggtaagaaaatgtaccactcaacaagccagtgatgccaccttttgtgcgcggggaggagagtgactaccattgttttttgtgtgacaaagctatcatggactattttaatcttggttttattgcttaaaatatattatttttccctatgtgttgacaaggtatttctaatatcacactattaaatatatgcactaatctaaataaaggtgtctgtattttctgtaatgcttatttttagggggaaatttgttttctttatgcttcagggtagagggatttcccttgagtataggtcagcaaactgtggcctacagcctgtgtgtgcacgccccatgagccgaaaagtgggtcttatgttttcaaatggttaaaaataaataaaaaaatttgaaacatgtgaactatatgacattcagatttgtgttcataaataaagttttattggaacatatcc

SEQ ID NO: 145778 - DNA, 5314 bp, Homo sapiens
  Payload ID: 8910
  Gene Symbol: KIAA0319
  Gene Name: KIAA0319
  Uniprot ID: Q5VV43
  ENST ID: ENST00000543707
  CDS Start-End: 353-3571
agcctgtcttgggcttggtccagattcgctcctctggggctacgtcccggggaagaggaagcgaggattttgctggggtggggctgtacctcttaacagcaggtgcgcgcgcgagggtgtgtgtgtgtgtgtgtgtgtgtgtaagacctgcgatgacgacgaggaggaacaagtgggacggcgagtgatgctcagggccagcagcaacgcatggggcgagcttcagtgtcgccagcagtgaccacagttcttgaggccaaatctggctcctaaaaaacatcaaaggaagcttgcaccaaactctcttcagggccgcctcagaagcctgccatcacccactgtgtggtgcacaatggcgccccccacaggtgtgctctcttcattgctgctgctggtgacaattgcaggttgtgcccgtaagcagtgcagcgaggggaggacatattccaatgcagtcatttcacctaacttggaaaccaccagaatcatgcgggtgtctcacaccttccctgtcgtagactgcacggccgcttgctgtgacctgtccagctgtgacctggcctggtggttcgagggccgctgctacctggtgagctgcccccacaaagagaactgtgagcccaagaagatgggccccatcaggtcttatctcacttttgtgctccggcctgttcagaggcctgcacagctgctggactatggggacatgatgctgaacaggggctccccctcggggatctggggggactcacctgaggatatcagaaaggacttgacctttctaggcaaagattggggcctagaggagatgtctgagtactcagatgactaccgggagctggagaaggacctcttgcaacccagtggcaagcaggagcccagagggagtgccgagtacacggactggggcctactgccgggcagcgagggggccttcaactcctctgttggagacagtcctgcggtgccagcggagacgcagcaggaccctgagctccattacctgaatgagtcggcttcaacccctgccccaaaactccctgagagaagtgtgttgcttcccttgccgactactccatcttcaggagaggtgttggagaaagaaaaggcttctcagctccaggaacaatccagcaacagctctggaaaagaggttctaatgccttcccatagtcttcctccggcaagcctggagctcagctcagtcaccgtggagaaaagcccagtgctcacagtcaccccggggagtacagagcacagcatcccaacacctcccactagcgcagccccctctgagtccaccccatctgagctacccatatctcctaccactgctcccaggacagtgaaagaacttacggtatcggctggagataacctaattataactttacccgacaatgaagttgaactgaaggcctttgttgcgccagcgccacctgtagaaacaacctacaactatgaatggaatttaataagccaccccacagactaccaaggtgaaataaaacaaggacacaagcaaactcttaacctctctcaattgtccgtcggactttatgtcttcaaagtcactgtttctagtgaaaacgcctttggagaaggatttgtcaatgtcactgttaagcctgccagaagagtcaacctgccacctgtagcagttgtttctccccaactgcaagagctcactttgcctttgacgtcagccctcattgatggcagccaaagtacagatgatactgaaatagtgagttatcattgggaagaaataaacgggcccttcatagaagagaagacttcagttgactctcccgtcttacgcttgtctaaccttgatcctggtaactatagtttcaggttgactgttacagactcggacggagccactaactctacaactgcagccctaatagtgaacaatgctgtggactacccaccagttgctaatgcaggaccaaatcacaccataactttgccccaaaactccatcactttgaatggaaaccagagcagtgacgatcaccagattgtcctctatgagtggtccctgggtcctgggagtgagggcaaacatgtggtcatgcagggagtacagacgccataccttcatttatctgcaatgcaggaaggagattatacatttcagctgaaggtgacagattcttcaaggcaacagtctactgctgtggtgactgtgattgtccagcctgaaaacaatagacctccagtggctgtggccggccctgataaagagctgatcttcccagtggaaagtgctaccctggatgggagcagcagcagcgatgaccacggcattgtcttctaccactgggagcacgtcagaggccccagtgcagtggagatggaaaatattgacaaagcaatagccactgtgactggtctccaggtggggacctaccacttccgtttgacagtgaaagaccagcagggactgagcagcacgtccaccctcactgtggctgtgaagaaggaaaataatagtcctcccagagcccgggctggtggcagacatgttcttgtgcttcccaataattccattactttggatggttcaaggtctactgatgaccaaagaattgtgtcctatctgtggatccgggatggccagagtccagcagctggagatgtcatcgatggctctgaccacagtgtggctctgcagcttacgaatctggtggagggggtgtacactttccacttgcgagtcaccgacagtcagggggcctcggacacagacactgccactgtggaagtgcagccagaccctaggaagagtggcctggtggagctgaccctgcaggttggtgttgggcagctgacagagcagcggaaggacacccttgtgaggcagctggctgtgctgctgaacgtgctggactcggacattaaggtccagaagattcgggcccactcggatctcagcaccgtgattgtgttttatgtacagagcaggccgcctttcaaggttctcaaagctgctgaagtggcccgaaatctgcacatgcggctctcaaaggagaaggctgacttcttgcttttcaaggtcttgagggttgatacagcaggttgccttctgaagtgttctggccatggtcactgcgaccccctcacaaagcgctgcatttgctctcacttatggatggagaaccttatacagcgttatatctgggatggagagagcaactgtgagtggagtatattctatgtgacagtgttggcttttactcttattgtgctaacaggaggtttcacttggctttgcatctgctgctgcaaaagacaaaaaaggactaaaatcaggaaaaaaacaaagtacaccatcctggataacatggatgaacaggaaagaatggaactgaggcccaaatatggtatcaagcaccgaagcacagagcacaactccagcctgatggtatccgagtctgagtttgacagtgaccaggacacaatcttcagccgagaaaagatggagagagggaatccaaaggtttccatgaatggttccatcagaaatggagcttccttcagttattgctcaaaggacagataatggcgcagttcattgtaaagtggaaggaccccttgaatccaagaccagtcagtgggagttacagcacaaaacccactcttttagaatagttcattgaccttcttccccagtgggttagatgtgtatccccacgtactaaaagaccggtttttgaaggcacaaaacaaaaactttgctcttttaactgagatgcttgttaatagaaataaaggctgggtaaaactctaaggtatatacttaaaagagttttgagtttttgtagctggcacaatctcatattaaagatgaacaacgatttctatctgtagaaccttagagaaggtgaatgaaacaaggttttaaaaagggatgatttctgtcttagctgctgtgattgcctctaaggaacagcattctaaacacggtttctcttgtaggacctgcagtcagatggctgtgtatgttaaaatagcttgtctaagaggcacgggccatctgtggaggtacggagtcttgcatgtagcaagctttctgtgctgacggcaacactcgcacagtgccaagccctcctggtttttaattctgtgctatgtcaatggcagttttcatctctctcaagaaagcagctgttggccattcaagagctaaggaagaatcgtattctaaggactgaggcaatagaaaggggaggaggagcttaatgccgtgcaggttgaaggtagcattgtaacattatcttttctttctctaagaaaaactacactgactcctctcggtgttgtttagcagtatagttctctaatgtaaacggatccccagtttacattaaatgcaatagaagtgattaattcattaagcatttattatgttctgtaggctgtgcgtttggactgccatagatagggataacgactcagcaattgtgtatatattccaaaactctgaaatacagtcagtcttaacttggatggcgtggttatgatactctggtccccgacaggtactttccaaaataacttgacatagatgtattcacttcatatgtttaaaaatacatttaagtttttctaccgaataaatcttatttcaaacatgaaagacaattaaaacattcccacccacaaagcagtactcccgagcaattaactggagttaattgtagcctgctacgttgactggttcagggtagttccccatccacccttggtcctgaggctggtggccttggtggtgcccttggcattttttgtgggaagattagaatgagagatagaaccagtgttgtggtaccaagtgtgagcacacctaaacaatatcctgttgcacaatgcttttttaacacatgggaaaactaggaatgcattgctgatgaagaagcaaggtatttaaacaccagggcaggagtgccagagaaaatgtttccccatgggttcttaaaaaaaattcagcttttaggtgcttttgtcatctcccgcagtattcatcctcatgggaccatcttatttttacttattgtaatttactggggaaaggcagaactaaaaagtgtgtcattttatttttaaaataattgctttgcttatgcctacactttctgtataactagccaattcaatactgtctatagtgttagaaggaaaatgtgatttttttttttaaccagtattgagcttcataagcctagaatctgccttatcaggtgaccagggttatggttgtttgcatgcaaatgtgaatttctggcataggggacagcagcccaaa

SEQ ID NO: 145779 - DNA, 6622 bp, Homo sapiens
  Payload ID: 8910
  Gene Symbol: KIAA0319
  Gene Name: KIAA0319
  Uniprot ID: Q5VV43
  ENST ID: ENST00000537886
  CDS Start-End: 526-3561
gctgccgcgggcggtgggcggggatcccccgggggtgcaaccttgctccacctgtgctgccctcggcgggcctggctggccccgcgcagagcggcggcggcgctcgctgtcactgccggaggtgagagcgcagcagtagcttcagcctgtcttgggcttggtccagattcgctcctctggggctacgtcccggggaagaggaagcgaggattttgctggggtggggctgtacctcttaacagcaggtgcgcgcgcgagggtgtgaacgtgtgtgtgtgtgtgtgtgtgtgtgtgtgtgtgtgtgtgtgtgtgtgtaagacctgcgatgacgacgaggaggaacaagtgggacggcgagtgatgctcagggccagcagcaacgcatggggcgagcttcagtgtcgccagcagtgaccacagttcttgaggccaaatctggctcctaaaaaacatcaaaggaagcttgcaccaaactctcttcagggccgcctcagaagcctgccatcacccactgtgtggtgcacaatggcgccccccacaggtgtgctctcttcattgctgctgctggtgacaattgcaggttgtgcccgtaagcagtgcagcgaggggaggacatattccaatgcagtcatttcacctaacttggaaaccaccagaatcatgcgggtgtctcacaccttccctgtcgtagactgcacggccgcttgctgtgacctgtccagctgtgacctggcctggtggttcgagggccgctgctacctggtgagctgcccccacaaagagaactgtgagcccaagaagatgggccccatcaggtcttatctcacttttgtgctccggcctgttcagaggcctgcacagctgctggactatggggacatgatgctgaacaggggctccccctcggggatctggggggactcacctgaggatatcagaaaggacttgacctttctaggcaaagattggggcctagaggagatgtctgagtactcagatgactaccgggagctggagaaggacctcttgcaacccagtggcaagcaggagcccagagggagtgccgagtacacggactggggcctactgccgggcagcgagggggccttcaactcctctgttggagacagtcctgcggtgccagcggagacgcagcaggaccctgagctccattacctgaatgagtcggcttcaacccctgccccaaaactccctgagagaagtgtgttgcttcccttgccgactactccatcttcaggagaggtgttggagaaagaaaaggcttctcagctccaggaacaatccagcaacagctctggaaaagaggttctaatgccttcccatagtcttcctccggcaagcctggagctcagctcagtcaccgtggagaaaagcccagtgctcacagtcaccccggggagtacagagcacagcatcccaacacctcccactagcgcagccccctctgagtccaccccatctgagctacccatatctcctaccactgctcccaggacagtgaaagaacttacggtatcggctggagataacctaattataactttacccgacaatgaagttgaactgaaggcctttgttgcgccagcgccacctgtagaaacaacctacaactatgaatggaatttaataagccaccccacagactaccaaggtgaaataaaacaaggacacaagcaaactcttaacctctctcaattgtccgtcggactttatgtcttcaaagtcactgtttctagtgaaaacgcctttggagaaggatttgtcaatgtcactgttaagcctgccagaagagtcaacctgccacctgtagcagttgtttctccccaactgcaagagctcactttgcctttgacgtcagccctcattgatggcagccaaagtacagatgatactgaaatagtgagttatcattgggaagaaataaacgggcccttcatagaagagaagacttcagttgactctcccgtcttacgcttgtctaaccttgatcctggtaactatagtttcaggttgactgttacagactcggacggagccactaactctacaactgcagccctaatagtgaacaatgctgtggactacccaccagttgctaatgcaggaccaaatcacaccataactttgccccaaaactccatcactttgaatggaaaccagagcagtgacgatcaccagattgtcctctatgagtggtccctgggtcctgggagtgagggcaaacatgtggtcatgcagggagtacagacgccataccttcatttatctgcaatgcaggaaggagattatacatttcagctgaaggtgacagattcttcaaggcaacagtctactgctgtggtgactgtgattgtccagcctgaaaacaatagacctccagtggctgtggccggccctgataaagagctgatcttcccagtggaaagtgctaccctggatgggagcagcagcagcgatgaccacggcattgtcttctaccactgggagcacgtcagaggccccagtgcagtggagatggaaaatattgacaaagcaatagccactgtgactggtctccaggtggggacctaccacttccgtttgacagtgaaagaccagcagggactgagcagcacgtccaccctcactgtggctgtgaagaaggaaaataatagtcctcccagagcccgggctggtggcagacatgttcttgtgcttcccaataattccattactttggatggttcaaggtctactgatgaccaaagaattgtgtcctatctgtggatccgggatggccagagtccagcagctggagatgtcatcgatggctctgaccacagtgtggctctgcagcttacgaatctggtggagggggtgtacactttccacttgcgagtcaccgacagtcagggggcctcggacacagacactgccactgtggaagtgcagccagaccctaggaagagtggcctggtggagctgaccctgcaggttggtgttgggcagctgacagagcagcggaaggacacccttgtgaggcagctggctgtgctgctgaacgtgctggactcggacattaaggtccagaagattcgggcccactcggatctcagcaccgtgattgtgttttatgtacagagcaggccgcctttcaaggttctcaaagctgctgaagtggcccgaaatctgcacatgcggctctcaaaggagaaggctgacttcttgcttttcaaggtcttgagggttgatacagcaggttgccttctgaagtgttctggccatggtcactgcgaccccctcacaaagcgctgcatttgctctcacttatggatggagaaccttatacagcgttatatctgggatggagagagcaactgtggtatcaagcaccgaagcacagagcacaactccagcctgatggtatccgagtctgagtttgacagtgaccaggacacaatcttcagccgagaaaagatggagagagggaatccaaaggtttccatgaatggttccatcagaaatggagcttccttcagttattgctcaaaggacagataatggcgcagttcattgtaaagtggaaggaccccttgaatccaagaccagtcagtgggagttacagcacaaaacccactcttttagaatagttcattgaccttcttccccagtgggttagatgtgtatccccacgtactaaaagaccggtttttgaaggcacaaaacaaaaactttgctcttttaactgagatgcttgttaatagaaataaaggctgggtaaaactctaaggtatatacttaaaagagttttgagtttttgtagctggcacaatctcatattaaagatgaacaacgatttctatctgtagaaccttagagaaggtgaatgaaacaaggttttaaaaagggatgatttctgtcttagctgctgtgattgcctctaaggaacagcattctaaacacggtttctcttgtaggacctgcagtcagatggctgtgtatgttaaaatagcttgtctaagaggcacgggccatctgtggaggtacggagtcttgcatgtagcaagctttctgtgctgacggcaacactcgcacagtgccaagccctcctggtttttaattctgtgctatgtcaatggcagttttcatctctctcaagaaagcagctgttggccattcaagagctaaggaagaatcgtattctaaggactgaggcaatagaaaggggaggaggagcttaatgccgtgcaggttgaaggtagcattgtaacattatcttttctttctctaagaaaaactacactgactcctctcggtgttgtttagcagtatagttctctaatgtaaacggatccccagtttacattaaatgcaatagaagtgattaattcattaagcatttattatgttctgtaggctgtgcgtttggactgccatagatagggataacgactcagcaattgtgtatatattccaaaactctgaaatacagtcagtcttaacttggatggcgtggttatgatactctggtccccgacaggtactttccaaaataacttgacatagatgtattcacttcatatgtttaaaaatacatttaagtttttctaccgaataaatcttatttcaaacatgaaagacaattaaaacattcccacccacaaagcagtactcccgagcaattaactggagttaattgtagcctgctacgttgactggttcagggtagttccccatccacccttggtcctgaggctggtggccttggtggtgcccttggcattttttgtgggaagattagaatgagagatagaaccagtgttgtggtaccaagtgtgagcacacctaaacaatatcctgttgcacaatgcttttttaacacatgggaaaactaggaatgcattgctgatgaagaagcaaggtatttaaacaccagggcaggagtgccagagaaaatgtttccccatgggttcttaaaaaaaattcagcttttaggtgcttttgtcatctcccgcagtattcatcctcatgggaccatcttatttttacttattgtaatttactggggaaaggcagaactaaaaagtgtgtcattttatttttaaaataattgctttgcttatgcctacactttctgtataactagccaattcaatactgtctatagtgttagaaggaaaatgtgatttttttttttaaccagtattgagcttcataagcctagaatctgccttatcaggtgaccagggttatggttgtttgcatgcaaatgtgaatttctggcataggggacagcagcccaaatgtaaagtcatcgggcgtaatgaggaagaagggagtgaacatttaccgctttatgtacataacatatgcagtttacatactcatttgatccttataatcaaccttgaagaggagatactatcattcttatgttgcagatagccctctgaaggcccagagaggttaaataacttcccagaggtcatggccaagaagtagtggctccaagaactgaatgcaaattttttaaactgtagagttctgctttccactaaacaaagaactcctgccttgatggatggagggcaaattctggtggaacttttgggccacctgaaagttctattcccaggactaagaggaatttcttttaatggatccagagagccaaggtcagagggagagatggcctgcatagtctcctgtggatcacacccgggccacccctccctctaggtttacagtggacttcttctgcccctcctccttttctgtccttggccatctcagcctggcctctctgatccttccatcacagaaggatcttgaatctctgggaaatcaaacatcacagtagtgatcagaaagtgagtcctgtcttgtcaccccatttctcatcagaacaaagcacgagatggaatgaccaaccagcattcttcatggtggactgcttatcattgaggatctttgggagataaagcacgctaagagctctggacagagaaaaacaggccctagaatatgggagtgggtgtttgtagggctcacaggctaacaagcactttagttgctggtttacattcaatgaaggaggattcatacccatggcattacaaggctaagcatgtgtatgactaaggaactatctgaaaaacatgcagcaaggtaagaaaatgtaccactcaacaagccagtgatgccaccttttgtgcgcggggaggagagtgactaccattgttttttgtgtgacaaagctatcatggactattttaatcttggttttattgcttaaaatatattatttttccctatgtgttgacaaggtatttctaatatcacactattaaatatatgcactaatctaaataaaggtgtctgtattttctgtaatgcttatttttagggggaaatttgttttctttatgcttcagggtagagggatttcccttgagtataggtcagcaaactgtggcctacagcctgtgtgtgcacgccccatgagccgaaaagtgggtcttatgttttcaaatggttaaaaataaataaaaaaatttgaaacatgtgaactatatgacattcagatttgtgttcataaataaagttttattggaacatatcc

SEQ ID NO: 145780 - DNA, 6896 bp, Homo sapiens
  Payload ID: 8910
  Gene Symbol: KIAA0319
  Gene Name: KIAA0319
  Uniprot ID: Q5VV43
  ENST ID: ENST00000535378
  CDS Start-End: 644-3835
gctgccgcgggcggtgggcggggatcccccgggggtgcaaccttgctccacctgtgctgccctcggcgggcctggctggccccgcgcagagcggcggcggcgctcgctgtcactgccggaggtgagagcgcagcagtagcttcagcctgtcttgggcttggtccagattcgctcctctggggctacgtcccggggaagaggaagcgaggattttgctggggtggggctgtacctcttaacagcaggtgcgcgcgcgagggtgtgaacgtgtgtgtgtgtgtgtgtgtgtgtgtgtgtgtgtgtgtgtgtgtgtgtaagacctgcgatgacgacgaggaggaacaagtgggacggcgagtgatgctcagggccagcagcaacgcatggggcgagcttcagtgtcgccagcagtgaccacagttcttgaggccaaatctggctcctaaaaaacatcaaaggaagcttgcaccaaactctcttcagggccgcctcagaagcctgccatcacccactgtgtggtgcacaatggcgccccccacaggtgtgctctcttcattgctgctgctggtgacaattgcagtttgcttatggtggatgcactcatggcaaaaaaatcactggtgagcatcatttaagaagacccatgactagactgggctggccgagcccatgttgtgcccgtaagcagtgcagcgaggggaggacatattccaatgcagtcatttcacctaacttggaaaccaccagaatcatgcgggtgtctcacaccttccctgtcgtagactgcacggccgcttgctgtgacctgtccagctgtgacctggcctggtggttcgagggccgctgctacctggtgagctgcccccacaaagagaactgtgagcccaagaagatgggccccatcaggtcttatctcacttttgtgctccggcctgttcagaggcctgcacagctgctggactatggggacatgatgctgaacaggggctccccctcggggatctggggggactcacctgaggatatcagaaaggacttgacctttctaggcaaagattggggcctagaggagatgtctgagtactcagatgactaccgggagctggagaaggacctcttgcaacccagtggcaagcaggagcccagagggagtgccgagtacacggactggggcctactgccgggcagcgagggggccttcaactcctctgttggagacagtcctgcggtgccagcggagacgcagcaggaccctgagctccattacctgaatgagtcggcttcaacccctgccccaaaactccctgagagaagtgtgttgcttcccttgccgactactccatcttcaggagaggtgttggagaaagaaaaggcttctcagctccaggaacaatccagcaacagctctggaaaagaggttctaatgccttcccatagtcttcctccggcaagcctggagctcagctcagtcaccgtggagaaaagcccagtgctcacagtcaccccggggagtacagagcacagcatcccaacacctcccactagcgcagccccctctgagtccaccccatctgagctacccatatctcctaccactgctcccaggacagtgaaagaacttacggtatcggctggagataacctaattataactttacccgacaatgaagttgaactgaaggcctttgttgcgccagcgccacctgtagaaacaacctacaactatgaatggaatttaataagccaccccacagactaccaaggtgaaataaaacaaggacacaagcaaactcttaacctctctcaattgtccgtcggactttatgtcttcaaagtcactgtttctagtgaaaacgcctttggagaaggatttgtcaatgtcactgttaagcctgccagaagagtcaacctgccacctgtagcagttgtttctccccaactgcaagagctcactttgcctttgacgtcagccctcattgatggcagccaaagtacagatgatactgaaatagtgagttatcattgggaagaaataaacgggcccttcatagaagagaagacttcagttgactctcccgtcttacgcttgtctaaccttgatcctggtaactatagtttcaggttgactgttacagactcggacggagccactaactctacaactgcagccctaatagtgaacaatgctgtggactacccaccagttgctaatgcaggaccaaatcacaccataactttgccccaaaactccatcactttgaatggaaaccagagcagtgacgatcaccagattgtcctctatgagtggtccctgggtcctgggagtgagggcaaacatgtggtcatgcagggagtacagacgccataccttcatttatctgcaatgcaggaaggagattatacatttcagctgaaggtgacagattcttcaaggcaacagtctactgctgtggtgactgtgattgtccagcctgaaaacaatagacctccagtggctgtggccggccctgataaagagctgatcttcccagtggaaagtgctaccctggatgggagcagcagcagcgatgaccacggcattgtcttctaccactgggagcacgtcagaggccccagtgcagtggagatggaaaatattgacaaagcaatagccactgtgactggtctccaggtggggacctaccacttccgtttgacagtgaaagaccagcagggactgagcagcacgtccaccctcactgtggctgtgaagaaggaaaataatagtcctcccagagcccgggctggtggcagacatgttcttgtgcttcccaataattccattactttggatggttcaaggtctactgatgaccaaagaattgtgtcctatctgtggatccgggatggccagagtccagcagctggagatgtcatcgatggctctgaccacagtgtggctctgcagcttacgaatctggtggagggggtgtacactttccacttgcgagtcaccgacagtcagggggcctcggacacagacactgccactgtggaagtgcagccagaccctaggaagagtggcctggtggagctgaccctgcaggttggtgttgggcagctgacagagcagcggaaggacacccttgtgaggcagctggctgtgctgctgaacgtgctggactcggacattaaggtccagaagattcgggcccactcggatctcagcaccgtgattgtgttttatgtacagagcaggccgcctttcaaggttctcaaagctgctgaagtggcccgaaatctgcacatgcggctctcaaaggagaaggctgacttcttgcttttcaaggtcttgagggttgatacagcaggttgccttctgaagtgttctggccatggtcactgcgaccccctcacaaagcgctgcatttgctctcacttatggatggagaaccttatacagcgttatatctgggatggagagagcaactgtgagtggagtatattctatgtgacagtgttggcttttactcttattgtgctaacaggaggtttcacttggctttgcatctgctgctgcaaaagacaaaaaaggactaaaatcaggaaaaaaacaaagtacaccatcctggataacatggatgaacaggaaagaatggaactgaggcccaaatatggtatcaagcaccgaagcacagagcacaactccagcctgatggtatccgagtctgagtttgacagtgaccaggacacaatcttcagccgagaaaagatggagagagggaatccaaaggtttccatgaatggttccatcagaaatggagcttccttcagttattgctcaaaggacagataatggcgcagttcattgtaaagtggaaggaccccttgaatccaagaccagtcagtgggagttacagcacaaaacccactcttttagaatagttcattgaccttcttccccagtgggttagatgtgtatccccacgtactaaaagaccggtttttgaaggcacaaaacaaaaactttgctcttttaactgagatgcttgttaatagaaataaaggctgggtaaaactctaaggtatatacttaaaagagttttgagtttttgtagctggcacaatctcatattaaagatgaacaacgatttctatctgtagaaccttagagaaggtgaatgaaacaaggttttaaaaagggatgatttctgtcttagctgctgtgattgcctctaaggaacagcattctaaacacggtttctcttgtaggacctgcagtcagatggctgtgtatgttaaaatagcttgtctaagaggcacgggccatctgtggaggtacggagtcttgcatgtagcaagctttctgtgctgacggcaacactcgcacagtgccaagccctcctggtttttaattctgtgctatgtcaatggcagttttcatctctctcaagaaagcagctgttggccattcaagagctaaggaagaatcgtattctaaggactgaggcaatagaaaggggaggaggagcttaatgccgtgcaggttgaaggtagcattgtaacattatcttttctttctctaagaaaaactacactgactcctctcggtgttgtttagcagtatagttctctaatgtaaacggatccccagtttacattaaatgcaatagaagtgattaattcattaagcatttattatgttctgtaggctgtgcgtttggactgccatagatagggataacgactcagcaattgtgtatatattccaaaactctgaaatacagtcagtcttaacttggatggcgtggttatgatactctggtccccgacaggtactttccaaaataacttgacatagatgtattcacttcatatgtttaaaaatacatttaagtttttctaccgaataaatcttatttcaaacatgaaagacaattaaaacattcccacccacaaagcagtactcccgagcaattaactggagttaattgtagcctgctacgttgactggttcagggtagttccccatccacccttggtcctgaggctggtggccttggtggtgcccttggcattttttgtgggaagattagaatgagagatagaaccagtgttgtggtaccaagtgtgagcacacctaaacaatatcctgttgcacaatgcttttttaacacatgggaaaactaggaatgcattgctgatgaagaagcaaggtatttaaacaccagggcaggagtgccagagaaaatgtttccccatgggttcttaaaaaaaattcagcttttaggtgcttttgtcatctcccgcagtattcatcctcatgggaccatcttatttttacttattgtaatttactggggaaaggcagaactaaaaagtgtgtcattttatttttaaaataattgctttgcttatgcctacactttctgtataactagccaattcaatactgtctatagtgttagaaggaaaatgtgatttttttttttaaccagtattgagcttcataagcctagaatctgccttatcaggtgaccagggttatggttgtttgcatgcaaatgtgaatttctggcataggggacagcagcccaaatgtaaagtcatcgggcgtaatgaggaagaagggagtgaacatttaccgctttatgtacataacatatgcagtttacatactcatttgatccttataatcaaccttgaagaggagatactatcattcttatgttgcagatagccctctgaaggcccagagaggttaaataacttcccagaggtcatggccaagaagtagtggctccaagaactgaatgcaaattttttaaactgtagagttctgctttccactaaacaaagaactcctgccttgatggatggagggcaaattctggtggaacttttgggccacctgaaagttctattcccaggactaagaggaatttcttttaatggatccagagagccaaggtcagagggagagatggcctgcatagtctcctgtggatcacacccgggccacccctccctctaggtttacagtggacttcttctgcccctcctccttttctgtccttggccatctcagcctggcctctctgatccttccatcacagaaggatcttgaatctctgggaaatcaaacatcacagtagtgatcagaaagtgagtcctgtcttgtcaccccatttctcatcagaacaaagcacgagatggaatgaccaaccagcattcttcatggtggactgcttatcattgaggatctttgggagataaagcacgctaagagctctggacagagaaaaacaggccctagaatatgggagtgggtgtttgtagggctcacaggctaacaagcactttagttgctggtttacattcaatgaaggaggattcatacccatggcattacaaggctaagcatgtgtatgactaaggaactatctgaaaaacatgcagcaaggtaagaaaatgtaccactcaacaagccagtgatgccaccttttgtgcgcggggaggagagtgactaccattgttttttgtgtgacaaagctatcatggactattttaatcttggttttattgcttaaaatatattatttttccctatgtgttgacaaggtatttctaatatcacactattaaatatatgcactaatctaaataaaggtgtctgtattttctgtaatgcttatttttagggggaaatttgttttctttatgcttcagggtagagggatttcccttgagtataggtcagcaaactgtggcctacagcctgtgtgtgcacgccccatgagccgaaaagtgggtcttatgttttcaaatggttaaaaataaataaaaaaatttgaaacatgtgaactatatgacattcagatttgtgttcataaataaagttttattggaacatatcc

SEQ ID NO: 145781 - DNA, 5315 bp, Homo sapiens
  Payload ID: 8910
  Gene Symbol: KIAA0319
  Gene Name: KIAA0319
  ENST ID: ENST00000616673
  CDS Start-End: 803-2254
agatactgtggcattgacaatcacggctctcaggttctcaggatgcctcacactagctgctcaaaaaaatttattcaaaatgctctttcttctacttgtccagtgctctaccattcagtaagcatttgacctgggacctgtggcctgtcaaatgcattgtttttaagaaacaacctacaactatgaatggaatttaataagccaccccacagactaccaaggtgaaataaaacaaggacacaagcaaactcttaacctctctcaattgtccgtcggactttatgtcttcaaagtcactgtttctagtgaaaacgcctttggagaaggatttgtcaatgtcactgttaagcctgccagaagagtcaacctgccacctgtagcagttgtttctccccaactgcaagagctcactttgcctttgacgtcagccctcattgatggcagccaaagtacagatgatactgaaatagtgagttatcattgggaagaaataaacgggcccttcatagaagagaagacttcagttgactctcccgtcttacgcttgtctaaccttgatcctggtaactatagtttcaggttgactgttacagactcggacggagccactaactctacaactgcagccctaatagtgaacaatgctgtggactacccaccagttgctaatgcaggaccaaatcacaccataactttgccccaaaactccatcactttgaatggaaaccagagcagtgacgatcaccagattgtcctctatgagtggtccctgggtcctgggagtgagggcaaacatgtggtcatgcaggaaggagattatacatttcagctgaaggtgacagattcttcaaggcaacagtctactgctgtggtgactgtgattgtccagcctgaaaacaatagacctccagtggctgtggccggccctgataaagagctgatcttcccagtggaaagtgctaccctggatgggagcagcagcagcgatgaccacggcattgtcttctaccactgggagcacgtcagaggccccagtgcagtggagatggaaaatattgacaaagcaatagccactgtgactggtctccaggtggggacctaccacttccgtttgacagtgaaagaccagcagggactgagcagcacgtccaccctcactgtggctgtgaagaaggaaaataatagtcctcccagagcccgggctggtggcagacatgttcttgtgcttcccaataattccattactttggatggttcaaggtctactgatgaccaaagaattgtgtcctatctgtggatccgggatggccagagtccagcagctggagatgtcatcgatggctctgaccacagtgtggctctgcagcttacgaatctggtggagggggtgtacactttccacttgcgagtcaccgacagtcagggggcctcggacacagacactgccactgtggaagtgcagccagaccctaggaagagtggcctggtggagctgaccctgcaggttggtgttgggcagctgacagagcagcggaaggacacccttgtgaggcagctggctgtgctgctgaacgtgctggactcggacattaaggtccagaagattcgggcccactcggatctcagcaccgtgattgtgttttatgtacagagcaggccgcctttcaaggttctcaaagctgctgaagtggcccgaaatctgcacatgcggctctcaaaggagaaggctgacttcttgcttttcaaggtcttgagggttgatacagcaggttgccttctgaagtgttctggccatggtcactgcgaccccctcacaaagcgctgcatttgctctcacttatggatggagaaccttatacagcgttatatctgggatggagagagcaactgtgagtggagtatattctatgtgacagtgttggcttttactcttattgtgctaacaggaggtttcacttggctttgcatctgctgctgcaaaagacaaaaaaggactaaaatcaggaaaaaaacaaagtacaccatcctggataacatggatgaacaggaaagaatggaactgaggcccaaatatggtatcaagcaccgaagcacagagcacaactccagcctgatggtatccgagtctgagtttgacagtgaccaggacacaatcttcagccgagaaaagatggagagagggaatccaaaggtttccatgaatggttccatcagaaatggagcttccttcagttattgctcaaaggacagataatggcgcagttcattgtaaagtggaaggaccccttgaatccaagaccagtcagtgggagttacagcacaaaacccactcttttagaatagttcattgaccttcttccccagtgggttagatgtgtatccccacgtactaaaagaccggtttttgaaggcacaaaacaaaaactttgctcttttaactgagatgcttgttaatagaaataaaggctgggtaaaactctaaggtatatacttaaaagagttttgagtttttgtagctggcacaatctcatattaaagatgaacaacgatttctatctgtagaaccttagagaaggtgaatgaaacaaggttttaaaaagggatgatttctgtcttagctgctgtgattgcctctaaggaacagcattctaaacacggtttctcttgtaggacctgcagtcagatggctgtgtatgttaaaatagcttgtctaagaggcacgggccatctgtggaggtacggagtcttgcatgtagcaagctttctgtgctgacggcaacactcgcacagtgccaagccctcctggtttttaattctgtgctatgtcaatggcagttttcatctctctcaagaaagcagctgttggccattcaagagctaaggaagaatcgtattctaaggactgaggcaatagaaaggggaggaggagcttaatgccgtgcaggttgaaggtagcattgtaacattatcttttctttctctaagaaaaactacactgactcctctcggtgttgtttagcagtatagttctctaatgtaaacggatccccagtttacattaaatgcaatagaagtgattaattcattaagcatttattatgttctgtaggctgtgcgtttggactgccatagatagggataacgactcagcaattgtgtatatattccaaaactctgaaatacagtcagtcttaacttggatggcgtggttatgatactctggtccccgacaggtactttccaaaataacttgacatagatgtattcacttcatatgtttaaaaatacatttaagtttttctaccgaataaatcttatttcaaacatgaaagacaattaaaacattcccacccacaaagcagtactcccgagcaattaactggagttaattgtagcctgctacgttgactggttcagggtagttccccatccacccttggtcctgaggctggtggccttggtggtgcccttggcattttttgtgggaagattagaatgagagatagaaccagtgttgtggtaccaagtgtgagcacacctaaacaatatcctgttgcacaatgcttttttaacacatgggaaaactaggaatgcattgctgatgaagaagcaaggtatttaaacaccagggcaggagtgccagagaaaatgtttccccatgggttcttaaaaaaaattcagcttttaggtgcttttgtcatctcccgcagtattcatcctcatgggaccatcttatttttacttattgtaatttactggggaaaggcagaactaaaaagtgtgtcattttatttttaaaataattgctttgcttatgcctacactttctgtataactagccaattcaatactgtctatagtgttagaaggaaaatgtgatttttttttttaaccagtattgagcttcataagcctagaatctgccttatcaggtgaccagggttatggttgtttgcatgcaaatgtgaatttctggcataggggacagcagcccaaatgtaaagtcatcgggcgtaatgaggaagaagggagtgaacatttaccgctttatgtacataacatatgcagtttacatactcatttgatccttataatcaaccttgaagaggagatactatcattcttatgttgcagatagccctctgaaggcccagagaggttaaataacttcccagaggtcatggccaagaagtagtggctccaagaactgaatgcaaattttttaaactgtagagttctgctttccactaaacaaagaactcctgccttgatggatggagggcaaattctggtggaacttttgggccacctgaaagttctattcccaggactaagaggaatttcttttaatggatccagagagccaaggtcagagggagagatggcctgcatagtctcctgtggatcacacccgggccacccctccctctaggtttacagtggacttcttctgcccctcctccttttctgtccttggccatctcagcctggcctctctgatccttccatcacagaaggatcttgaatctctgggaaatcaaacatcacagtagtgatcagaaagtgagtcctgtcttgtcaccccatttctcatcagaacaaagcacgagatggaatgaccaaccagcattcttcatggtggactgcttatcattgaggatctttgggagataaagcacgctaagagctctggacagagaaaaacaggccctagaatatgggagtgggtgtttgtagggctcacaggctaacaagcactttagttgctggtttacattcaatgaaggaggattcatacccatggcattacaaggctaagcatgtgtatgactaaggaactatctgaaaaacatgcagcaaggtaagaaaatgtaccactcaacaagccagtgatgccaccttttgtgcgcggggaggagagtgactaccattgttttttgtgtgacaaagctatcatggactattttaatcttggttttattgcttaaaatatattatttttccctatgtgttgacaaggtatttctaatatcacactattaaatatatgcactaatctaaataaaggtgtctgtattttctgtaatgcttatttttagggggaaatttgttttctttatgcttcagggtagagggatttcccttgagtataggtcagcaaactgtggcctacagcctgtgtgtgcacgccccatgagccgaaaagtgggtcttatgttttcaaatggttaaaaataaataaaaaaatttgaaacatgtgaactatatgacattcagatttgtgttcataaataaagttttattggaacatatcc

SEQ ID NO: 145782 - DNA, 4789 bp, Homo sapiens
  Payload ID: 8911
  Gene Symbol: KIAA0319L
  Gene Name: KIAA0319-like
  Uniprot ID: Q8IZA0
  ENST ID: ENST00000325722
  CDS Start-End: 236-3385
aggaggcggtgtttccggccgccgtcgctgtccagggaggctgaggcgagaggtagctgtccgggtggggagcccgcactaccttcttcctcttcctcctcctcctccgggtgaggggagcgaaggttgggggtccccgagcccatggaccaggaggaggcggaggccgccgagagccggggccccgctatgtggccctgagccccgtgtactggttctgcctgtctggagggccatggagaagaggctgggagtcaagccaaatcctgcttcctggattttatcaggatattattggcagacatctgcgaagtggttgagaagcctgtacctgttttatacttgcttttgcttcagcgttctgtggttgtcaacagatgccagtgagagcaggtgccagcaggggaagacacaatttggagttggcctgagatctgggggagaaaatcacctctggcttcttgaaggaaccccctctctccagtcatgttgggctgcctgctgccaggactctgcctgccatgtcttttggtggctagaagggatgtgcattcaggcagactgcagcaggccccagagctgccgggcttttaggacacactcctccaattccatgctggtgtttttaaaaaaattccaaactgcagatgatttgggctttctacctgaagatgatgtaccacatcttctggggctaggttggaactgggcatcttggaggcagagcccacccagagctgcactcagacctgctgtatcttccagtgaccagcagagcttaatcaggaagcttcagaagagaggtagtcccagtgacgtagttacacctatagtgacacagcattctaaagtgaatgactccaacgaattaggtggtctgactaccagtggctctgcagaggtccacaaggcgattacaatttccagtcccctaaccacagacctgactgcagagctgtctggtgggccaaagaatgtatcagtgcaacctgaaatatcagagggtcttgctactacgcccagcactcaacaagtaaaaagttctgagaaaacccagattgctgtcccccagccagtggctccctcctacagttatgctacccctaccccccaggcctctttccagagcacctcagcaccatacccagttataaaggaactggtggtatctgctggagagagtgtccagataaccctgcctaagaatgaagttcaattaaatgcatatgttctccaagaaccacctaaaggagaaacctacacctacgactggcagctgattactcatcctagagactacagtggagaaatggaagggaaacattcccagatcctcaaactatcgaagctcactccaggcctgtatgaattcaaagtgattgtagagggtcaaaatgcccatggggaaggctatgtgaacgtgacagtcaagccagagccccgtaagaatcggccccccattgctattgtgtcacctcagttccaggagatctctttgccaaccacttctacagtcattgatggcagtcaaagcactgatgatgataaaatcgttcagtaccattgggaagaacttaaggggcctctaagagaagagaagatttctgaagatacagccatattaaaactaagtaaactcgtccctgggaactacactttcagcttgactgtagtagactctgatggagctaccaactctactactgcaaacctgacagtgaacaaagctgtggattacccccctgtggccaacgcaggccccaaccaagtgatcaccctgccccaaaactccatcaccctctttgggaaccagagcactgatgatcatggcatcaccagctatgagtggtcactcagcccaagcagcaaagggaaagtggtggagatgcagggtgttagaacaccaaccttacagctctctgcgatgcaagaaggagactacacttaccagctcacagtgactgacacaataggacagcaggccactgctcaagtgactgttattgtgcaacctgaaaacaataagcctcctcaggcagatgcaggcccagataaagagctgacccttcctgtggatagcacaaccctggatggcagcaagagctcagatgatcagaaaattatctcatatctctgggaaaaaacacagggacctgatggggtgcagctcgagaatgctaacagcagtgttgctactgtgactgggctgcaagtggggacctatgtgttcaccttgactgtcaaagatgagaggaacctgcaaagccagagctctgtgaatgtcattgtcaaagaagaaataaacaaaccacctatagccaagataactgggaatgtggtgattaccctacccacgagcacagcagagctggatggctctaagtcctcagatgacaagggaatagtcagctacctctggactcgagatgaggggagcccagcagcaggggaggtgttaaatcactctgaccatcaccctatcctttttctttcaaacctggttgagggaacctacacttttcacctgaaagtgaccgatgcaaagggtgagagtgacacagaccggaccactgtggaggtgaaacctgatcccaggaaaaacaacctggtggagatcatcttggatatcaacgtcagtcagctaactgagaggctgaaggggatgttcatccgccagattggggtcctcctgggggtgctggattccgacatcattgtgcaaaagattcagccgtacacggagcagagcaccaaaatggtattttttgttcaaaacgagcctccccaccagatcttcaaaggccatgaggtggcagcgatgctcaagagtgagctgcggaagcaaaaggcagactttttgatattcagagccttggaagtcaacactgtcacatgtcagctgaactgttccgaccatggccactgtgactcgttcaccaaacgctgtatctgtgaccctttttggatggagaatttcatcaaggtgcagctgagggatggagacagcaactgtgagtggagcgtgttatatgttatcattgctacctttgtcattgttgttgccttgggaatcctgtcttggactgtgatctgttgttgtaagaggcaaaaaggaaaacccaagaggaaaagcaagtacaagatcctggatgccacggatcaggaaagcctggagctgaagccaacctcccgagcaggcatcaaacagaaaggccttttgctaagtagcagcctgatgcactccgagtcagagctggacagcgatgatgccatctttacatggccagaccgagagaagggcaaactcctgcatggtcagaatggctctgtacccaacgggcagacccctctgaaggccaggagcccgcgggaggagatcctgtagccacctggtctgtctcctcagggcagggcccagcacactgcccggccagtcctcctacctcccgagtctgcgggcagctgctgtcccagcatctgctggtcatttcgccctgacagtcccaaccagaacccctgggacttgaatccagagacgtcctccaggaacccctcaacgaagctgtgaatgaagaggtttcctctttaaacctgtctggtgggcccccagatatcctcacctcagggcctcctttttttgcaaactcctcccctcccccgagggcagacccagccagctgctaagctctgcagctccccagtggacagtgtcattgtgcccagagtgctgcaaggtgaggcctgctgtgctgcccgcacacctgagtgcaaaaccaagcactgtgggcatggtgtttccctctctggggtagagtacgccctctcgctgggcaaagaggaagtggcacccctcccctcaccacagatgctgagatggtagcatagaaatgatggccgggcgcggtggctcacgcctgtaatcccagcactttgggaggccgaggcgggcggatcatgaggtcaggagatcaagaccaccctggctaacacggtgaaaccccatctctactaaaaataaaaaaaaaaattagccgggtttggtggcgtatgcctgtaatcccagctactcgggaggctgaggcaggagaattgcttaaacctgggaggtggaggctgcagtgagccaagatcgtgccactgcactccagcctgagtgacagagcaagactccgtcaaaaaaaaaaaaaaaaaaaaagaaatgatatctggcccccccttaacactggagccccactcccttctcccatccggcccgagattagggaggattgactgtgtcagggatggcgggtggcctctctcgctgccagggcccttgtcagagcagccaggctggacagacggcctccctcctctccatctgaccggcacctgctgcttcggggcttaggccaccgctccctgtccccagaggagatagccccagatggactggaatgttgtggcatgagagcgcatgtgtgcgatggccccgctgtggtcccctctctgtccctccatctgtatgtgttctgtgtcccttgcatgtgtgcgtgttagagtgagcgcgtatgcatcaactcattgggctcttggctgctcacaaggcaaatttgacttggaaagactttcatctccttggaaccaagacttcctgagtccccctcaccctggccctgttccaccatggttatctgggtattggggaatggaaactttgggggagtgactttttaaagagacacttataatttctactactgcactactgtccattgtgggatgattaaacatggtatttaactgtgca

SEQ ID NO: 145783 - DNA, 2377 bp, Homo sapiens
  Payload ID: 8911
  Gene Symbol: KIAA0319L
  Gene Name: KIAA0319-like
  ENST ID: ENST00000373266
  CDS Start-End: 128-1588
tgctgtgtcagagagggttgtttccttgaagggggaaacccttagcaaggtgcctcatgatatctgactccatattcactcacatgctgaactgggtgttagaacaccaaccttacagctctctgcgatgcaagaaggagactacacttaccagctcacagtgactgacacaataggacagcaggccactgctcaagtgactgttattgtgcaacctgaaaacaataagcctcctcaggcagatgcaggcccagataaagagctgacccttcctgtggatagcacaaccctggatggcagcaagagctcagatgatcagaaaattatctcatatctctgggaaaaaacacagggacctgatggggtgcagctcgagaatgctaacagcagtgttgctactgtgactgggctgcaagtggggacctatgtgttcaccttgactgtcaaagatgagaggaacctgcaaagccagagctctgtgaatgtcattgtcaaagaagaaataaacaaaccacctatagccaagataactgggaatgtggtgattaccctacccacgagcacagcagagctggatggctctaagtcctcagatgacaagggaatagtcagctacctctggactcgagatgaggggagcccagcagcaggggaggtgttaaatcactctgaccatcaccctatcctttttctttcaaacctggttgagggaacctacacttttcacctgaaagtgaccgatgcaaagggtgagagtgacacagaccggaccactgtggaggtgaaacctgatcccaggaaaaacaacctggtggagatcatcttggatatcaacgtcagtcagctaactgagaggctgaaggggatgttcatccgccagattggggtcctcctgggggtgctggattccgacatcattgtgcaaaagattcagccgtacacggagcagagcaccaaaatggtattttttgttcaaaacgagcctccccaccagatcttcaaaggccatgaggtggcagcgatgctcaagagtgagctgcggaagcaaaaggcagactttttgatattcagagccttggaagtcaacactgtcacatgtcagctgaactgttccgaccatggccactgtgactcgttcaccaaacgctgtatctgtgaccctttttggatggagaatttcatcaaggtgcagctgagggatggagacagcaactgtgagtggagcgtgttatatgttatcattgctacctttgtcattgttgttgccttgggaatcctgtcttggactgtgatctgttgttgtaagaggcaaaaaggaaaacccaagaggaaaagcaagtacaagatcctggatgccacggatcaggaaagcctggagctgaagccaacctcccgagcaggcatcaaacagaaaggccttttgctaagtagcagcctgatgcactccgagtcagagctggacagcgatgatgccatctttacatggccagaccgagagaagggcaaactcctgcatggtcagaatggctctgtacccaacgggcagacccctctgaaggccaggagcccgcgggaggagatcctgtagccacctggtctgtctcctcagggcagggcccagcacactgcccggccagtcctcctacctcccgagtctgcgggcagctgctgtcccagcatctgctggtcatttcgccctgacagtcccaaccagaacccctgggacttgaatccagagacgtcctccaggaacccctcaacgaagctgtgaatgaagaggtttcctctttaaacctgtctggtgggcccccagatatcctcacctcagggcctcctttttttgcaaactcctcccctcccccgagggcagacccagccagctgctaagctctgcagctccccagtggacagtgtcattgtgcccagagtgctgcaaggtgaggcctgctgtgctgcccgcacacctgagtgcaaaaccaagcactgtgggcatggtgtttccctctctggggtagagtacgccctctcgctgggcaaagaggaagtggcacccctcccctcaccacagatgctgagatggtagcatagaaatgatggccgggcgcggtggctcacgcctgtaatcccagcactttgggaggccgaggcgggcggatcatgaggtcaggagatcaagaccaccctggctaacacggtgaaaccccatctctactaaaaataaaaaaaaaaattagccgggtttggtggcgtatgcctgtaatcccagctactcgggaggctgaggcaggagaattgcttaaacctgggaggtggaggctgcagtgagccaagatcgtgccactgcactccagcctgagtgacagagcaagactccgtc

SEQ ID NO: 145784 - DNA, 912 bp, Homo sapiens
  Payload ID: 8911
  Gene Symbol: KIAA0319L
  Gene Name: KIAA0319-like
  ENST ID: ENST00000431916
  CDS Start-End: 1-912
agatgatttgggctttctacctgaagatgatgtaccacatcttctggggctaggttggaactgggcatcttggaggcagagcccacccagagctgcactcagacctgctgtatcttccagtgaccagcagagcttaatcaggaagcttcagaagagaggtagtcccagtgacgtagttacacctatagtgacacagcattctaaagtgaatgactccaacgaattaggtggtctgactaccagtggctctgcagaggtccacaaggcgattacaatttccagtcccctaaccacagacctgactgcagagctgtctggtgggccaaagaatgtatcagtgcaacctgaaatatcagagggtcttgctactacgcccagcactcaacaagtaaaaagttctgagaaaacccagattgctgtcccccagccagtggctccctcctacagttatgctacccctaccccccaggcctctttccagagcacctcagcaccatacccaggagaaacctacacctacgactggcagctgattactcatcctagagactacagtggagaaatggaagggaaacattcccagatcctcaaactatcgaagctcactccaggcctgtatgaattcaaagtgattgtagagggtcaaaatgcccatggggaaggctatgtgaacgtgacagtcaagccagagccccgtaagaatcggccccccattgctattgtgtcacctcagttccaggagatctctttgccaaccacttctacagtcattgatggcagtcaaagcactgatgatgataaaatcgttcagtaccattgggaagaacttaaggggcctctaagagaagagaagatttctgaagatacagccatattaaaactaagtaaactcgtccctgggaactacacttt

SEQ ID NO: 145785 - DNA, 3213 bp, Homo sapiens
  Payload ID: 8911
  Gene Symbol: KIAA0319L
  Gene Name: KIAA0319-like
  ENST ID: ENST00000426982
  CDS Start-End: 135-3213
gggtattgcccgagtctgggggctggggctcgagcgaaggaggcaaggtgcagactgcctctggagagcgggcggcgagaggctgggggcccagattccttcgctttgtactggttctgcctgtctggagggccatggagaagaggctgggagtcaagccaaatcctgcttcctggattttatcaggatattattggcagacatctgcgaagtggttgagaagcctgtacctgttttatacttgcttttgcttcagcgttctgtggttgtcaacagatgccagtgagagcaggtgccagcaggggaagacacaatttggagttggcctgagatctgggggagaaaatcacctctggcttcttgaaggaaccccctctctccagtcatgttgggctgcctgctgccaggactctgcctgccatgtcttttggtggctagaagggatgtgcattcaggcagactgcagcaggccccagagctgccgggcttttaggacacactcctccaattccatgctggtgtttttaaaaaaattccaaactgcagatgatttgggctttctacctgaagatgatgtaccacatcttctggggctaggttggaactgggcatcttggaggcagagcccacccagagctgcactcagacctgctgtatcttccagtgaccagcagagcttaatcaggaagcttcagaagagaggtagtcccagtgacgtagttacacctatagtgacacagcattctaaagtgaatgactccaacgaattaggtggtctgactaccagtggctctgcagaggtccacaaggcgattacaatttccagtcccctaaccacagacctgactgcagagctgtctggtgggccaaagaatgtatcagtgcaacctgaaatatcagagggtcttgctactacgcccagcactcaacaagtaaaaagttctgagaaaacccagattgctgtcccccagccagtggctccctcctacagttatgctacccctaccccccaggcctctttccagagcacctcagcaccatacccagttataaaggaactggtggtatctgctggagagagtgtccagataaccctgcctaagaatgaagttcaattaaatgcatatgttctccaagaaccacctaaaggagaaacctacacctacgactggcagctgattactcatcctagagactacagtggagaaatggaagggaaacattcccagatcctcaaactatcgaagctcactccaggcctgtatgaattcaaagtgattgtagagggtcaaaatgcccatggggaaggctatgtgaacgtgacagtcaagccagagccccgtaagaatcggccccccattgctattgtgtcacctcagttccaggagatctctttgccaaccacttctacagtcattgatggcagtcaaagcactgatgatgataaaatcgttcagtaccattgggaagaacttaaggggcctctaagagaagagaagatttctgaagatacagccatattaaaactaagtaaactcgtccctgggaactacactttcagcttgactgtagtagactctgatggagctaccaactctactactgcaaacctgacagtgaacaaagctgtggattacccccctgtggccaacgcaggccccaaccaagtgatcaccctgccccaaaactccatcaccctctttgggaaccagagcactgatgatcatggcatcaccagctatgagtggtcactcagcccaagcagcaaagggaaagtggtggagatgcagggtgttagaacaccaaccttacagctctctgcgatgcaagaaggagactacacttaccagctcacagtgactgacacaataggacagcaggccactgctcaagtgactgttattgtgcaacctgaaaacaataagcctcctcaggcagatgcaggcccagataaagagctgacccttcctgtggatagcacaaccctggatggcagcaagagctcagatgatcagaaaattatctcatatctctgggaaaaaacacagggacctgatggggtgcagctcgagaatgctaacagcagtgttgctactgtgactgggctgcaagtggggacctatgtgttcaccttgactgtcaaagatgagaggaacctgcaaagccagagctctgtgaatgtcattgtcaaagaagaaataaacaaaccacctatagccaagataactgggaatgtggtgattaccctacccacgagcacagcagagctggatggctctaagtcctcagatgacaagggaatagtcagctacctctggactcgagatgaggggagcccagcagcaggggaggtgttaaatcactctgaccatcaccctatcctttttctttcaaacctggttgagggaacctacacttttcacctgaaagtgaccgatgcaaagggtgagagtgacacagaccggaccactgtggaggtgaaacctgatcccaggaaaaacaacctggtggagatcatcttggatatcaacgtcagtcagctaactgagaggctgaaggggatgttcatccgccagattggggtcctcctgggggtgctggattccgacatcattgtgcaaaagattcagccgtacacggagcagagcaccaaaatggtattttttgttcaaaacgagcctccccaccagatcttcaaaggccatgaggtggcagcgatgctcaagagtgagctgcggaagcaaaaggcagactttttgatattcagagccttggaagtcaacactgtcacatgtcagctgaactgttccgaccatggccactgtgactcgttcaccaaacgctgtatctgtgaccctttttggatggagaatttcatcaaggtgcagctgagggatggagacagcaactgtgagtggagcgtgttatatgttatcattgctacctttgtcattgttgttgccttgggaatcctgtcttggactgtgatctgttgttgtaagaggcaaaaaggaaaacccaagaggaaaagcaagtacaagatcctggatgccacggatcaggaaagcctggagctgaagccaacctcccgagcaggcatcaaacagaaaggccttttgctaagtagcagcctgatgcactccgagtcagagctggacagcgatgatgccatctttacatggccagaccgagagaagggcaaactcctgcatg

SEQ ID NO: 145786 - DNA, 2171 bp, Homo sapiens
  Payload ID: 8911
  Gene Symbol: KIAA0319L
  Gene Name: KIAA0319-like
  ENST ID: ENST00000440579
  CDS Start-End: 117-2171
atttgcattcagaaatttaaaaaatactgggccagacataaccctcaggttactttacctctgagggtgcaacctcttctcctcaaaatgtactggttctgcctgtctggagggccatggagaagaggctgggagtcaagccaaatcctgcttcctggattttatcaggatattattggcagacatctgcgaagtggttgagaagcctgtacctgttttatacttgcttttgcttcagcgttctgtggttgtcaacagatgccagtgagagcaggtgccagcaggggaagacacaatttggagttggcctgagatctgggggagaaaatcacctctggcttcttgaaggaaccccctctctccagtcatgttgggctgcctgctgccaggactctgcctgccatgtcttttggtggctagaagggatgtgcattcaggcagactgcagcaggccccagagctgccgggcttttaggacacactcctccaattccatgctggtgtttttaaaaaaattccaaactgcagatgatttgggctttctacctgaagatgatgtaccacatcttctggggctaggttggaactgggcatcttggaggcagagcccacccagagctgcactcagacctgctgtatcttccagtgaccagcagagcttaatcaggaagcttcagaagagaggtagtcccagtgacgtagttacacctatagtgacacagcattctaaagtgaatgactccaacgaattaggtggtctgactaccagtggctctgcagaggtccacaaggcgattacaatttccagtcccctaaccacagacctgactgcagagctgtctggtgggccaaagaatgtatcagtgcaacctgaaatatcagagggtcttgctactacgcccagcactcaacaagtaaaaagttctgagaaaacccagattgctgtcccccagccagtggctccctcctacagttatgctacccctaccccccaggcctctttccagagcacctcagcaccatacccagttataaaggaactggtggtatctgctggagagagtgtccagataaccctgcctaagaatgaagttcaattaaatgcatatgttctccaagaaccacctaaaggagaaacctacacctacgactggcagctgattactcatcctagagactacagtggagaaatggaagggaaacattcccagatcctcaaactatcgaagctcactccaggcctgtatgaattcaaagtgattgtagagggtcaaaatgcccatggggaaggctatgtgaacgtgacagtcaagccagagccccgtaagaatcggccccccattgctattgtgtcacctcagttccaggagatctctttgccaaccacttctacagtcattgatggcagtcaaagcactgatgatgataaaatcgttcagtaccattgggaagaacttaaggggcctctaagagaagagaagatttctgaagatacagccatattaaaactaagtaaactcgtccctgggaactacactttcagcttgactgtagtagactctgatggagctaccaactctactactgcaaacctgacagtgaacaaagctgtggattacccccctgtggccaacgcaggccccaaccaagtgatcaccctgccccaaaactccatcaccctctttgggaaccagagcactgatgatcatggcatcaccagctatgagtggtcactcagcccaagcagcaaagggaaagtggtggagatgcagggtgttagaacaccaaccttacagctctctgcgatgcaagaaggagactacacttaccagctcacagtgactgacacaataggacagcaggccactgctcaagtgactgttattgtgcaacctgaaaacaataagcctcctcaggcagatgcaggcccagataaagagctgacccttcctgtggatagcacaaccctggatggcagcaagagctcagatgatcagaaaattatctcatatctctgggaaaaaacacagggacctgatggggtgcagctcgagaatgctaacagcagtgttgctactgtgactgggctgcaagtggggacctatgtgttcaccttgactgtcaaagatgagaggaacctgcaaagccagagctctgtgaatgtcattgtc

SEQ ID NO: 145787 - DNA, 872 bp, Homo sapiens
  Payload ID: 8911
  Gene Symbol: KIAA0319L
  Gene Name: KIAA0319-like
  ENST ID: ENST00000470388
  CDS Start-End: 198-431
ggctgaggcgagaggtagctgtccgggtggggagcccgcactaccttcttcctcttcctcctcctcctccgggtgaggggagcgaaggttgggggtccccgagcccatggaccaggaggaggcggaggccgccgagagccggggccccgctatgtggccctgagccccgtgtactggttctgcctgtctggagggccatggagaagaggctgggagtcaagccaaatcctgcttcctggattttatcaggatattattggcagacatctgcgaagtggttgagaagcctgtacctgttttatacttgcttttgcttcagcgttctgtggttgtcaacaggtccacaaggcgattacaatttccagtcccctaaccacagacctgactgcagagctgtctggtgggccaaagaatgtatcagtgcaacctgaaatatcagagggtcttgctactacgcccagcactcaacaagtaaaaagttctgagaaaacccagattgctgtcccccagccagtggctccctcctacagttatgctacccctaccccccaggcctctttccagagcacctcagcaccatacccagttataaaggaactggtggtatctgctggagagagtgtccagataaccctgcctaagaatgaagttcaattaaatgcatatgttctccaagaaccacctaaaggagaaacctacacctacgactggcagctgattactcatcctagagactacagtggagaaatggaagggaaacattcccagatcctcaaactatcgaagctcactccaggcctgtatgaattcaaagtgattgtagagggtcaaaatgcccatggggaaggctatgtgaacgtgacagtcaagcc

SEQ ID NO: 145788 - DNA, 889 bp, Homo sapiens
  Payload ID: 8911
  Gene Symbol: KIAA0319L
  Gene Name: KIAA0319-like
  ENST ID: ENST00000469892
  CDS Start-End: 71-889
gtttccggccgccgtcgctgtccagggaggctgaggcgagagtgtactggttctgcctgtctggagggccatggagaagaggctgggagtcaagccaaatcctgcttcctggattttatcaggatattattggcagacatctgcgaagtggttgagaagcctgtacctgttttatacttgcttttgcttcagcgttctgtggttgtcaacagatgccagtgagagcaggtgccagcaggggaagacacaatttggagttggcctgagatctgggggagaaaatcacctctggcttcttgaaggaaccccctctctccagtcatgttgggctgcctgctgccaggactctgcctgccatgtcttttggtggctagaagggatgtgcattcaggcagactgcagcaggccccagagctgccgggcttttaggacacactcctccaattccatgctggtgtttttaaaaaaattccaaactgcagatgatttgggctttctacctgaagatgatgtaccacatcttctggggctaggttggaactgggcatcttggaggcagagcccacccagagctgcactcagacctgctgtatcttccagtgaccagcagagcttaatcaggaagcttcagaagagaggtagtcccagtgacgtagttacacctatagtgacacagcattctaaagtgaatgactccaacgaattaggtggtctgactaccagtggctctgcagaggtccacaaggcgattacaatttccagtcccctaaccacagacctgactgcagagctgtctggtgggccaaagaatgtatcagtgcaacctgaaatatcagagggtcttgctactacgcccagcactcaacaagtaaaaagttctgagaaaacc

SEQ ID NO: 145789 - DNA, 766 bp, Homo sapiens
  Payload ID: 8911
  Gene Symbol: KIAA0319L
  Gene Name: KIAA0319-like
  ENST ID: ENST00000494948
  CDS Start-End: 228-766
atttgcattcagaaatttaaaaaatactgggccagacataaccctcaggttactttacctctgagggtgcaacctcttctcctcaaaagtaagaaagtgtgtttggtcaaagtcacaaagctgttagtagcagaactgcaactaaaactcagagatcttcttgtctgcgggctggtactctttccattctaccacatagtgtactggttctgcctgtctggagggccatggagaagaggctgggagtcaagccaaatcctgcttcctggattttatcaggatattattggcagacatctgcgaagtggttgagaagcctgtacctgttttatacttgcttttgcttcagcgttctgtggttgtcaacagatgccagtgagagcaggtgccagcaggggaagacacaatttggagttggcctgagatctgggggagaaaatcacctctggcttcttgaaggaaccccctctctccagtcatgttgggctgcctgctgccaggactctgcctgccatgtcttttggtggctagaagggatgtgcattcaggcagactgcagcaggccccagagctgccgggcttttaggacacactcctccaattccatgctggtgtttttaaaaaaattccaaactgcagatgatttgggctttctacctgaagatgatgtaccacatcttctggggctaggttggaactgggcatcttggaggcagagcccacccagagctgcactcagacctgctgtatcttccagtgaccagca

SEQ ID NO: 145790 - DNA, 1489 bp, Homo sapiens
  Payload ID: 8911
  Gene Symbol: KIAA0319L
  Gene Name: KIAA0319-like
  ENST ID: ENST00000478463
  CDS Start-End: 387-1421
gtgtttccggccgccgtcgctgtccagggaggctgaggcgagaggtagctgtccgggtggggagcccgcactaccttcttcctcttcctcctcctcctccgggtgaggggagcgaaggttgggggtccccgagcccatggaccaggaggaggcggaggccgccgagagccggggccccgctatgtggccctgagccccggtaggtggccgggggcggctggctgccaggccgaggaccatgggctcaggggaggggcaagcgggacgggcgatgtcagcggctgcgctggccggatgttgggtccggaggtggcgcccctggctcggccagggcagccagctgcttctgtccttgcagtgtactggttctgcctgtctggagggccatggagaagaggctgggagtcaagccaaatcctgcttcctggattttatcaggatattattggcagacatctgcgaagtggttgagaagcctgtacctgttttatacttgcttttgcttcagcgttctgtggttgtcaacagatgccagtgagagcaggtgccagcaggggaagacacaatttggagttggcctgagatctgggggagaaaatcacctctggcttcttgaaggaaccccctctctccagtcatgttgggctgcctgctgccaggactctgcctgccatgtcttttggtggctagaagggatgtgcattcaggcagactgcagcaggccccagagctgccgggcttttaggacacactcctccaattccatgctggtgtttttaaaaaaattccaaactgcagatgatttgggctttctacctgaagatgatgtaccacatcttctggggctaggttggaactgggcatcttggaggcagagcccacccagagctgcactcagacctgctgtatcttccagtgaccagcagagcttaatcaggaagcttcagaagagaggtagtcccagtgacgtagttacacctatagtgacacagcattctaaagtgaatgactccaacgaattaggtggtctgactaccagtggctctgcagaggtccacaaggcgattacaatttccagtcccctaaccacagacctgactgcagagctgtctggtgggccaaagaatgtatcagtgcaacctgaaatatcagagggtcttgctactacgcccagcactcaacaagtaaaaagttctgagaaaacccagattgctgtcccccagccagtggctccctcctacagttatgctacccctaccccccaggcctctttccagagcacctcagcaccatacccagttataaaggaactggtggtatctgctggagagagtgtccagataaccctgcctaagaatgaagttcaattaaatgcatatgttctccaagaaccacctaaagctcactccaggcctgtatgaattcaaagtgattgtagagggtcaaaatgcccatggggaaggctatgtgaacgtgacagtcaagccag

SEQ ID NO: 145791 - DNA, 1524 bp, Homo sapiens
  Payload ID: 8911
  Gene Symbol: KIAA0319L
  Gene Name: KIAA0319-like
  ENST ID: ENST00000482929
  CDS Start-End: 269-1303
gatcagcgccggctcggagaggccccggctgggatgcaggggagggcccgaagggggctgagctcaccaggctgcggccccgagcggcgaagtcttctcccagcgcgatgctccgggagcctcgggccgctgctcacgccgcgttgcccactcctggctccaggctgctgcagctccacccccacccccgcaccgctcttgacgaatccgcggctgcttcactccgggctctggccaatgtgtactggttctgcctgtctggagggccatggagaagaggctgggagtcaagccaaatcctgcttcctggattttatcaggatattattggcagacatctgcgaagtggttgagaagcctgtacctgttttatacttgcttttgcttcagcgttctgtggttgtcaacagatgccagtgagagcaggtgccagcaggggaagacacaatttggagttggcctgagatctgggggagaaaatcacctctggcttcttgaaggaaccccctctctccagtcatgttgggctgcctgctgccaggactctgcctgccatgtcttttggtggctagaagggatgtgcattcaggcagactgcagcaggccccagagctgccgggcttttaggacacactcctccaattccatgctggtgtttttaaaaaaattccaaactgcagatgatttgggctttctacctgaagatgatgtaccacatcttctggggctaggttggaactgggcatcttggaggcagagcccacccagagctgcactcagacctgctgtatcttccagtgaccagcagagcttaatcaggaagcttcagaagagaggtagtcccagtgacgtagttacacctatagtgacacagcattctaaagtgaatgactccaacgaattaggtggtctgactaccagtggctctgcagaggtccacaaggcgattacaatttccagtcccctaaccacagacctgactgcagagctgtctggtgggccaaagaatgtatcagtgcaacctgaaatatcagagggtcttgctactacgcccagcactcaacaagtaaaaagttctgagaaaacccagattgctgtcccccagccagtggctccctcctacagttatgctacccctaccccccaggcctctttccagagcacctcagcaccatacccagttataaaggaactggtggtatctgctggagagagtgtccagataaccctgcctaagaatgaagttcaattaaatgcatatgttctccaagaaccacctaaagctcactccaggcctgtatgaattcaaagtgattgtagagggtcaaaatgcccatggggaaggctatgtgaacgtgacagtcaagccagagccccgtaagaatcggccccccattgctattgtgtcacctcagttccaggagatctctttgccaaccacttctacagtcattgatggcagtccactgatgatgataaaatcgttcagtaccattgggaagaacttaaggggcctctaagaga

SEQ ID NO: 145792 - DNA, 6717 bp, Homo sapiens
  Payload ID: 8912
  Gene Symbol: KIAA0355
  Gene Name: KIAA0355
  Uniprot ID: O15063
  ENST ID: ENST00000299505
  CDS Start-End: 874-4086
ggggccggaccggagacgtaacttccggtgtacacagccggtccaaggcggtgcgctgggggccggggcgcgtcgcaggaaaggacttagaagccttacaaatacatctgtgcattcttgcttcagactttacaactgagggccagcccagtctggaagcatctcttattaatgttacaaggaaaccgctacctcagcaaacaaaaggaatggaggaggagacttacaacaaacgccatttaaaaaaaaaagaaaaacttgttttcaggaaacattagaggaaatttggagaatttcagcattgcatagaagcagccttacaggtaaacggatttgacgggcaggctctgtcaaaattctgcagaagtttgatcttccttcttaaggactttgtgtgaagtaattctttactgcttttaaattgctgttgatcagcttctgggtttttgggttctaacttttttgggtatattgaagacacagtgtattacattatattacatttttaaacgttaagttatttttctgccattgtaaatacaagtatcaaaatattcttgcaaagaagtaaacatttttctcagcaagcatatccttttagtaagagagtggaatgctaaacagttcttatccagcattttggacatcttttattttttgtcagagatcctgtctacactgaaaatattaattatataaacctgttgtctctcacctctacattggatcacatggtcacctgcctcatggaaatgccttttttaaaacttcgatttgcagaactccactatttttatacctagctacagttttgagaaagaagaatcagaaccctgacccacttacggttgctgggacaattccccctcccgcatgtattgctgcagtgcccaggacagtaaaatggactacaagcggcgcttcctgcttggcgggtccaagcagaaggtgcagcagcaccagcaatacccgatgcctgagctgggccgagcactgagtgctcccctggcatccacggccaccactgcccccctgggcagtctgaccgctgcaggcagctgccaccatgccatgccccacactactcctatcgccgacatccagcagggcatctccaagtatctggatgccctgaacgtcttctgccgtgccagtactttcctcacagatctcttcagcactgtgttcaggaactctcactactcaaaggcagccacacagctcaaagatgtgcaggagcatgtcatggaagcagccagtcggctgacctcggccataaagcctgagatcgccaagatgctaatggaacttagtgctggggctgcaaattttacggatcagaaggaattcagtctccaggacattgaggtgttggggcgatgtttcctgactgtggtgcaagtccatttccagtttttgactcatgcgttacagaaggtccagccggtggctcactcttgctttgctgaggtcatcgtgccagaaaaaaagaacagcggcagtggcggcggcttatctggcatgggccacacacctgaagtagaggaagctgtgcggtcctggcggggggctgctgaggcgacatctagactaagagaaagaggctgtgatggttgcctggcaggaattgaagttcaacaactcttttgttctcaaagtgcagcaattcctgagcaccagctaaaagaactgaacataaaaatcgacagtgctttgcaagcatataagatagctctggaaagcttaggacactgtgaatatgcaatgaaagccggcttccacctgaatccaaaggcgattgaagcaagtttgcagggctgctgcagcgaggcggaagcccagcagacggggcggaggcagacacccccgcagcccatgcagtgtgagctccccaccgtccctgtgcagataggatcgcacttcctgaagggcgtctcctttaatgagtcggccgccgacaatctgaaacttaagacgcatacaatgttacagctgatgaaggaggcaggctgctataatggaatcacatccagggatgattttcctgtgactgaagtgctgaaccaggtttgcccttccacatggcgaggtgcctgcaagacggcggtgcagctgctgtttggccaggctggactggtggtggttgacacagcacagattgagaataaagaagcctatgccccccagatcagtttagaaggctctagaatcgtggttcaagtcccatccacatggtgcctgaaagaagaccctgctaccatgtccctgctgcagagaagccttgatcctgagaagaccctgggtctagtggacgtgctctacacagctgtgctggacctaaaccgctggagggctggaagggagcaagctttaccctgcatacagatccagctgcaaagggagatctgtgattttggcaaccaggctgacctgccttctggaaatggaaacaaatcttcaggtggcctgcagaagacattctccaaactgacatcccggttcaccaagaaagcttcatgtaccagctccagcagcagcacaaattattccatccaaaataccccttccaaaaacatcttcatagctggatgttccgaagagaaggccaaaatgcctggcaatattgatacaaggttacaaagcattttgaacattggtaatttccccaggactacagacccttcacagtcagctcagaattccagtaatacagtggccaatggctttctcatggagaggcgtgagaacttcctgcatggagatgacggcaaggatgagaagggtatgaacttaccaactgatcaggaaatgcaagaggtgatagattttctctcgggctttaacatgggccagtcacatcagggctctccgttggtgacaaggcataattctgctgccacagccatggtgactgagcagaaggcaggagccatgcaaccacagcagccgtcactgcctgtgccccctccaccacgggcaccccaggctggggcacacacacctctgacaccccagccgggactggcacctcagcagcagtccccaaagcagcaacaacctcaagtccaatactaccaacacctactccagcccattggaccgcagcagcccccgccccagcctcgggcacctgggaaatgggtacatggctcatcccagcagccagcgcaggctgttggagcaggtctgtctcctcttggtcagtggcctggcatatctgatctcagttctgacttgtacagcttgggtctggtgagcagctatatggataatgtgatgtcagaggttctgggacagaagccgcagggacctagaaataacacctggcccaaccgtgaccaaagtgatggagtctttggaatgctgggagagattctgccttttgatcctgcagtgggctcagacccagagtttgcacgctatgtggcaggagtgagccaggcgatgcagcagaagcggcaggcccagcacggtcgccggccaggcaacccccggggcaactggccgcctatggatgacgcgcatcggacctggcccttccccgagttcttcacagaaggggatggcctgcacggtggctggtcgggtgctcagggagactctgccagctcgagtgatgagacatcctcagccaacggggacagcttgttctccatgttttcagggcctgacctcgttgctgctgtcaagcagagaaggaaacacagcagtggagagcaagacaccagcacgctgccctcaccacctctcctcaccacggtggaggatgtgaaccaggataacaaaaccaaaacgtggccacccaaagcaccctggcagcacccttccccgcttcccagcacgctgcccagccccagcgcaccactctatgcagtcaccagccctggcagccagtggaacgacaccatgcagatgctgcagtccccagtgtgggccgcaaccaacgactgcagtgccgctgccttctcctatgtgcagaccccaccccagcccccacccccaccagcacacaaggcagcacccaagggcttcaaggccttccctgggaagggtgagcgcaggccagcctatctgccccagtactgaccccaggccagccagcctgcctgcctgcctgcctgcccgcccagagctgtggggatgagtgtccccaccccagggccacttagctgacaccagcccctcagaggaccagtgcgccccatcccagggagggttccttggggacaagggtggttggcagctccaagcctttaaacctggcttctgaaacgatggcatcagagccctggagagccagctggagacacaggcgtctggccttcaggggcttgctagggaacctgcatgcctagtaagcgccacaggtgactctgatgcaggcgccacagccacacttgaagaaacacagctcttgggtttttagtcctgctgtgtgttgggaagacatcaggcctgaaagctgagggcataactgaccattttttggaaaccctctcctccctcctccacaccttgagtgatgaccacaccaatcactgtattttatagctttttttttcatgtaggtttttagttaaaacatctcctgcctaaaatgcattgaatattttaagataacagatatactggctggaggtttgtttaacactatctatatttaagcttatacaaaatgggcaaaatatagaatatttgtgattggaagcagtcacctggggtttctgggggtggacagttcctcgccacccagcagcaccctgggactgcggcctttcccagctttattgaagcagaatggtggaacttgtgccggaggtacactgctgaaggtgcgtggcggtggaccagccagctgctgtccatgtgcagagcaaggctgcacctgctgcccttcgatccttccacacatggccaggacactgccacaatcctcggggtgtggtcaaggggcactcagagacacctgcactagaaattgcattgacattgtgagctggctcagaagacaaaccaattaagatgtagatagaaattaatttaaggtcttttcttaaaaaaaaaatccacctcattttcagttaacatgtgccattaaatagataacatcctgtggatttagggatattttccagccagaatggatccagaagaattgaatggtgcttaaattgagaaataataataaatatatctatatagaatagacatatcccactgtatattaattgaggttacagaaagttctttatataaaacttatttaaatttttcatatttcatctttgaaaaagtctgagaaaaatccataatattttctggtatgaaagtttgacagtattaatattttttttatattttcttaaatcattaaaccattttaatatatgttaactactaataaatggtttattctttctaactccatataagcttttccagcaaagattgtaataacacatttatgttctcgtttttctacagatataagtaaatttatatataaaaataccaaaaagaggctgggcgtggtggctcacgcctgtaatcccagcactttgggaggccgaggcaggtggatcacctaaggtcaggagttcgagaccagcctggccaatatggtgaaaccccatctctactaaaaatacaaaaattagccgggtgtggtggcgtgcgcctgtagtcccagctactcgggaggctgaagcagaagaatcgcttgaacccgggaggcggaggttacagtgagctgagattgtgccactgcactccagcctgggtgacagagtgagattccgtctcaacaagaaaaaaaaaaaagaatatatatatatgtatgtatgtatgtatgtaaacacacacactaatttgagaggacccgtagggtgtctgagcccagccacctgagtttttagtactgtgttgtcaggctcttcccaggcctcaggtgttgtcttttgtgctgtgtggggatgcattgctgcctgtatttatgatcttttgccgtggttctgagcattcacctcaccatgtttacaaagaactgttttgtatatagacattttcaggcacgtgctttgcaccaaccctgcgtggctcttgtctgtgttagctgtcacggtgtgcacactaatctctgttaaagttgtctatggctgttctacttgtaagatagttttctatttccttcagtaatgtgtccacagtaccctgtatttcgagttccattatactgaagtactcatgttttaatagtgcctctccaaaggcctcaccttggacagaggtcaatccttgatgctccagcacaggtgacgtcactaattgtcactttccagtttgtttttctctattaaggaagacattttctaattgcatctccatgggctgtgagactgtgtgaagccgtttgtgtggtctccatgtaggtgctgtgttcccggcaccgccttgctctgaacactggtaattccaggtgctgcgcttggcagaggggtctcgccaaagcgcatgtgtgtgcatgtgtgaacgtgtgtgtcctttgcatggttgggcgtgggtgccttgctagggcatcagcaggacattgtgtgtatagttacaatgcttccaaactggaactctacattttgtatcttttaaagctcctataagtaaaataactattggctttattaaaaatatacatttaataatactttgtatccttgtttaaaa

SEQ ID NO: 145793 - DNA, 582 bp, Homo sapiens
  Payload ID: 8912
  Gene Symbol: KIAA0355
  Gene Name: KIAA0355
  ENST ID: ENST00000589583
  CDS Start-End: 489-582
aaggcggtgcgctgggggccggggcgcgtcgcaggaaaggacttagaagccttacaaatacatctgtgcattcttgcttcagactttacaactgagggccagcccagtctggaagcatctcttattaatgttacaaggaaaccgctacctcagcaaacaaaaggaatggaggaggagacttacaacaaacgccatttaaaaaaaaaagaaaaacttgttttcaggaaacattagaggaaatttggagaatttcagcattgcatagaagcagccttacagagatcctgtctacactgaaaatattaattatataaacctgttgtctctcacctctacattggatcacatggtcacctgcctcatggaaatgccttttttaaaacttcgatttgcagaactccactatttttatacctagctacagttttgagaaagaagaatcagaaccctgacccacttacggttgctgggacaattccccctcccgcatgtattgctgcagtgcccaggacagtaaaatggactacaagcggcgcttcctgcttggcgggtccaagcagaaggtgcagcagcaccagcaat

SEQ ID NO: 145794 - DNA, 632 bp, Homo sapiens
  Payload ID: 8912
  Gene Symbol: KIAA0355
  Gene Name: KIAA0355
  ENST ID: ENST00000588470
  CDS Start-End: 400-632
acgtaacttccggtgtacacagccggtccaaggcggtgcgctgggggccggggcgcgtcgcaggaaaggacttagaagccttacaaatacatctgtgcattcttgcttcagactttacaactgagggccagcccagtctggaagcatctcttattaatgttacaaggaaaccgctacctcagcaaacaaaaggaatggaggaggagacttacaacaaacgccatttaaaaaaaaaagaaaaacttgttttcaggaaacattagaggaaatttggagaatttcagcattgcatagaagcagccttacagtactttcctcacagatctcttcagcactgtgttcaggaactctcactactcaaaggcagccacacagctcaaagatgtgcaggagcatgtcatggaagcagccagtcggctgacctcggccataaagcctgagatcgccaagatgctaatggaacttagtgctggggctgcaaattttacggatcagaaggaattcagtctccaggacattgaggtgttggggcgatgtttcctgactgtggtgcaagtccatttccagtttttgactcatgcgttacagaaggtccagccggtggctcactcttgctttgctgaggtcatcgt

SEQ ID NO: 145795 - DNA, 1350 bp, Homo sapiens
  Payload ID: 8912
  Gene Symbol: KIAA0355
  Gene Name: KIAA0355
  ENST ID: ENST00000623152
  CDS Start-End: 874-1350
ggggccggaccggagacgtaacttccggtgtacacagccggtccaaggcggtgcgctgggggccggggcgcgtcgcaggaaaggacttagaagccttacaaatacatctgtgcattcttgcttcagactttacaactgagggccagcccagtctggaagcatctcttattaatgttacaaggaaaccgctacctcagcaaacaaaaggaatggaggaggagacttacaacaaacgccatttaaaaaaaaaagaaaaacttgttttcaggaaacattagaggaaatttggagaatttcagcattgcatagaagcagccttacaggtaaacggatttgacgggcaggctctgtcaaaattctgcagaagtttgatcttccttcttaaggactttgtgtgaagtaattctttactgcttttaaattgctgttgatcagcttctgggtttttgggttctaacttttttgggtatattgaagacacagtgtattacattatattacatttttaaacgttaagttatttttctgccattgtaaatacaagtatcaaaatattcttgcaaagaagtaaacatttttctcagcaagcatatccttttagtaagagagtggaatgctaaacagttcttatccagcattttggacatcttttattttttgtcagagatcctgtctacactgaaaatattaattatataaacctgttgtctctcacctctacattggatcacatggtcacctgcctcatggaaatgccttttttaaaacttcgatttgcagaactccactatttttatacctagctacagttttgagaaagaagaatcagaaccctgacccacttacggttgctgggacaattccccctcccgcatgtattgctgcagtgcccaggacagtaaaatggactacaagcggcgcttcctgcttggcgggtccaagcagaaggtgcagcagcaccagcaatacccgatgcctgagctgggccgagcactgagtgctcccctggcatccacggccaccactgcccccctgggcagtctgaccgctgcaggcagctgccaccatgccatgccccacactactcctatcgccgacatccagcagggcatctccaagtatctggatgccctgaacgtcttctgccgtgccagtactttcctcacagatctcttcagcactgtgttcaggaactctcactactcaaaggcagccacacagctcaaagatgtgcaggagcatgtcatggaagcagccagtcggctgacctcggccataaagcctgagatcgccaagatgctaatggaacttagtgctggggctgcaaattttacggatcagaaggaattc

SEQ ID NO: 145796 - DNA, 582 bp, Homo sapiens; identical to SEQ ID NO: 145793
  Payload ID: 8912
  Gene Symbol: KIAA0355
  Gene Name: KIAA0355
  ENST ID: ENST00000625057
  CDS Start-End: 489-582

SEQ ID NO: 145797 - DNA, 504 bp, Homo sapiens
  Payload ID: 8912
  Gene Symbol: KIAA0355
  Gene Name: KIAA0355
  ENST ID: ENST00000623194
  CDS Start-End: 400-504
acgtaacttccggtgtacacagccggtccaaggcggtgcgctgggggccggggcgcgtcgcaggaaaggacttagaagccttacaaatacatctgtgcattcttgcttcagactttacaactgagggccagcccagtctggaagcatctcttattaatgttacaaggaaaccgctacctcagcaaacaaaaggaatggaggaggagacttacaacaaacgccatttaaaaaaaaaagaaaaacttgttttcaggaaacattagaggaaatttggagaatttcagcattgcatagaagcagccttacagtactttcctcacagatctcttcagcactgtgttcaggaactctcactactcaaaggcagccacacagctcaaagatgtgcaggagcatgtcatggaagcagccagtcggctgacctcggccataaagcctgagatcgccaagatgctaatggaacttagtgctggggctgcaaattttacggatcagaaggaattc

SEQ ID NO: 145798 - DNA, 3019 bp, Homo sapiens
  Payload ID: 8912
  Gene Symbol: KIAA0355
  Gene Name: KIAA0355
  ENST ID: ENST00000634164
  CDS Start-End: 1-388
gaaacacagcagtggagagcaagacaccagcacgctgccctcaccacctctcctcaccacggtggaggatgtgaaccaggataacaaaaccaaaacgtggccacccaaagcaccctggcagcacccttccccgcttcccagcacgctgcccagccccagcgcaccactctatgcagtcaccagccctggcagccagtggaacgacaccatgcagatgctgcagtccccagtgtgggccgcaaccaacgactgcagtgccgctgccttctcctatgtgcagaccccaccccagcccccacccccaccagcacacaaggcagcacccaagggcttcaaggccttccctgggaagggtgagcgcaggccagcctatctgccccagtactgaccccaggccagccagcctgcctgcctgcctgcctgcccgcccagagctgtggggatgagtgtccccaccccagggccacttagctgacaccagcccctcagaggaccagtgcgccccatcccagggagggttccttggggacaagggtggttggcagctccaagcctttaaacctggcttctgaaacgatggcatcagagccctggagagccagctggagacacaggcgtctggccttcaggggcttgctagggaacctgcatgcctagtaagcgccacaggtgactctgatgcaggcgccacagccacacttgaagaaacacagctcttgggtttttagtcctgctgtgtgttgggaagacatcaggcctgaaagctgagggcataactgaccattttttggaaaccctctcctccctcctccacaccttgagtgatgaccacaccaatcactgtattttatagctttttttttcatgtaggtttttagttaaaacatctcctgcctaaaatgcattgaatattttaagataacagatatactggctggaggtttgtttaacactatctatatttaagcttatacaaaatgggcaaaatatagaatatttgtgattggaagcagtcacctggggtttctgggggtggacagttcctcgccacccagcagcaccctgggactgcggcctttcccagctttattgaagcagaatggtggaacttgtgccggaggtacactgctgaaggtgcgtggcggtggaccagccagctgctgtccatgtgcagagcaaggctgcacctgctgcccttcgatccttccacacatggccaggacactgccacaatcctcggggtgtggtcaaggggcactcagagacacctgcactagaaattgcattgacattgtgagctggctcagaagacaaaccaattaagatgtagatagaaattaatttaaggtcttttcttaaaaaaaaaatccacctcattttcagttaacatgtgccattaaatagataacatcctgtggatttagggatattttccagccagaatggatccagaagaattgaatggtgcttaaattgagaaataataataaatatatctatatagaatagacatatcccactgtatattaattgaggttacagaaagttctttatataaaacttatttaaatttttcatatttcatctttgaaaaagtctgagaaaaatccataatattttctggtatgaaagtttgacagtattaatattttttttatattttcttaaatcattaaaccattttaatatatgttaactactaataaatggtttattctttctaactccatataagcttttccagcaaagattgtaataacacatttatgttctcgtttttctacagatataagtaaatttatatataaaaataccaaaaagaggctgggcgtggtggctcacgcctgtaatcccagcactttgggaggccgaggcaggtggatcacctaaggtcaggagttcgagaccagcctggccaatatggtgaaaccccatctctactaaaaatacaaaaattagccgggtgtggtggcgtgcgcctgtagtcccagctactcgggaggctgaagcagaagaatcgcttgaacccgggaggcggaggttacagtgagctgagattgtgccactgcactccagcctgggtgacagagtgagattccgtctcaacaagaaaaaaaaaaaagaatatatatatatgtatgtatgtatgtatgtaaacacacacactaatttgagaggacccgtagggtgtctgagcccagccacctgagtttttagtactgtgttgtcaggctcttcccaggcctcaggtgttgtcttttgtgctgtgtggggatgcattgctgcctgtatttatgatcttttgccgtggttctgagcattcacctcaccatgtttacaaagaactgttttgtatatagacattttcaggcacgtgctttgcaccaaccctgcgtggctcttgtctgtgttagctgtcacggtgtgcacactaatctctgttaaagttgtctatggctgttctacttgtaagatagttttctatttccttcagtaatgtgtccacagtaccctgtatttcgagttccattatactgaagtactcatgttttaatagtgcctctccaaaggcctcaccttggacagaggtcaatccttgatgctccagcacaggtgacgtcactaattgtcactttccagtttgtttttctctattaaggaagacattttctaattgcatctccatgggctgtgagactgtgtgaagccgtttgtgtggtctccatgtaggtgctgtgttcccggcaccgccttgctctgaacactggtaattccaggtgctgcgcttggcagaggggtctcgccaaagcgcatgtgtgtgcatgtgtgaacgtgtgtgtcctttgcatggttgggcgtgggtgccttgctagggcatcagcaggacattgtgtgtatagttacaatgcttccaaactggaactctacattttgtatcttttaaagctcctataagtaaaataactattggctttattaaaaatatacatttaataatactttgtatccttgtttaaaa

SEQ ID NO: 145799 - DNA, 7391 bp, Homo sapiens
  Payload ID: 8913
  Gene Symbol: KIAA0368
  Gene Name: KIAA0368
  ENST ID: ENST00000259335
  CDS Start-End: 1-6054
atgacctcacggacaaagcgaaggcagaaagttaaaatcagcatatcgaaaataaatcactctagttaccgaaaagaacataggccgttttgggagcaccagccacctccacaccagaactgggctgtcgggggccgctgcggcgcaggggctcgtccgggactgagtcagcgccggggccgagaagttcggcgggaggcgcagggcggggcttcctcccgccgactccgagcccggctctacttttctgagtccacgtctcttcctttggacaggcgtggcagcccgggcccgctcggcccagcccctcacggactgcggcgcgcggctccccggggcccggcccgccgaacgcctcgctctacagccctcacctcgcggcgccgagcgcagcgtccgcggcatggagaccggctccgactcaggtcagaggcccgcccccgggccgcgggggactggccctgcgcgcgcggcggcgcggttaggccgggccgcccgcacaggccgccgcgtgtcgagtccgcgcggggagcgcacgcggggcgggcggcgacagatcagcttgaacgggtctttttacgacttggccatgctgaaacagatgaacaattacagaatattatatctaaattccttcctcctgttttgctcaaactctctagcacccaagaaggagtacgtaaaaaggtaatggaactgctggtccatctgaataaacgtataaaaagccgccccaaaatacaacttccagtagagacactgttggttcagtaccaggaccctgctgcagtttcctttgtcacaaattttactataatttatgttaaaatgggctatcctcgcctaccagtggaaaaacaatgtgaactggcccctacgcttcttactgccatggaagggaagcctcagccacagcaggatagcttaatgcatcttttaataccaaccctttttcacatgaaataccctgttgaatcatcaaaatcagcttctccatttaatcttgctgagaaaccaaagactgtgcagctgcttttggacttcatgctagatgtccttctgatgccttatggttacgtgttaaatgaatcccagagtcgccaaaattcatcttcagcacagggttcttcttcaaacagtggcggaggttctggaatcccacagcctcctccgggaatgagcttttatgcagccaaacgagttattggtgataacccatggacacctgaacaattggaacagtgcaaattgggaatcgtgaaattcatagaagctgaacaggtgcctgaacttgaagctgttctccacttggtgattgcctctagtgatacacgccacagtgtggcaacggcagcagacctggaattgaaaagcaaacagagcttaattgactggaataatcctgccatcattaataagatgtacaaggtgtaccttggagatataccactgaagacaaaagagggtgcagttctgaagccagagttgaaaagggaccctgtcagtacaagagtcaagttaaagattgtcccccatctcctccgctctagacaagctgctgaaacgttcccagccaacattcaggtggtgtatgatggactttttggtacaaatacaaattcaaagttaagaacattatccctgcaatttgtgcatcatatttgtataacctgtccagaaatcaagattaagccattaggtccaatgcttttgaatggcctcaccaagctaatcaatgaatacaaagaggaccctaaactactgtcaatggcatattcagctgttggaaaactctccagtcggatgccacatttattcactaaggatatagcgcttgtgcagcagctttttgaagccctttgcaaggaagagcctgagactcgacttgctattcaagaagctttatctatgatggttggagcgtatagtactttggaaggggcacagcgaactctcatggaggcacttgtggcttcgtacttaataaagcctgaagttcaagttcgacaagtggctgtgaaatttgccagtacggtgtttccctcagatcatatcccttccagatatttgctgctactggctgcaggagatccacgtgaagaagttcatggagaagcacaacgcgtattaaggtgtcttccaggtagaaacagaaaagaaagtacttctgagcagatgccttccttcccagaaatggtttattacatccaagaaaaggcttctcatcgaatgaaaactccagtcaagtacatgaccgggaccactgtccttccatttaacccagcagcctttggagagatcgttctgtacttgcgcatgtgccttgcgcacagtgcgggggtggtgcccacctctcagagtttggctgatatgcaggatcatgccccagccattgggcgctacatacggactttaatgtcaagcgggcagatggcaccctcatcatctaacaagagtggggagactaaccctgtccagatctacattggcctgcttcagcagctgttagcaggtgttggaggtttgccggttatgtactgtctattggaagctgtgtcagtgtatccagaaaagctggctaccaaatttgtagacaaaacagaatggataaagagtctgatgaataacagtaaagaagaaatgcgcgaactggcagcgttgttttattctgtagtggtatcaacagtgtcggggaatgagttgaaatcaatgatagaacagcttataaagactacaaaagacaatcacagcccggagatacagcatggatccttgcttgcattgggattcacggtgggaaggtatttggctaaaaagaaaatgagaatgtcagagcaacaagacctggagagaaatgctgacaccctccctgatcaagaggaactcattcagagtgctacagaaacaataggctcatttttggacagtacatcacccctcctggcaattgctgcctgcacagccctgggtgaaattggcagaaatggtccacttccaatccccagtgagggatctggctttaccaaattgcatcttgtagaaagcttactaagtagaataccttccagtaaagaaacaaataagatgaaagaacgagcaatccaaacactgggatattttccagttggggatggagattttcctcaccagaaactcctcttgcaaggtctgatggattctgtggaggccaagcagatagaacttcagttcactattggcgaagccattaccagtgctgcaataggaactagttctgtggctgcccgagatgcctggcaaatgactgaagaggaatatactccacctgctggagccaaagtgaatgatgtggttccatgggtgttggatgtgattttaaataaacatatcatcagccccaacccacacgtgaggcaagcagcctgcatctggctcctttcccttgtcaggaagctaagtacccacaaagaagtgaagtctcatcttaaagaaattcaaagtgcatttgtttcagttctatcagaaaatgatgaacttagccaagatgttgcatcaaagggccttgggttggtttatgaactaggcaatgaacaagatcaacaggaattggtttctacacttgtggaaacacttatgactggcaaaagagttaaacatgaagtttctggagagacagtggtatttcaagggggagctcttggcaaaacaccagatggtcagggcctttctacttacaaggaactttgttctctggcaagtgatcttagccagccagatctggtgtataaatttatgaatttagccaaccatcatgcaatgtggaactctaggaagggtgctgcttttggttttaatgtaattgctaccagagctggagagcagctggctccttttctgcctcagctagttcctcgactttatcgttaccagtttgatcccaaccttggcattcgacaggccatgacaagtatttggaatgcgttggtcactgacaaatccatggtggataaatatttgaaagaaattcttcaagatttggttaagaaccttacaagcaatatgtggcgagttcgagaatccagctgtttagctttgaatgatttattgagaggaagacccttagatgacatcattgataaacttccagaaatttgggaaacgctttttagagtacaagatgatatcaaggaatctgtacgaaaagcggcagaactagctctgaaaactctgagcaaggtctgtgtgaaaatgtgtgaccctgccaaaggagcagctggccagagaaccatcgctgcccttctgccttgccttctggacaaaggaatgatgagcaccgtgacggaagttcgagccctcagcattaacacccttgtgaagatcagcaaaagtgcaggagccatgttgaaaccgcatgcaccaaaactcattccagctctgctagagtccttaagtgtattggagccccaagttctcaattatttgagcctccgggcgacagagcaagaaaaggctgcgatggatagtgctcggcttagtgctgccaaatcttctccaatgatggaaacaatcaacatgtgcctgcaataccttgatgtgtcagtgctgggcgagctagttcctaggttgtgtgaactgatcagaagtggtgtaggtcttggaactaagggtggctgtgccagtgtcattgtgtcattaactactcagtgtcctcaggacctaacaccttactcaggtaaacttatgagtgctttgctgagtggcctgacagatcggaacagtgtgattcagaaatcttgtgcatttgctatgggccatttagttcggacctcacgggatagcagcactgaaaaactcctgcagaagctcaatgggtggtatatggagaaagaagaacctatctacaagacctcttgtgctttgactattcatgctattggacgatacagccctgatgtattaaagaatcatgcaaaagaagtcctgcctctggcatttttaggcatgcatgaaattgctgatgaggagaaatccgaaaaagaagaatgtaatttatggaccgaagtgtggcaggaaaacgtacctggatcctttggtggcattcgattatacctgcaggagttaattactattacccagaaggctttgcagtctcagtcctggaaaatgaaagcccagggtgcaattgccatggcatcaattgcaaaacagactagctctctagtacctccatatctcggaatgatactgaccgcattgctgcaaggcctggctggaagaacgtgggcaggaaaggaggagctattgaaagccattgcctgtgtggtgacagcttgcagtgcagagctggaaaagtctgtgcccaatcaacccagcacaaatgaaattcttcaagctgttctgaaggaatgtagcaaagagaatgtcaaatacaagattgtagcaatcagctgtgcagctgatatcttgaaggccaccaaagaggacagattccaggagttctctaacattgtcatacctctcatcaagaagaactcacttgaaagcagtggggtccggacaaccaaaaatgaagaggagaatgaaaaggaaaaggagctccagctggaatatctgctgggtgcctttgaaagcctgggcaaagcctggccgcgaaacgcggagacccaacgttgttatcgtcaggagctgtgcaaactgatgtgtgaacggctaaaactcagcacgtggaaagtgcagctaggagtcctgcaatcaatgaatgccttttttcaggggttaatgcttttggaagaagaacatgccgatcctgaggctttggctgaaattctgcttgaaacttgtaaatcaatcacatattctttagaaaataagacctactcatctgtgagaacagaagctttatctgtgatagaattgctgcttaaaaaacttgaagaatctaaacagtgggaatgtttgacatctgaatgcagagtgctcctaattgagtctttagctactatggagccagacagcagacctgaactgcaggagaaagcagcgttactgaagaaaacacttgaaaatctggaataaattagaaggggaagaaacaaacaagtgccatgttcattgggggttgaagtggtggtgttctttgaaaaaccaagtgggaaaaagtaaagattaatctgtagcatgcatcattccttggctgaaataaaaagaaaaagccttaaattttgttccttattagctttattttactttatgtttttaaagtatctgggctgagtgagcttaatggaaccttggatgtttgaggggtggttgtaaaggaaactggcagaaatagttactaaaagagttcaagctgttattaaaggaattaatagacagagttgcagagcaagctggataaaaatcttagaactgcattcaaattagttatttcaggaaggggccctataaataacttattttaacctccctcttacacctgaagaaataggaagctgtgtcatctcagaggctttctgaggcctgtgccaaagtcagaacccaggtgtttaatgtctggccctggatactttcttttatggccatctgccaaatcagtgctaaccccggcttacccaagaaacttccaagatgaggtacgtttagggtggcacacagcagtctttgtgccagaactaaactgacccttaccattgggtttctgaaagccagaagctaaacattgtcttgtcatgtgtttaggtggttgatttggagaaaatgattgtttagcatctttacagatggagaggacagagtcagtctccttcggataattccaatcgtcttccttttacaggtggataaagtagattaggacaagatcacacattctatctgtgtctgtggctgcatattttgcaaaaccagaaacaaaatcgcagactgccgtggtttagaccatttataatgtcaaaactgtaatgacaaatttctgttcacttttatgctaccagtatgactttataggggagaaggaaagccttttaattagccacctgggaattactcttttaaaaaatgccttttctcaaaagaacatgataccactccaagtaaatcattgccactaggggttttcctccttccttctgttgcccatgcccctgcctgaaagtgtagggtaagaggaaaaacaagtaaaaccttagtgttgatggtaaactgagaactctgtagcttaccttggattccagagcagaagactggtttacattcagtactcatccttattgacgttaacaccaggaatctccatgtttattatttttcgtggaaactccatgtttattatttttggtggtctctattgaccaatgtatttcaaacttttttgactgcaagtcataataaaaataactttttacatcacg

SEQ ID NO: 145800 - DNA, 7078 bp, Homo sapiens
  Payload ID: 8913
  Gene Symbol: KIAA0368
  Gene Name: KIAA0368
  Uniprot ID: Q5VYK3
  ENST ID: ENST00000338205
  CDS Start-End: 221-5740
gcgtgtttccccaggtcgggcccagccaacgtgacagccgcagacctcggaaaagggcgctccggccccgcctcgaggatttcccccggccgctagggcagcccgggcccgctcggcccagcccctcacggactgcggcgcgcggctccccggggcccggcccgccgaacgcctcgctctacagccctcacctcgcggcgccgagcgcagcgtccgcggcatggagaccggctccgactcagatcagcttgaacgggtctttttacgacttggccatgctgaaacagatgaacaattacagaatattatatctaaattccttcctcctgttttgctcaaactctctagcacccaagaaggagtacgtaaaaaggtaatggaactgctggtccatctgaataaacgtataaaaagccgccccaaaatacaacttccagtagagacactgttggttcagtaccaggaccctgctgcagtttcctttgtcacaaattttactataatttatgttaaaatgggctatcctcgcctaccagtggaaaaacaatgtgaactggcccctacgcttcttactgccatggaagggaagcctcagccacagcaggatagcttaatgcatcttttaataccaaccctttttcacatgaaataccctgttgaatcatcaaaatcagcttctccatttaatcttgctgagaaaccaaagactgtgcagctgcttttggacttcatgctagatgtccttctgatgccttatggttacgtgttaaatgaatcccagagtcgccaaaattcatcttcagcacagggttcttcttcaaacagtggcggaggttctggaatcccacagcctcctccgggaatgagcttttatgcagccaaacgagttattggtgataacccatggacacctgaacaattggaacagtgcaaattgggaatcgtgaaattcatagaagctgaacaggtgcctgaacttgaagctgttctccacttggtgattgcctctagtgatacacgccacagtgtggcaacggcagcagacctggaattgaaaagcaaacagagcttaattgactggaataatcctgccatcattaataagatgtacaaggtgtaccttggagatataccactgaagacaaaagagggtgcagttctgaagccagagttgaaaagggaccctgtcagtacaagagtcaagttaaagattgtcccccatctcctccgctctagacaagctgctgaaacgttcccagccaacattcaggtggtgtatgatggactttttggtacaaatacaaattcaaagttaagaacattatccctgcaatttgtgcatcatatttgtataacctgtccagaaatcaagattaagccattaggtccaatgcttttgaatggcctcaccaagctaatcaatgaatacaaagaggaccctaaactactgtcaatggcatattcagctgttggaaaactctccagtcggatgccacatttattcactaaggatatagcgcttgtgcagcagctttttgaagccctttgcaaggaagagcctgagactcgacttgctattcaagaagctttatctatgatggttggagcgtatagtactttggaaggggcacagcgaactctcatggaggcacttgtggcttcgtacttaataaagcctgaagttcaagttcgacaagtggctgtgaaatttgccagtacggtgtttccctcagatcatatcccttccagatatttgctgctactggctgcaggagatccacgtgaagaagttcatggagaagcacaacgcgtattaaggtgtcttccaggtagaaacagaaaagaaagtacttctgagcagatgccttccttcccagaaatggtttattacatccaagaaaaggcttctcatcgaatgaaaactccagtcaagtacatgaccgggaccactgtccttccatttaacccagcagcctttggagagatcgttctgtacttgcgcatgtgccttgcgcacagtgcgggggtggtgcccacctctcagagtttggctgatatgcaggatcatgccccagccattgggcgctacatacggactttaatgtcaagcgggcagatggcaccctcatcatctaacaagagtggggagactaaccctgtccagatctacattggcctgcttcagcagctgttagcaggtgttggaggtttgccggttatgtactgtctattggaagctgtgtcagtgtatccagaaaagctggctaccaaatttgtagacaaaacagaatggataaagagtctgatgaataacagtaaagaagaaatgcgcgaactggcagcgttgttttattctgtagtggtatcaacagtgtcggggaatgagttgaaatcaatgatagaacagcttataaagactacaaaagacaatcacagcccggagatacagcatggatccttgcttgcattgggattcacggtgggaaggtatttggctaaaaagaaaatgagaatgtcagagcaacaagacctggagagaaatgctgacaccctccctgatcaagaggaactcattcagagtgctacagaaacaataggctcatttttggacagtacatcacccctcctggcaattgctgcctgcacagccctgggtgaaattggcagaaatggtccacttccaatccccagtgagggatctggctttaccaaattgcatcttgtagaaagcttactaagtagaataccttccagtaaagaaacaaataagatgaaagaacgagcaatccaaacactgggatattttccagttggggatggagattttcctcaccagaaactcctcttgcaaggtctgatggattctgtggaggccaagcagatagaacttcagttcactattggcgaagccattaccagtgctgcaataggaactagttctgtggctgcccgagatgcctggcaaatgactgaagaggaatatactccacctgctggagccaaagtgaatgatgtggttccatgggtgttggatgtgattttaaataaacatatcatcagccccaacccacacgtgaggcaagcagcctgcatctggctcctttcccttgtcaggaagctaagtacccacaaagaagtgaagtctcatcttaaagaaattcaaagtgcatttgtttcagttctatcagaaaatgatgaacttagccaagatgttgcatcaaagggccttgggttggtttatgaactaggcaatgaacaagatcaacaggaattggtttctacacttgtggaaacacttatgactggcaaaagagttaaacatgaagtttctggagagacagtggtatttcaagggggagctcttggcaaaacaccagatggtcagggcctttctacttacaaggaactttgttctctggcaagtgatcttagccagccagatctggtgtataaatttatgaatttagccaaccatcatgcaatgtggaactctaggaagggtgctgcttttggttttaatgtaattgctaccagagctggagagcagctggctccttttctgcctcagctagttcctcgactttatcgttaccagtttgatcccaaccttggcattcgacaggccatgacaagtatttggaatgcgttggtcactgacaaatccatggtggataaatatttgaaagaaattcttcaagatttggttaagaaccttacaagcaatatgtggcgagttcgagaatccagctgtttagctttgaatgatttattgagaggaagacccttagatgacatcattgataaacttccagaaatttgggaaacgctttttagagtacaagatgatatcaaggaatctgtacgaaaagcggcagaactagctctgaaaactctgagcaaggtctgtgtgaaaatgtgtgaccctgccaaaggagcagctggccagagaaccatcgctgcccttctgccttgccttctggacaaaggaatgatgagcaccgtgacggaagttcgagccctcagcattaacacccttgtgaagatcagcaaaagtgcaggagccatgttgaaaccgcatgcaccaaaactcattccagctctgctagagtccttaagtgtattggagccccaagttctcaattatttgagcctccgggcgacagagcaagaaaaggctgcgatggatagtgctcggcttagtgctgccaaatcttctccaatgatggaaacaatcaacatgtgcctgcaataccttgatgtgtcagtgctgggcgagctagttcctaggttgtgtgaactgatcagaagtggtgtaggtcttggaactaagggtggctgtgccagtgtcattgtgtcattaactactcagtgtcctcaggacctaacaccttactcaggtaaacttatgagtgctttgctgagtggcctgacagatcggaacagtgtgattcagaaatcttgtgcatttgctatgggccatttagttcggacctcacgggatagcagcactgaaaaactcctgcagaagctcaatgggtggtatatggagaaagaagaacctatctacaagacctcttgtgctttgactattcatgctattggacgatacagccctgatgtattaaagaatcatgcaaaagaagtcctgcctctggcatttttaggcatgcatgaaattgctgatgaggagaaatccgaaaaagaagaatgtaatttatggaccgaagtgtggcaggaaaacgtacctggatcctttggtggcattcgattatacctgcaggagttaattactattacccagaaggctttgcagtctcagtcctggaaaatgaaagcccagggtgcaattgccatggcatcaattgcaaaacagactagctctctagtacctccatatctcggaatgatactgaccgcattgctgcaaggcctggctggaagaacgtgggcaggaaaggaggagctattgaaagccattgcctgtgtggtgacagcttgcagtgcagagctggaaaagtctgtgcccaatcaacccagcacaaatgaaattcttcaagctgttctgaaggaatgtagcaaagagaatgtcaaatacaagattgtagcaatcagctgtgcagctgatatcttgaaggccaccaaagaggacagattccaggagttctctaacattgtcatacctctcatcaagaagaactcacttgaaagcagtggggtccggacaaccaaaaatgaagaggagaatgaaaaggaaaaggagctccagctggaatatctgctgggtgcctttgaaagcctgggcaaagcctggccgcgaaacgcggagacccaacgttgttatcgtcaggagctgtgcaaactgatgtgtgaacggctaaaactcagcacgtggaaagtgcagctaggagtcctgcaatcaatgaatgccttttttcaggggttaatgcttttggaagaagaacatgccgatcctgaggctttggctgaaattctgcttgaaacttgtaaatcaatcacatattctttagaaaataagacctactcatctgtgagaacagaagctttatctgtgatagaattgctgcttaaaaaacttgaagaatctaaacagtgggaatgtttgacatctgaatgcagagtgctcctaattgagtctttagctactatggagccagacagcagacctgaactgcaggagaaagcagcgttactgaagaaaacacttgaaaatctggaataaattagaaggggaagaaacaaacaagtgccatgttcattgggggttgaagtggtggtgttctttgaaaaaccaagtgggaaaaagtaaagattaatctgtagcatgcatcattccttggctgaaataaaaagaaaaagccttaaattttgttccttattagctttattttactttatgtttttaaagtatctgggctgagtgagcttaatggaaccttggatgtttgaggggtggttgtaaaggaaactggcagaaatagttactaaaagagttcaagctgttattaaaggaattaatagacagagttgcagagcaagctggataaaaatcttagaactgcattcaaattagttatttcaggaaggggccctataaataacttattttaacctccctcttacacctgaagaaataggaagctgtgtcatctcagaggctttctgaggcctgtgccaaagtcagaacccaggtgtttaatgtctggccctggatactttcttttatggccatctgccaaatcagtgctaaccccggcttacccaagaaacttccaagatgaggtacgtttagggtggcacacagcagtctttgtgccagaactaaactgacccttaccattgggtttctgaaagccagaagctaaacattgtcttgtcatgtgtttaggtggttgatttggagaaaatgattgtttagcatctttacagatggagaggacagagtcagtctccttcggataattccaatcgtcttccttttacaggtggataaagtagattaggacaagatcacacattctatctgtgtctgtggctgcatattttgcaaaaccagaaacaaaatcgcagactgccgtggtttagaccatttataatgtcaaaactgtaatgacaaatttctgttcacttttatgctaccagtatgactttataggggagaaggaaagccttttaattagccacctgggaattactcttttaaaaaatgccttttctcaaaagaacatgataccactccaagtaaatcattgccactaggggttttcctccttccttctgttgcccatgcccctgcctgaaagtgtagggtaagaggaaaaacaagtaaaaccttagtgttgatggtaaactgagaactctgtagcttaccttggattccagagcagaagactggtttacattcagtactcatccttattgacgttaacaccaggaatctccatgtttattatttttcgtggaaactccatgtttattatttttggtggtctctattgaccaatgtatttcaaacttttttgactgcaagtcataataaaaataactttttacatcacga

SEQ ID NO: 145801 - DNA, 573 bp, Homo sapiens
  Payload ID: 8913
  Gene Symbol: KIAA0368
  Gene Name: KIAA0368
  ENST ID: ENST00000374383
  CDS Start-End: 1-429
actattacccagaaggctttgcagtctcagtcctggaaaatgaaagcccagggtgcaattgccatggcatcaattgcaaaacagactagctctctagtacctccatatctcggaatgatactgaccgcattgctgcaaggcctggctggaagaacgtgggcaggaaaggaggagctattgaaagccattgcctgtgtggtgacagcttgcagtgcagagctggaaaagtctgtgcccaatcaacccagcacaaatgaaattcttcaagctgttctgaaggaatgtagcaaagagaatgtcaaatacaagattgtagcaatcagctgtgcagctgatatcttgaaggccaccaaagaggacagattccaggagttctctaacattgtcatacctctcatcaagaagaaaacacttgaaaatctggaataaattagaaggggaagaaacaaacaagtgccatgttcattgggggttgaagtggtggtgttctttgaaaaaccaagtgggaaaaagtaaagattaatctgtagcatgcatcattccttggctgaaataaaaagaaaaagccttaaa

SEQ ID NO: 145802 - DNA, 2806 bp, Homo sapiens
  Payload ID: 8913
  Gene Symbol: KIAA0368
  Gene Name: KIAA0368
  ENST ID: ENST00000602447
  CDS Start-End: 137-2806
ggcgggcctcggggcacagcgcggtccgcgccgagtgaacggaggcggctcgcggcccctgccgcaccgcgagccgcgagccccccggccgcgccctgcccccccagcccctccctcgttccctccccggcgcaacatggctgcggccgccgcctccgcctcccaggatgagctgaatcagcttgaacgggtctttttacgacttggccatgctgaaacagatgaacaattacagaatattatatctaaattccttcctcctgttttgctcaaactctctagcacccaagaaggagtacgtaaaaaggtaatggaactgctggtccatctgaataaacgtataaaaagccgccccaaaatacaacttccagtagagacactgttggttcagtaccaggaccctgctgcagtttcctttgtcacaaattttactataatttatgttaaaatgggctatcctcgcctaccagtggaaaaacaatgtgaactggcccctacgcttcttactgccatggaagggaagcctcagccacagcaggatagcttaatgcatcttttaataccaaccctttttcacatgaaataccctgttgaatcatcaaaatcagcttctccatttaatcttgctgagaaaccaaagactgtgcagctgcttttggacttcatgctagatgtccttctgatgccttatggttacgtgttaaatgaatcccagagtcgccaaaattcatcttcagcacagggttcttcttcaaacagtggcggaggttctggaatcccacagcctcctccgggaatgagcttttatgcagccaaacgagttattggtgataacccatggacacctgaacaattggaacagtgcaaattgggaatcgtgaaattcatagaagctgaacaggtgcctgaacttgaagctgttctccacttggtgattgcctctagtgatacacgccacagtgtggcaacggcagcagacctggaattgaaaagcaaacagagcttaattgactggaataatcctgccatcattaataagatgtacaaggtgtaccttggagatataccactgaagacaaaagagggtgcagttctgaagccagagttgaaaagggaccctgtcagtacaagagtcaagttaaagattgtcccccatctcctccgctctagacaagctgctgaaacgttcccagccaacattcaggtggtgtatgatggactttttggtacaaatacaaattcaaagttaagaacattatccctgcaatttgtgcatcatatttgtataacctgtccagaaatcaagattaagccattaggtccaatgcttttgaatggcctcaccaagctaatcaatgaatacaaagaggaccctaaactactgtcaatggcatattcagctgttggaaaactctccagtcggatgccacatttattcactaaggatatagcgcttgtgcagcagctttttgaagccctttgcaaggaagagcctgagactcgacttgctattcaagaagctttatctatgatggttggagcgtatagtactttggaaggggcacagcgaactctcatggaggcacttgtggcttcgtacttaataaagcctgaagttcaagttcgacaagtggctgtgaaatttgccagtacggtgtttccctcagatcatatcccttccagatatttgctgctactggctgcaggagatccacgtgaagaagttcatggagaagcacaacgcgtattaaggtgtcttccaggtagaaacagaaaagaaagtacttctgagcagatgccttccttcccagaaatggtttattacatccaagaaaaggcttctcatcgaatgaaaactccagtcaagtacatgaccgggaccactgtccttccatttaacccagcagcctttggagagatcgttctgtacttgcgcatgtgccttgcgcacagtgcgggggtggtgcccacctctcagagtttggctgatatgcaggatcatgccccagccattgggcgctacatacggactttaatgtcaagcgggcagatggcaccctcatcatctaacaagagtggggagactaaccctgtccagatctacattggcctgcttcagcagctgttagcaggtgttggaggtttgccggttatgtactgtctattggaagctgtgtcagtgtatccagaaaagctggctaccaaatttgtagacaaaacagaatggataaagagtctgatgaataacagtaaagaagaaatgcgcgaactggcagcgttgttttattctgtagtggtatcaacagtgtcggggaatgagttgaaatcaatgatagaacagcttataaagactacaaaagacaatcacagcccggagatacagcatggatccttgcttgcattgggattcacggtgggaaggtatttggctaaaaagaaaatgagaatgtcagagcaacaagacctggagagaaatgctgacaccctccctgatcaagaggaactcattcagagtgctacagaaacaataggctcatttttggacagtacatcacccctcctggcaattgctgcctgcacagccctgggtgaaattggcagaaatggtccacttccaatccccagtgagggatctggctttaccaaattgcatcttgtagaaagcttactaagtagaataccttccagtaaagaaacaaataagatgaaagaacgagcaatccaaacactgggatattttccagttggggatggagattttcctcaccagaaactcctcttgcaaggtctgatggattctgtggag

SEQ ID NO: 145803 - DNA, 539 bp, Homo sapiens
  Payload ID: 8913
  Gene Symbol: KIAA0368
  Gene Name: KIAA0368
  ENST ID: ENST00000602978
  CDS Start-End: 156-539
aggccgggccgcccgcacaggccgccgcgtgtcgagtccgcgcggggagcgcacgcggggcgggcggcgacagattctttatacaattgcatatgtacgagtggatgaacgtaccattggtgatcccgaggatttttgtcaagattggataaaccatgtatcacattgattgtagagatcagcttgaacgggtctttttacgacttggccatgctgaaacagatgaacaattacagaatattatatctaaattccttcctcctgttttgctcaaactctctagcacccaagaaggagtacgtaaaaaggtaatggaactgctggtccatctgaataaacgtataaaaagccgccccaaaatacaacttccagtagagacactgttggttcagtaccaggaccctgctgcagtttcctttgtcacaaattttactataatttatgttaaaatgggctatcctcgcctaccagtggaaaaacaatgtgaactggcccctacgcttcttactgccatggaagggaagcctcagccacagcag

SEQ ID NO: 145804 - DNA, 6118 bp, Homo sapiens
  Payload ID: 8914
  Gene Symbol: KIAA0391
  Gene Name: KIAA0391
  Uniprot ID: O15091
  ENST ID: ENST00000250377
  CDS Start-End: 367-2070
gtttatggccgcgttaagtctgagtgccgctttgagttgttgaatgaagtgaacttcatttgtcagcgttcggttcatgaactggaatgtaagaggcaccagaggattcctgctctgtcccctggtttgcggcttgcgacgttggacatccccggattgttgtttaatagagaaaactcacctgccttcttgcttttaagtagccccaaaagcagaaccttgatttgtctgtaaggaagaaacacaaaccttttaaaaagttccacttcgactctgcaccgccgacccccaatctctttaattttgccatagaagaggggttttttcaacatctctctcactatctggtgctgatctcactgcataatgactttctatttgtttggtattcgaagctttccgaagctttggaagagcccataccttgggctaggcccagggcactcttatgtctcgctgtttctggcagaccgctgtggcatcaggaaccagcagaggttgttttctcttaaaacaatgtctccacagaataccaaagcaacgaatctgattgccaaggccagatatctcaggaaagatgagggcagtaataagcaagtttattctgttcctcatttttttttagctggagcagctaaggagagatcacagatgaattctcaaactgaagatcatgccttggcacctgtgaggaacactattcaactcccaacacaacctttgaattcagaggagtgggataaacttaaggaagatttaaaagaaaacaccggaaagaccagtttcgaaagttggatcatttcacagatggctggctgtcatagctctatagatgtggctaaatctctgctggcatgggtagcagccaaaaataatggtattgtaagttacgatttactggtcaagtatttgtatctctgtgtctttcatatgcagacatctgaagttattgatgtctttgaaattatgaaagccagatataagactttagaacctagaggttacagtcttctcatccggggattgatccattcagacagatggagagaagcattgttgctgttagaggacatcaaaaaagttataactccttcaaaaaagaactataatgactgtatccagggagctctccttcatcaagatgtaaacacagcttggaatttatatcaggaattgctaggtcatgatattgttcctatgttggaaactttaaaagctttctttgattttggaaaagacataaaggatgataactattcaaataaactactagatattctttcatatctaagaaataatcagctgtatccaggggagtcatttgcacacagtataaaaacatggtttgagagtggccagtgttcgggctgtggaaaaaccatagagtctattcagctgagtccagaagaatatgaatgtcttaagggaaaaatcatgagggatgtgatagatggaggtgaccagtacagaaagacaacacctcaggaacttaagagatttgagaacttcataaaatctcgtcctccttttgatgttgtcattgatggtctcaatgttgccaaaatgtttcctaaagttcgtgaatctcaacttctcttgaatgtcgtctctcaactagccaaacggaatctgcgactgctggtcctaggccggaagcacatgctaagacggagttcccagtggagtcgggatgagatggaagaggtgcaaaagcaagccagctgtttttttgctgatgacatctcggaggatgatccattccttctgtatgccacactgcactccgggaatcactgcaggtttatcacaagagacctgatgcgggaccacaaggcctgtctgcctgatgccaagacccaacgcctgttttttaagtggcagcagggacatcagctggcaattgtaaataggtttccaggatcaaaactaacctttcagcgtattctcagctatgacacagtggtgcaaacaactggagactcgtggcacataccatatgatgaagacttggtagaaagatgttcctgtgaagtaccaaccaaatggctttgcctccaccaaaagacatagagattcttacctctatgctaagtttgtgtttgggtaccctctaggttggcatcagaggctcttgagctggtgtttgtttagggcattgcctctgtcctgaagataaaaggattctattaacagcattgacattgattttttaatgaaatgagatatatcttttcataaccagctgcgtttttttcccctaacatttgtttttggaggcttatcaagagttggagaacttagtgtagagcaaaacctgcatttctcctactgggccagctattccacttagcttgggtgactaatagtgcttttggtatccattttttgctacttctgaccttgccttccaggcctaccaatagcagaatcaatccatctgtccctgagatactcatgttgtttcaaatgcctcctcccatttctggcatagtctcattctctgtatgttatgccctatccacatggaatcatttatcgtcctctgtaataaactggccaagatactaaaggcttactattcatagcagtttttaattacttatcatccaattatttggattggagaagagggggcattcactcctctttttcttattttttttggaaatagagtctcaacttactctgtcgccagggctggagtgcagtgacgtgatcacagttcactgcagcctcaaactcccaggctcaagcaatcttcctacctcagccctcctgagtaattgggactacaggcatgtatcaccaggcttggctaatttttttttttttttttgtagagatggctgtctcactctgttgacaagactagtctccaacccctggcctcagtcgatccccagcaatttgggagattgaagcgagagaatcacttgagtctaggagttcaagaccagcctaggcaacatagtaagatctcatttctacaaaaaatttaaaaattagccaggcatggtagtttgcacacatagtcccagctactttgggggctgaggtaggaggattgcttgagcctcagaggtcaaggctgcaatgagccaacgttgcaccactgcactctagcctgggtgacagagcgagaccttgtctcaaaacaaaacaaagtgctggaattgcagacttgagccacagtgcccagcctcacttctctagactatgatggttttttcttcattctataatctcttttccaaattggttcaacattttgtgaacactattaatttcatcattcagtatatgtgggctttctaaaatatgccaatttttttccacttaatcaagtttgacttaatttaacaaagtgattatattttaatagttacatttctgttttttccactcactagccagcttacagtttattagcccttgatttcagctgaaaatattcatgtctgcaccccttcatgatagttctttctttacgtatacatactgtattcaatatgcaagaacaggcaaaaactactctattgtgataaaaatcagaatagtaattgcctgaggaaagggatatgagagaacttgagagaactttctcggggtgatggaaagtttcttatattgatttgggtaatagtaacatagctatatgtatatattagttaaaattcctcacactaaacattttaaattgatatatttacatttatgacaatatacctcaaagtaagttagggtaagaaaagataattacttacatgaaataaacaatgacctcttttatatcaaaccatatacatgtgtataattagggtatgtattatgcacagagaaacaatttaggaaaatccaaggaggggacgttttatcttcttacctatttactgaatgcaacattactgcacaccaagacaaaagagctctccaggaaaacattggatatattgagagcattaaaagatactgcaaaagctctaataaattcagtctgcttattttccaaatttcataaactacatacttaggaaactgtgctttcagtgagctaaacttctttttttaagtaactatcatagttttaagaaaaacattttaagaagacaaaaagtatttattaagcccatctaaaaggctaatgcaaattcccaaaaaaggagcacatagagatagaggaggaggccgaagtggtggctcatacctgttaattccagcactttgggaggccaagacaggaggatcactttaggcccagagttggagaccaacctgggcaacatagcaagaccctgtctcttaaaaaaaaaaaaaaaagacgggagaagctacaagaagaaaactagaactttagagcaggagtaaccttagagcatgtaaagtccattttggagatgaggaacagacccaggaagatgacctggcttccctgaatcccacggctagttagtgcagacatttcagccataacccagctcttctaattcccaaatactctttcttctactggcacatagagatgggggaggagtcagggcatggtggcccacacctacagttccagcactttgggaggccaaatgggagaattgcttgaagccaggagttggagaccagcctaggcaacacagggagacccgtgtcgacaaaaaatttaaaaattagctgggcatggtagcacatgcctgtggtcccagctactcagaaggctgaggtgggaggatcacttgagccccagaggtcaaggctacagtgagctatgatcatgctactacactccagcctaggtgacagagtgagaccctgtctcaaagggagggaggtaagaatgagaagaaggaacaggggtgtacctcttttaagggcccaagtatcctgaatggctcagcagtatagaacattgtggtagagaaattacattttaaaataactctaatactgtttagaaacaaaaccctaacttctgcttgagataaactgaagtgcatctgtcccttgtccaggagtggggaaccattgtagggttgctcagcataagtcatactgccacggtgaccttgaggagtgcagggattccctgaaggaagcagctggtaccagacacttaggctgcccatttgtgttctgatcatttgagtgaaaaaaaggtacctgtcaagcaagctcctggacaccacaagaaggaggaattattttaaaagctgtactcttaaattgttagtatctttaaaatcagttgtgaacaatgaaggatttgaaagagcattgactttgccacttaaaagtatttctaaaatactttgtgcttcccccttgcattctgaatttatacacttttcctcctgctgttctcagacccagtggaaagaaaatctcaaggaagaaggctgagtttattctctcagggctctgttgggtctacctcatctgaggtggcttattcttcataggaaattaatttttcttctcaagtatgcacttaaatataattactgcttccttggtcctctagcagatttctcacttttatttatttttttttttgagacagagtcttgatcttttttcatctaggctggagtgcaatggtttgatctcagttcactgcaacctctgcctcctgggttcaagcaattctcatgcctctgcctctcgggcagctggaattacaggcatgcgccatgacgcctggctaatttttgcatttttagtagagacgggttttcaccatgttgccccggttgctctcaaactcctgacctcaggtgatccacccacctcagcctcccaaagtgctgggattacaggtgtgagtcaccccgcacagcctgaaatgaggcatctctatctatagtccagcagccctacaggaggcaggaggggagcaagaataagaaaggaaatttgtaaaaggcacttaggagtgagcagaaaggaaataggaccagcttttacctgcccagtcctggccagtgacaagcagtctgcttgagtctgtgctaaataaacaaaggaagttccatttagagctctacagaggggaagccatagaaattaacaggatgaaaatacaagagacaggaacacagatgaataaatgtaataaaatttgagaaat

SEQ ID NO: 145805 - DNA, 1589 bp, Homo sapiens
  Payload ID: 8914
  Gene Symbol: KIAA0391
  Gene Name: KIAA0391
  Uniprot ID: O15091
  ENST ID: ENST00000321130
  CDS Start-End: 442-1077
agtttccgccgcgtttatggccgcgttaagtctgagtgccgctttgagttgttgaatgaagtgaacttcatttgtcagcgttcggtacgcagtctaggcagcgcccttcctgtacctctcttcctttcctgagtcgttggcgcagctgactcgccacctcctccctcctcgtccccccaccggaggagttttgcggtctgtagagagctatgcagggtgagggcccctagacttcggctttcgccgctgttggtggtaggctggagttgggggtccctggatacggttttggctttacaccccctttccagcaagcttcccgtgggaatctgttccttttcaggacagctgtgatccactggccagtgttcgggctgtggaaaaaccatagagtctattcagctgagtccagaagaatatgaatgtcttaagggaaaaatcatgagggatgtgatagatggaggtgaccagtacagaaagacaacacctcaggaacttaagagatttgagaacttcataaaatctcgtcctccttttgatgttgtcattgatggtctcaatgttgccaaaatgtttcctaaagttcgtgaatctcaacttctcttgaatgtcgtctctcaactagccaaacggaatctgcgactgctggtcctaggccggaagcacatgctaagacggagttcccagtggagtcgggatgagatggaagaggtgcaaaagcaagccagctgtttttttgctgatgacatctcggaggatgatccattccttctgtatgccacactgcactccgggaatcactgcaggtttatcacaagagacctgatgcgggaccacaaggcctgtctgcctgatgccaagacccaacgcctgttttttaagtggcagcagggacatcagctggcaattgtaaataggtttccaggatcaaaactaacctttcagcgtattctcagctatgacacagtggtgcaaacaactggagactcgtggcacataccatatgatgaagacttggtagaaagatgttcctgtgaagtaccaaccaaatggctttgcctccaccaaaagacatagagattcttacctctatgctaagtttgtgtttgggtaccctctaggttggcatcagaggctcttgagctggtgtttgtttagggcattgcctctgtcctgaagataaaaggattctattaacagcattgacattgattttttaatgaaatgagatatatcttttcataaccagctgcgtttttttcccctaacatttgtttttggaggcttatcaagagttggagaacttagtgtagagcaaaacctgcatttctcctactgggccagctattccacttagcttgggtgactaatagtgcttttggtatccattttttgctacttctgaccttgccttccaggcctaccaatagcagaatcaatccatctgtccctgagatactcatgttgtttcaaatgcctcctcccatttctggcatagtctcattctctgtatgttatgccctatccacatggaatcatttatcgtcctctgtaataaactggccaagatactaaaggcttactattca

SEQ ID NO: 145806 - DNA, 2611 bp, Homo sapiens
  Payload ID: 8914
  Gene Symbol: KIAA0391
  Gene Name: KIAA0391
  Uniprot ID: O15091
  ENST ID: ENST00000534898
  CDS Start-End: 361-2112
ggccgcgttaagtctgagtgccgctttgagttgttgaatgaagtgaacttcatttgtcagcgttcggttcatgaactggaatgtaagaggcaccagaggattcctgctctgtcccctggtttgcggcttgcgacgttggacatccccggattgttgtttaatagagaaaactcacctgccttcttgcttttaagtagccccaaaagcagaaccttgatttgtctgtaaggaagaaacacaaaccttttaaaaagttccacttcgactctgcaccgccgacccccaatctctttaattttgccatagaagaggggttttttcaacatctctctcactatctggtgctgatctcactgcataatgactttctatttgtttggtattcgaagctttccgaagctttggaagagcccataccttgggctaggcccagggcactcttatgtctcgctgtttctggcagaccgctgtggcatcaggaaccagcagaggttgttttctcttaaaacaatgtctccacagaataccaaagcaacgaatctgattgccaaggccagatatctcaggaaagatgagggcagtaataagcaagtttattctgttcctcatttttttttagctggagcagctaaggagagatcacagatgaattctcaaactgaagatcatgccttggcacctgtgaggaacactattcaactcccaacacaacctttgaattcagaggagtgggataaacttaaggaagatttaaaagaaaacaccggaaagaccagtttcgaaagttggatcatttcacagatggctggctgtcatagctctatagatgtggctaaatctctgctggcatgggtagcagccaaaaataatggtattgtaagttacgatttactggtcaagtatttgtatctctgtgtctttcatatgcagacatctgaagttattgatgtctttgaaattatgaaagccagatataagactttagaacctagaggttacagtcttctcatccggggattgatccattcagacagatggagagaagcattgttgctgttagaggacatcaaaaaagttataactccttcaaaaaagaactataatgactgtatccagggagctctccttcatcaagatgtaaacacagcttggaatttatatcaggaattgctaggtcatgatattgttcctatgttggaaactttaaaagctttctttgattttggaaaagacataaaggatgataactattcaaataaactactagatattctttcatatctaagaaataatcagctgtatccaggggagtcatttgcacacagtataaaaacatggtttgagagtgttcctggaaaacaatggaaaggacaattcaccacagtccgaaaaagtggccagtgttcgggctgtggaaaaaccatagagtctattcagctgagtccagaagaatatgaatgtcttaagggaaaaatcatgagggatgtgatagatggaggtgaccagtacagaaagacaacacctcaggaacttaagagatttgagaacttcataaaatctcgtcctccttttgatgttgtcattgatggtctcaatgttgccaaaatgtttcctaaagttcgtgaatctcaacttctcttgaatgtcgtctctcaactagccaaacggaatctgcgactgctggtcctaggccggaagcacatgctaagacggagttcccagtggagtcgggatgagatggaagaggtgcaaaagcaagccagctgtttttttgctgatgacatctcggaggatgatccattccttctgtatgccacactgcactccgggaatcactgcaggtttatcacaagagacctgatgcgggaccacaaggcctgtctgcctgatgccaagacccaacgcctgttttttaagtggcagcagggacatcagctggcaattgtaaataggtttccaggatcaaaactaacctttcagcgtattctcagctatgacacagtggtgcaaacaactggagactcgtggcacataccatatgatgaagacttggtagaaagatgttcctgtgaagtaccaaccaaatggctttgcctccaccaaaagacatagagattcttacctctatgctaagtttgtgtttgggtaccctctaggttggcatcagaggctcttgagctggtgtttgtttagggcattgcctctgtcctgaagataaaaggattctattaacagcattgacattgattttttaatgaaatgagatatatcttttcataaccagctgcgtttttttcccctaacatttgtttttggaggcttatcaagagttggagaacttagtgtagagcaaaacctgcatttctcctactgggccagctattccacttagcttgggtgactaatagtgcttttggtatccattttttgctacttctgaccttgccttccaggcctaccaatagcagaatcaatccatctgtccctgagatactcatgttgtttcaaatgcctcctcccatttctggcatagtctcattctctgtatgttatgccctatccacatggaatcatttatcgtcctctgtaataaactggccaagatactaaa

SEQ ID NO: 145807 - DNA, 789 bp, Homo sapiens
  Payload ID: 8914
  Gene Symbol: KIAA0391
  Gene Name: KIAA0391
  ENST ID: ENST00000557404
  CDS Start-End: 235-789
ctatgcagggtgagggcccctagacttcggctttcgccgctgttggtggtaggctggagttgggggtccctggatacggttttggctttacaccccctttccagcaagcttcccgtgggaatctgttccttttcaggacagctgtgatccactggccagtgttcgggctgtggaaaaaccatagagtctattcagctgagtccagaagaatatgaatgtcttaagggaaaaatcatgagggatgtgatagatggaggtgaccagtacagaaagacaacacctcaggaacttaagagatttgagaacttcataaaatctcgtcctccttttgatgttgtcattgatggtctcaatgttgccaaaatgtttcctaaagttcgtgaatctcaacttctcttgaatgtcgtctctcaactagccaaacggaatctgcgactgctggtcctaggccggaagcacatgctaagacggagttcccagtggagtcgggatgagatggaagaggtgcaaaagcaagccagctgtttttttgctgatgacatctcggaggatgatccattccttctgtatgccacactgcactccgggaatcactgcaggtttatcacaagagacctgatgcgggaccacaaggcctgtctgcctgatgccaagacccaacgcctgttttttaagtggcagcagggacatcagctggcaattgtaaataggtttccaggatcaaaactaacctttcagcgtattctcagctatgacacagtggtgcaaacaactggagactcgtggcac

SEQ ID NO: 145808 - DNA, 2232 bp, Homo sapiens
  Payload ID: 8914
  Gene Symbol: KIAA0391
  Gene Name: KIAA0391
  Uniprot ID: O15091
  ENST ID: ENST00000603544
  CDS Start-End: 425-2128
ttcctgagtcgttggcgcagctgactcgccacctcctccctcctcgtccccccaccggaggagttttgcggtctgtagagagctatgcagggtgagggcccctagacttcggctttcgccgctgttggtggttcatgaactggaatgtaagaggcaccagaggattcctgctctgtcccctggtttgcggcttgcgacgttggacatccccggattgttgtttaatagagaaaactcacctgccttcttgcttttaagtagccccaaaagcagaaccttgatttgtctgtaaggaagaaacacaaaccttttaaaaagttccacttcgactctgcaccgccgacccccaatctctttaattttgccatagaagaggggttttttcaacatctctctcactatctggtgctgatctcactgcataatgactttctatttgtttggtattcgaagctttccgaagctttggaagagcccataccttgggctaggcccagggcactcttatgtctcgctgtttctggcagaccgctgtggcatcaggaaccagcagaggttgttttctcttaaaacaatgtctccacagaataccaaagcaacgaatctgattgccaaggccagatatctcaggaaagatgagggcagtaataagcaagtttattctgttcctcatttttttttagctggagcagctaaggagagatcacagatgaattctcaaactgaagatcatgccttggcacctgtgaggaacactattcaactcccaacacaacctttgaattcagaggagtgggataaacttaaggaagatttaaaagaaaacaccggaaagaccagtttcgaaagttggatcatttcacagatggctggctgtcatagctctatagatgtggctaaatctctgctggcatgggtagcagccaaaaataatggtattgtaagttacgatttactggtcaagtatttgtatctctgtgtctttcatatgcagacatctgaagttattgatgtctttgaaattatgaaagccagatataagactttagaacctagaggttacagtcttctcatccggggattgatccattcagacagatggagagaagcattgttgctgttagaggacatcaaaaaagttataactccttcaaaaaagaactataatgactgtatccagggagctctccttcatcaagatgtaaacacagcttggaatttatatcaggaattgctaggtcatgatattgttcctatgttggaaactttaaaagctttctttgattttggaaaagacataaaggatgataactattcaaataaactactagatattctttcatatctaagaaataatcagctgtatccaggggagtcatttgcacacagtataaaaacatggtttgagagtggccagtgttcgggctgtggaaaaaccatagagtctattcagctgagtccagaagaatatgaatgtcttaagggaaaaatcatgagggatgtgatagatggaggtgaccagtacagaaagacaacacctcaggaacttaagagatttgagaacttcataaaatctcgtcctccttttgatgttgtcattgatggtctcaatgttgccaaaatgtttcctaaagttcgtgaatctcaacttctcttgaatgtcgtctctcaactagccaaacggaatctgcgactgctggtcctaggccggaagcacatgctaagacggagttcccagtggagtcgggatgagatggaagaggtgcaaaagcaagccagctgtttttttgctgatgacatctcggaggatgatccattccttctgtatgccacactgcactccgggaatcactgcaggtttatcacaagagacctgatgcgggaccacaaggcctgtctgcctgatgccaagacccaacgcctgttttttaagtggcagcagggacatcagctggcaattgtaaataggtttccaggatcaaaactaacctttcagcgtattctcagctatgacacagtggtgcaaacaactggagactcgtggcacataccatatgatgaagacttggtagaaagatgttcctgtgaagtaccaaccaaatggctttgcctccaccaaaagacatagagattcttacctctatgctaagtttgtgtttgggtaccctctaggttggcatcagaggctcttgagctggtgtttgtttagggcattgcctctgtcctgaagat

SEQ ID NO: 145809 - DNA, 1406 bp, Homo sapiens
  Payload ID: 8914
  Gene Symbol: KIAA0391
  Gene Name: KIAA0391
  Uniprot ID: O15091
  ENST ID: ENST00000605870
  CDS Start-End: 320-955
gtccccccaccggaggagttttgcggtctgtagagagctatgcagggtgagggcccctagacttcggctttcgccgctgttggtggtaggctggagttgggggtccctggatacggttttggctttacaccccctttccagcaagcttcccgtgggaatctgttccttttcaggacagctgtgatccactgttcctggaaaacaatggaaaggacaattcaccacagtccgaaaaagtggccagtgttcgggctgtggaaaaaccatagagtctattcagctgagtccagaagaatatgaatgtcttaagggaaaaatcatgagggatgtgatagatggaggtgaccagtacagaaagacaacacctcaggaacttaagagatttgagaacttcataaaatctcgtcctccttttgatgttgtcattgatggtctcaatgttgccaaaatgtttcctaaagttcgtgaatctcaacttctcttgaatgtcgtctctcaactagccaaacggaatctgcgactgctggtcctaggccggaagcacatgctaagacggagttcccagtggagtcgggatgagatggaagaggtgcaaaagcaagccagctgtttttttgctgatgacatctcggaggatgatccattccttctgtatgccacactgcactccgggaatcactgcaggtttatcacaagagacctgatgcgggaccacaaggcctgtctgcctgatgccaagacccaacgcctgttttttaagtggcagcagggacatcagctggcaattgtaaataggtttccaggatcaaaactaacctttcagcgtattctcagctatgacacagtggtgcaaacaactggagactcgtggcacataccatatgatgaagacttggtagaaagatgttcctgtgaagtaccaaccaaatggctttgcctccaccaaaagacatagagattcttacctctatgctaagtttgtgtttgggtaccctctaggttggcatcagaggctcttgagctggtgtttgtttagggcattgcctctgtcctgaagataaaaggattctattaacagcattgacattgattttttaatgaaatgagatatatcttttcataaccagctgcgtttttttcccctaacatttgtttttggaggcttatcaagagttggagaacttagtgtagagcaaaacctgcatttctcctactgggccagctattccacttagcttgggtgactaatagtgcttttggtatccattttttgctacttctgaccttgccttccaggcctaccaatagcagaatcaatccatctgtccctgagatactcatgttgtttcaaatgcctcctcccatttctggcatagtctcattctctgtatgttatgccctatcca

SEQ ID NO: 145810 - DNA, 1706 bp, Homo sapiens
  Payload ID: 8914
  Gene Symbol: KIAA0391
  Gene Name: KIAA0391
  Uniprot ID: O15091
  ENST ID: ENST00000604948
  CDS Start-End: 116-1582
actgtagtttccgccgcgtttatggccgcgttaagtctgagtgccgctttgagttgttgaatgaagtgaacttcatttgtcagcgttcgctggagcagctaaggagagatcacagatgaattctcaaactgaagatcatgccttggcacctgtgaggaacactattcaactcccaacacaacctttgaattcagaggagtgggataaacttaaggaagatttaaaagaaaacaccggaaagaccagtttcgaaagttggatcatttcacagatggctggctgtcatagctctatagatgtggctaaatctctgctggcatgggtagcagccaaaaataatggtattgtaagttacgatttactggtcaagtatttgtatctctgtgtctttcatatgcagacatctgaagttattgatgtctttgaaattatgaaagccagatataagactttagaacctagaggttacagtcttctcatccggggattgatccattcagacagatggagagaagcattgttgctgttagaggacatcaaaaaagttataactccttcaaaaaagaactataatgactgtatccagggagctctccttcatcaagatgtaaacacagcttggaatttatatcaggaattgctaggtcatgatattgttcctatgttggaaactttaaaagctttctttgattttggaaaagacataaaggatgataactattcaaataaactactagatattctttcatatctaagaaataatcagctgtatccaggggagtcatttgcacacagtataaaaacatggtttgagagtgttcctggaaaacaatggaaaggacaattcaccacagtccgaaaaagtggccagtgttcgggctgtggaaaaaccatagagtctattcagctgagtccagaagaatatgaatgtcttaagggaaaaatcatgagggatgtgatagatggaggtgaccagtacagaaagacaacacctcaggaacttaagagatttgagaacttcataaaatctcgtcctccttttgatgttgtcattgatggtctcaatgttgccaaaatgtttcctaaagttcgtgaatctcaacttctcttgaatgtcgtctctcaactagccaaacggaatctgcgactgctggtcctaggccggaagcacatgctaagacggagttcccagtggagtcgggatgagatggaagaggtgcaaaagcaagccagctgtttttttgctgatgacatctcggaggatgatccattccttctgtatgccacactgcactccgggaatcactgcaggtttatcacaagagacctgatgcgggaccacaaggcctgtctgcctgatgccaagacccaacgcctgttttttaagtggcagcagggacatcagctggcaattgtaaataggtttccaggatcaaaactaacctttcagcgtattctcagctatgacacagtggtgcaaacaactggagactcgtggcacataccatatgatgaagacttggtagaaagatgttcctgtgaagtaccaaccaaatggctttgcctccaccaaaagacatagagattcttacctctatgctaagtttgtgtttgggtaccctctaggttggcatcagaggctcttgagctggtgtttgtttagggcattgcctctgtcctgaagataaaaggattctattaacagc

SEQ ID NO: 145811 - DNA, 552 bp, Homo sapiens
  Payload ID: 8914
  Gene Symbol: KIAA0391
  Gene Name: KIAA0391
  ENST ID: ENST00000604073
  CDS Start-End: 494-552
gagttcattagttccggcttgagggaagcgccttctttcacaatttcttttcattgttcattgcggatatctggaagccttccaggtcccctgaatgtagtagacacttcagcagccgtctcctaccccttttgccactaaatgcttcaaaactgccttttttcctcgccgccgggccaggcggaacgcctaagtccgggttcatgaactggaatgtaagaggcaccagaggattcctgctctgtcccctggtttgcggcttgcgacgttggacatccccggattgttgtttaatagagaaaactcacctgccttcttgcttttaagtagccccaaaagcagaaccttgatttgtctgtaaggaagaaacacaaaccttttaaaaagttccacttcgactctgcaccgccgacccccaatctctttaattttgccatagaagaggggttttttcaacatctctctcactatctggtgctgatctcactgcataatgactttctatttgtttggtattcgaagctttccgaagctttggaagagcccatacct

SEQ ID NO: 145812 - DNA, 578 bp, Homo sapiens
  Payload ID: 8914
  Gene Symbol: KIAA0391
  Gene Name: KIAA0391
  ENST ID: ENST00000605201
  CDS Start-End: 509-578
tttccgccgcgtttatggccgcgttaagtctgagtgccgctttgagttgttgaatgaagtgaacttcatttgtcagcgttcggtacgcagtctaggcagcgcccttcctgtacctctcttcctttcctgagtcgttggcgcagctgactcgccacctcctccctcctcgtccccccaccggaggagttttgcggtctgtagagagctatgcagggttcatgaactggaatgtaagaggcaccagaggattcctgctctgtcccctggtttgcggcttgcgacgttggacatccccggattgttgtttaatagagaaaactcacctgccttcttgcttttaagtagccccaaaagcagaaccttgatttgtctgtaaggaagaaacacaaaccttttaaaaagttccacttcgactctgcaccgccgacccccaatctctttaattttgccatagaagaggggttttttcaacatctctctcactatctggtgctgatctcactgcataatgactttctatttgtttggtattcgaagctttccgaagctttggaagagcccataccttgggctaggcc

SEQ ID NO: 145813 - DNA, 603 bp, Homo sapiens
  Payload ID: 8914
  Gene Symbol: KIAA0391
  Gene Name: KIAA0391
  ENST ID: ENST00000603611
  CDS Start-End: 502-603
acctctaggagtttagggccgggccatcccaacgggctgcccctcccaaaactcactgtttggacaggtgttgggcgtcgctaggcgccgacgaagaacttctttccagtccatggccgacttccgcgcagcagcttctgcatttgctgtttcctacctgctccacccctaccagctcaggcgtcagcaccgccaggccccgtaaaggttcatgaactggaatgtaagaggcaccagaggattcctgctctgtcccctggtttgcggcttgcgacgttggacatccccggattgttgtttaatagagaaaactcacctgccttcttgcttttaagtagccccaaaagcagaaccttgatttgtctgtaaggaagaaacacaaaccttttaaaaagttccacttcgactctgcaccgccgacccccaatctctttaattttgccatagaagaggggttttttcaacatctctctcactatctggtgctgatctcactgcataatgactttctatttgtttggtattcgaagctttccgaagctttggaagagcccataccttgggctaggcccagggcactcttatgtctcgctgtttctggca

SEQ ID NO: 145814 - DNA, 1068 bp, Homo sapiens
  Payload ID: 8915
  Gene Symbol: KIAA0408
  Gene Name: KIAA0408
  ENST ID: ENST00000487331
  CDS Start-End: 312-1068
gaaggtttcaaagggacttgtcagtactgctctgtggaatggttggacttattttgcatccccttttcttgtaaagaatcgagattcaccgagctgagacttttctctttaagacagctagccatccactttcttccactgctaattgaccagtggtcgagcatccataggatttctccccagtgtgaaaggctttattttaaaggcaagtgagactgcttcaaataaaacaacttcaagcttccaagaaacagttaagaggaggcagagaagagcagaaacacttctttgctgacacttacactgttgccatggacctacataagcagtgggagaacacagagactaactggcataaggaaaagatggaattactggaccagtttgacaatgaaagaaaggaatgggaaagtcaatggaagattatgcagaagaaaatagaagaggcatcaactctagtgcttctctcaactgagttatcgctttgccgggaagtaaagctttggaggaaaatcaatatcaatgaaagtgctaagatcattgatctttaccatgagaagaccattccagagaaagtgatagaatcttccccaaattaccccgatttaggacaaagtgaatttataaggacgaatcacaaagatggtctgagaaaagaaaataaaagagagcagagcttagtcagtggaggaaatcaaatgtgtaaggaacaaaaagcaacaaaaaaatcaaaagtagggtttttggatcctttggctacagacaaccaaaaggaatgtgaggcctggcctgacctgaggacttctgaggaagacagcaagagctgttctggcgccctcagtacagctcttgaagaacttgcgaaggtgagtgaagaattatgcagctttcaagaggaaattcgaaagcggtctaaccatagaaggatgaagtcagattcttttctccaggaaatgccaaatgtaactaatatacctcatggggaccccatgatcaacaatgaccagtgcattcttccaatcagtttagaaaaagaaaaacagaaaaacaggaagaatctgagctgta

SEQ ID NO: 145815 - DNA, 3284 bp, Homo sapiens
  Payload ID: 8915
  Gene Symbol: KIAA0408
  Gene Name: KIAA0408
  Uniprot ID: Q6ZU52
  ENST ID: ENST00000483725
  CDS Start-End: 338-2422
gcagctttttgacttgtaaaagtggtgaaggtttcaaagggacttgtcagtactgctctgtggaatggttggacttattttgcatccccttttcttgtaaagaatcgagattcaccgagctgagacttttctctttaagacagctagccatccactttcttccactgctaattgaccagtggtcgagcatccataggatttctccccagtgtgaaaggctttattttaaaggcaagtgagactgcttcaaataaaacaacttcaagcttccaagaaacagttaagaggaggcagagaagagcagaaacacttctttgctgacacttacactgttgccatggacctacataagcagtgggagaacacagagactaactggcataaggaaaagatggaattactggaccagtttgacaatgaaagaaaggaatgggaaagtcaatggaagattatgcagaagaaaatagaagagctttgccgggaagtaaagctttggaggaaaatcaatatcaatgaaagtgctaagatcattgatctttaccatgagaagaccattccagagaaagtgatagaatcttccccaaattaccccgatttaggacaaagtgaatttataaggacgaatcacaaagatggtctgagaaaagaaaataaaagagagcagagcttagtcagtggaggaaatcaaatgtgtaaggaacaaaaagcaacaaaaaaatcaaaagtagggtttttggatcctttggctacagacaaccaaaaggaatgtgaggcctggcctgacctgaggacttctgaggaagacagcaagagctgttctggcgccctcagtacagctcttgaagaacttgcgaaggtgagtgaagaattatgcagctttcaagaggaaattcgaaagcggtctaaccatagaaggatgaagtcagattcttttctccaggaaatgccaaatgtaactaatatacctcatggggaccccatgatcaacaatgaccagtgcattcttccaatcagtttagaaaaagaaaaacagaaaaacaggaagaatctgagctgtaccaatgtgctccagagcaattctacgaaaaaatgtggaattgatacaatcgatttaaaaagaaatgaaactccaccagttcctcctccaagaagcacctctcgaaattttcccagctcggattctgaacaagcctatgaaagatggaaggaaaggttagaccacaacagctgggtgccccatgagggtcgaagtaaaaggaattacaaccctcacttccctttgagacaacaagagatgtctatgttgtatccaaatgaagggaaaacttcgaaagatggtatcatcttttcctctttggtaccagaagtcaaaatagatagcaagcctccaagtaatgaagatgttggacttagcatgtggtcatgtgacattgggataggtgcaaaaaggagcccctctacttcgtggtttcagaaaacctgctctacccccagtaatccaaaatatgaaatggtgatcccagatcaccctgctaaatctcatcctgatcttcatgtaagtaatgactgtagctcctcagtagcagagagcagtagcccacttagaaatttcagttgtggctttgaaaggactacaaggaatgagaagctggcagcaaagactgatgaatttaacagaactgtatttagaacagatagaaattgtcaggcaatacagcaaaatcacagctgctcaaaatcatcggaggatctcaagccctgtgatacctcatctactcacacaggtagcatatcacaaagtaacgatgtgtccggtatttggaaaaccaatgcccacatgcctgtgcccatggaaaatgtgcctgataatcccaccaagaaatccacaacaggcctagtaagacaaatgcagggacacctaagtcctcgcagttatcgaaatatgctccacgagcatgactggagaccgagtaatttgtctggccgtccgaggtcagctgatcccaggtcaaattatggtgttgtggaaaagctgctgaaaacctatgagacagcaacagagtctgcattgcaaaattctaagtgcttccaggataattggaccaaatgtaattctgatgtcagtggtggtgccacattaagtcagcatttagaaatgctccaaatggaacaacagtttcagcaaaagacagctgtgtgggggggacaggaagtgaagcaaggaatagatccgaaaaagataacagaggaatccatgtcagtgaacgcctcacatggaaaaggattttcccgacctgctagaccagcaaatcgtcgtctcccctccagatgggcatccagatctccatctgcaccccctgccttgcggagaactacccacaactataccatttctctgcgatccgaagcattgatggtttaagtctttggcctggattgctatattacagaagttctagtcccacttgtcaaacagagcattctgagtgtttacaggcggacctgttctcttccgacaagcaatttgaatcttaactttccatcagtcttcagtgtttttaatctaaggaataattatcttcctgcattttgatttcttagatcagaattttttaatgccatcctcattagttttccaatacaatataagttgaaacaatgtacaatattgtatattctttgttgcaagtggcagaaagtaaggttatgtgcatggccatgtgtttgtaggtgcatgtgttgaaataggaagtatcctagtatgtatttagatatgaaaaacttatgtgctagtgttgactttgaaattataacatgtatacctatatattctttgtgtttatttaaaagttttgaaaatatgcagtactgtttatattttgtataccttttaataggtatccacttaaggcatttgcagtacaaatattaattgaccacttccttggcccccagctacaatgaaaaagaagaattatgcacacatctaacattggtagatttctaaagacaactcataaataatttcttaacccatataaggataaaataataccattgatattcttgtttattctttttaaataaaaatgtcacaagtttaatagatcagccttgtaaagcaagcataaaatgttcataaatgttttatatattatttggtagtctagtatggctttaactgaatatttgatcctcagagacagtatcatgagactgcattataaatgacatgattaaatgatgaatttattttgtcagcctcagcaacaaacatttcctaa

SEQ ID NO: 145816 - DNA, 3449 bp, Homo sapiens
  Payload ID: 8915
  Gene Symbol: KIAA0408
  Gene Name: KIAA0408
  ENST ID: ENST00000465254
  CDS Start-End: 1-267
agctcctcagtagcagagagcagtagcccacttagaaatttcagttgtggctttgaaaggactacaaggaatgagaagctggcagcaaagactgatgaatttaacagaactgtatttagaacagatagaaattgtcaggcaatacagcaaaatcacagctgctcaaaatcatcggaggatctcaagccctgtgatacctcatctactcacacaggaatccatgtcagtgaacgcctcacatggaaaaggattttcccgacctgctagaccagcaaatcgtcgtctcccctccagatgggcatccagatctccatctgcaccccctgccttgcggagaactacccacaactataccatttctctgcgatccgaagcattgatggtttaagtctttggcctggattgctatattacagaagttctagtcccacttgtcaaacagagcattctgagtgtttacaggcggacctgttctcttccgacaagcaatttgaatcttaactttccatcagtcttcagtgtttttaatctaaggaataattatcttcctgcattttgatttcttagatcagaattttttaatgccatcctcattagttttccaatacaatataagttgaaacaatgtacaatattgtatattctttgttgcaagtggcagaaagtaaggttatgtgcatggccatgtgtttgtaggtgcatgtgttgaaataggaagtatcctagtatgtatttagatatgaaaaacttatgtgctagtgttgactttgaaattataacatgtatacctatatattctttgtgtttatttaaaagttttgaaaatatgcagtactgtttatattttgtataccttttaataggtatccacttaaggcatttgcagtacaaatattaattgaccacttccttggcccccagctacaatgaaaaagaagaattatgcacacatctaacattggtagatttctaaagacaactcataaataatttcttaacccatataaggataaaataataccattgatattcttgtttattctttttaaataaaaatgtcacaagtttaatagatcagccttgtaaagcaagcataaaatgttcataaatgttttatatattatttggtagtctagtatggctttaactgaatatttgatcctcagagacagtatcatgagactgcattataaatgacatgattaaatgatgaatttattttgtcagcctcagcaacaaacatttcctaaatgggatgcaaaaagaaactgaatgatgttgaattttagtttttctttaagttgtggtaagcttttagtttagctgctttaacatggagtcatacatacttagaggtaagtcatttattatttttttcctttttctaatcttttccttaaaattaatagataacaaactaagttacttttttactaacaaggaagatcaggaataatatttctttgaaagctgaaattatacttctcacagtttgctaccgaaaaaaggcttaaactaaaccttgacatccacagtagcatcaggaatagaaatgtgtattttggctacagtttgcatacagtgaacacataaaatctatattgaaaactgacagaaatatgaatgtcgaggggcttggaattctaaatggaagattttagaaggaactttgctctctactgtcactatataaaaccaattatgttatgttattagatattaactctatttaagcttttcttttactaagaaattcttatgccaaatgtattccaagagccatctccttatgatgtatttgaaccatttagagaaattcacttcattgtaccccatgacctgaggtaaagaaaataattttcaaattgcagacttccttgaaaggctcaagactgtagcatggtgatgtctagattcatactttactgtaaggacagtttcggtagttaagtggaattaaaggtctagagtgatttgtattggatggtaactaaggtctatacatctactcttttaattcttatttccttcaggaagatccttttccacaggaagctatcaaagaaaagtaaactagacaccaagtaatatcactctcataatatgctttccagctagaggggagaaaacaccaggaaagaggaaccctgggtcataaaatgacggacctgttaggaaaatgctgttgtgtgacaatggagagcctgcccaaggactgtgcaacctatctgttcctctccaccagtgtatcccaagtagtctggtatgatctgtggttccttagaatattgaggatctctttaaaaaatgaaatttctgatctcaccccatattactaaagcaaaatttccaggggtagggactgggactccagaaccattaataaaacaaaacaaaacaaagcaaaatattgatgatcaggcagatttgaaaacagtgacattgcttgatctctgaatggatggatgcccttgggtggtcacttttcttcctaggacttgcctttgttatctgtaaattagaatggctatactttcagacttcacaattttaagccacttttttctattaacagttgaatgaaccagtgggacacattttaacgtcttcttatgttgactaaaattatagttagagctgagaaaaaaaaaatagcatctagtccaactccttgattgtaaaactgaaaaactaaggttatttgaatgttctgttttctctttttaaatattttataacttttaaatggaaaaacctattaggtaaatggaaataatccttgaaaatagtttttgatgttttgtgatttttaactggtaaatttctactttaggtgggcattttcttccctagaatatgccctttattatgctatcattgctagatttaaagggacttgtaagcatttctggaaatatttgatttaaaaacatatattaatagatgttttccctagcagacttttggagcaaaaatattattttagttcagcagaggattactgatattatgggctgatctcagaaaggaataaggatgaggcagagaggagtacttgagtttgtgtgtgtgtgtgtgtgtgtgtgtttgtgtcagtgtcacataagttctccatattgccttatgtcccaaagccaaatataaaaatataaatgatgctttgtataattcattttatcaaaaattacccataactttcatttgtttttatatcgacaatgaagatgatcatatttcattttgcagatgtggccataaaatattatttacttctatataggtgattttaccaggtttagttatcctgagaaaacatctggacttaagagtttctgcttccctacaaagatctttaaagttatttttaggcacatttgtgacaaacaactacttgatattgaaatctccttcagccattagaagctatcaaataaagtaggtgtaaaaac

SEQ ID NO: 145817 - DNA, 7743 bp, Homo sapiens
  Payload ID: 8916
  Gene Symbol: KIAA0430
  Gene Name: KIAA0430
  Uniprot ID: Q9Y4F3
  ENST ID: ENST00000396368
  CDS Start-End: 208-5436
gggcggtgcggtgcggaagcggaagtgaagggtgcgcttggcggcggcggcgggagctgcggagtcgggaatcaaaacaaagggcctggggggggcggggggaaggcggcggggccggaatgtgagcggaggtggagccggcggcagagggtggaagaatgaaagaaaagaaagatgaaaggatgttgaatcactttgcatggctgtatgatggaaggaaacggaactgagaactcctgcagtagaacacgtggatggcttcaacaagataatgatgctaagccatggctttggaaattctctaattgcttttctcgtcctgagcagacgctgccacatagtccccaaacgaaagagtacatggagaacaagaaagttgctgtggaactaaaggatgtaccatcaccccttcatgctggctctaagctttttccagcagtcccacttcctgatattcgttctcttcagcagcctaaaatacagctttcttctgtccccaaagtaagctgctgtgctcattgccctaatgaaccctccacttcgccaatgcgttttggtggtggtggtggcggtagcggaggtaccagtagcttgattcacccgggcgcactgttagactcgcaaagcaccaggacaatcacgtgtcaggtagggtcagggtttgctttccagtctgcatcttcactccagaatgcctcagctaggaacaatttggcaggcattgcaagtgactttcccagcatgtgtctagagagtaacctgtcttcctgcaaacacctgccctgttgtggaaaactccacttccagtcatgtcatggtaatgtgcacaagctgcatcagtttccgagtctgcagggctgcacctccgctggctatttcccctgttctgatttcacaagcggggctccagggcatttggaagagcacatttcacagtcggagctaacgcctcacttgtgcaccaactctttgcaccttaatgtggtacctccggtttgtttaaagggctcactttactgcgaagactgtctaaacaagccagcaagaaatagcataatcgatgcggctaaagtctggccaaatataccacctccaaatactcaacctgcacctcttgctgtccctctgtgtaatggctgtggaaccaaaggaacagggaaggagaccacgttgttattggcgaccagtctaggcaaagctgcttcaaaatttgggtcaccagaagttgcagtagctggacaggtgctagaaaacttaccccccattggagttttttgggatattgaaaactgctccgttccctctggccggtcagcaactgctgttgtgcaaagaatccgtgagaagttttttaaaggccacagagaagcagaattcatctgtgtatgtgacatcagtaaagaaaacaaggaagttattcaagagctgaataattgccaggtaaccgttgcccacatcaatgctactgcaaagaatgccgctgatgataaactgcggcagagtctccgcagatttgcaaatacacacactgctccagccacagtggttcttgtgtcaactgatgtcaattttgcattggaacttagtgacctgagacacaggcatggtttccacattattttggtccataaaaaccaggcctcagaagcactgctgcatcatgctaacgagctgatcagatttgaagagttcatttccgacttgccccccaggttaccactaaaaatgccacagtgccacactctgctctatgtttataacctaccagcaaataaggatggcaagagcgtcagcaacaggctcagacgcctgtccgataattgtggtgggaaagtgctgagtatcacaggctgcagtgcaattctccgcttcataaaccaagatagtgcagagcgcgctcagaagcgaatggaaaacgaagatgtctttggtaataggatcattgtgtcatttactccaaaaaatagagaactctgtgaaacaaagagttcaaatgcaattgctgataaagtgaagtctcccaaaaaacttaagaatccaaaattgtgcctcatcaaagatgcaagtgaacaatcttccagtgccaaagccacgcctggaaaagggtcacaggcaaattctggatctgctacaaaaaatacaaatgttaaaagtttacaggagctgtgccgcatggagtcaaaaactggtcatagaaacagtgagcaccagcaaggtcacctgaggctggtcgtacccactcacggtaactcaagtgctgcagtgtcgacgccgaaaaactcgggggtggcagaacccgtttacaaaaccagtcagaaaaaggagaacctcagtgcccgaagtgttaccagttctcctgtagagaaaaaagataaagaggagactgtattccaagtgagttacccgtctgcttttagcaagttagttgcatccaggcaagtcagtcctctgctcgcatctcagtcttggtcttctaggagtatgtctccaaaccttttaaacagagcatccccgcttgctttcaacattgcaaattcgagcagcgaagccgactgcccagacccatttgcaaatggtgctgatgtccaagtcagcaacatagactacagattatcccggaaggagctgcagcagctcctgcaggaagcatttgccaggcatggcaaggtgaagagtgttgagctcagcccccatacagattatcaactcaaggctgttgtgcaaatggaaaacttacaagatgcgatcggtgcagtgaatagcctccacagatacaaaattggcagcaaaaagatcctggtctcacttgccaccggggctgccagcaaatcactctctttactgagtgcagaaacaatgtctgttcttcaggatgcccctgcctgttgcctgcctctgtttaaatttacagatatctatgaaaaaaagtttggacacaagttgaatgtgtcagatctatataaattaacagacacggtcgcaatccgtgaacaaggaaacggacggctggtgtgtctcctacccagcagtcaggcccgccagagccccttggggtcttcccagtcacacgacggctcctccacgaattgcagcccaattatatttgaagagttagaatatcacgagcctgtctgcagacagcattgttccaataaggatttcagcgaacatgaatttgatccagactcttacaagattccttttgtgattctttctttgaagacatttgcgccccaggttcacagtcttctccagacccacgagggcaccgtgcctttattgagctttccagattgttacattgcagagtttggcgatctagaagtagtgcaagaaaaccaaggaggtgttcccttagaacacttcattacctgtgttccaggtgtaaacattgccactgctcagaatggcatcaaagtggttaaatggattcacaacaagcccccgcctcccaacactgacccttggcttctgcgttcgaagagtcctgtaggtaacccccagctgatccagttcagtagagaagtgattgacttgctgaaaagccagccatcttgtgtcatacccatcagtcatttcatcccatcctatcaccatcattttgcaaagcagtgccgagtgtcagactacggatactccaagctgattgagttattagaagcagtgcctcatgtattgcagattcttggaatgggctccaaacgtctgctgacccttacccacagggcccaggtgaagcgctttactcaggatttactaaaacttctcaaatcccaggccagcaaacaggtcattgtgagagaattctcacaggcttatcactggtgtttctcaaaggactgggatgtcactgaatatggtgtttgtgagttgattgacatcgtatcagagattccagacacaaccatctgcttgtcccaacaagataatgaaatggtgatttgtatccccaaaagagaacgcactcaggatgaaatagaaaggacaaaacagttctccaaggatgtcgttgatttgctgcgtcaccaaccccatttccggatgccctttaataaatttatcccttcttaccatcaccactttggccggcagtgcaaacttgcgtactatgggtttaccaaactacttgaactttttgaagccatacctgatactttacaagtattggaatgtggagaagaaaagatccttactctgacagaggtggagcggttcaaagctctagctgcccagtttgttaaactccttcggtcccaaaaagataactgccttatgatgacagatctccttacagaatatgctaaaacttttggttatacatttcgtctccaagactatgatgtcagttccatttcggctttaactcagaaactctgccatgtcgtgaaggttgccgatatagaatctggcagacagattcagctgatcaaccgaaagtctctgcgatctctcactgcccagttgctggtattgttgatgtcttgggaaggaaccacccatctttctgttgaggagctcaagagacattacgaaagtacccacaacactccccttaacccctgtgaatatggattcatgaccttgaccgaactgctgaagagcctgccatacttggttgaggttttcactaatgataagatggaagaatgtgtgaagctcacaagtctgtatttgtttgcaaagaatgtgcggtctttacttcatacttaccactaccagcagattttccttcatgagttttccatggcctataccaagtatgtcggagaaactctgcagcccaagacctacggccacagcagcgtggaggagctcttgggagcaattccacaggtggtctggataaaaggacatggtcataagagaattgtagtgttaaaaaatgacatgaaaagtcgtttgagttcactcagtctctcccctgccaatcatgaaaaccagccctcggagggcgagcgcatcctggaggtgcccgaatcgcacacagcctcggaactcaagcttggagctgacggcagtgggcccagtcacacagagcaggagcttctccgcctgaccgacgactcccccgtcgacctcctgtgtgcgcctgtcccctcgtgcctgccgtcccctcagctgagaccagaccccgttatcctccaatctgctgatctcattcagtttgaggagcgccctcaagagccttctgaaattatgattttaaaccaagaagaaaaaatggagattccaataccaggaaagagcaaaactctgacctctgactccagctcgtcctgcatctcagcagctgtccccgtgcctccctgcccctcctcggaaacctccgagtcactgctcagcaaggaccccgtggaaagcccggccaaaaagcaacccaaaaatagagtcaaattggcagccaacttttccttagcacctataaccaagctttaactcccatttggaatatagaattaggatgggaaaacactgtctgattctgcacacaaaagtgggtttcaaaaatacatccttttctgtgtcatgaaaaccccccgaagccattgacttcatcttacctgtgttctatcatgtttttcttttccattgaacacagctttgagctgaagtctttcttttcttcttcctttttctttcttttttcaattatttgaagaacttgtggcatttgttaaagaatccttaatatattttaccaaatttttagtaactattatgaaatacaatggtgttccaaaagaagaaagcactaaaaactcaactagcaggaagcggttttgcttccattgagccacgtcggtggtgtcatcctacatgtagcataatagagtctctcagcctttgcttactggtgtttccgacagtattaacccagtgcgtggcatgtctttgaagcaaagcctgtcccgctagcctgtgtgttcacacaccaaaggagaagggtaggcgaggggttcggagtgtattttcaggttggaatgtgaaggttcctggcttccatgtgacttgtaagtgtgccttgttttttatttaaactatgtctgtagttgacaaaagtggcttcatcacaaatttttttaaacgtttctactttggggttccatttaggagctttctagaaagttgaggatgtttgaagcttcccttctgtgttccagtttgatatgggttaggttaaggaaaaggagatggtctcgatgtcatggatttaaagtcagcatttggattacaacacacattattgtgtgtcgagaggcagcattggaaagagcctgattttctaaaatatgcatcaagtgcataaattacaaatcagagctgagtggggaggtgcttcagcagcagcgggatcaatacgatttccactgggaagagacaggaattctacctacacataggaaggccaaggttgatccacttaaccttgttattgtaattttaaagctggtatcggtagctgggaagctttatgtgtgtgtatgtcagctcagcatcttttaatcgtgtctgattttactctcgttacttctcgctgttggaagcatctctgggtttcttgtggcgtctggtgtggaatggccttcctctctaggtgcctgaggtgtccgctgacgggtggcctctcacccccctctagagaaacctgacatttacaatggattgtatttgtccggcaaaaaaggcggattcattcatagagcagaaagaacctgttggcgtaaggtcttccactagttagatggtttcttttggggaaatgtttatatttggtaacttctagaaagccagaaaatggactctgatttcatagcattttgataaaatgccacaaaataagggctatagagagatttttacaagtcagattttttgttccccaaatcttttaaatgaagccagtgactcccagttctcaacacatggccccagtcaagacagaacaccatggaaaaaaccctgtaagtattatggcactctccgaatcctcctgaaggcatttcctctacagacatagtgttacaggaagtgaaatgcaaatgtgcaattttttttaaaggagcttttaaacaaagtaataataattggtgttgagaacatcagttgccttattctaagatttcataaggctgagtttgcacgcttggacttcagttctgctagcatgtaaagagtggtggactttaaaaccgtaagaggtatcattacaagtcacctggaacagactcaaagaacaggttctttgggcaacagacaaagaagaatcaagttctgtgctgtcccgtgagtgtgtctgagtaccattcactggagttgctgcttaggtctgggacgtgtgtgtgactcttaacaattgctgtctgaaaatgagagagaagacttcggaagcacattgtgttcataatgtactccacaatggccagtccaattgctatctatttttttatccagaggcttaattaaatgatgtggtaaaatgatgtttgagcattaagacaatgtaattctttatttctgggtggaaagatataccggattaaatttatctgtttaaaaaaatgacaaaagttatcaccaaaaccccctttcccatcttgcactgtttgttttggattgggtttgggggaaagagatgtttttcttagttgtctactttgtttgaacacttttgttgtggttcaagtgctgttttgtgtgttgggaccaaacagttgtcaataaactttacaagcgagcatctat

SEQ ID NO: 145818 - DNA, 7105 bp, Homo sapiens
  Payload ID: 8916
  Gene Symbol: KIAA0430
  Gene Name: KIAA0430
  ENST ID: ENST00000540441
  CDS Start-End: 66-4799
ggcagagggtggaagaatgaaagaaaagaaagatgaaaggatgttgaatcactttgcatggctgtatgatggaaggaaacggaactgagaactcctgcagtagaacacgtggatggcttcaacaagataatgatgctaagccatggctttggaaattctctaattgcttttctcgtcctgagcagacgctgccacatagtccccaaacgaaagagtacatggagaacaagaaagttgctgtggaactaaaggatgtaccatcaccccttcatgctggctctaagctttttccagcagtcccacttcctgatattcgttctcttcagcagcctaaaatacagctttcttctgtccccaaagtaagctgctgtgctcattgccctaatgaaccctccacttcgccaatgcgttttggtggtggtggtggcggtagcggaggtaccagtagcttgattcacccgggcgcactgttagactcgcaaagcaccaggacaatcacgtgtcaggtagggtcagggtttgctttccagtctgcatcttcactccagaatgcctcagctaggaacaatttggcaggcattgcaagtgactttcccagcatgtgtctagagagtaacctgtcttcctgcaaacacctgccctgttgtggaaaactccacttccagtcatgtcatggtaatgtgcacaagctgcatcagtttccgagtctgcagggctgcacctccgctggctatttcccctgttctgatttcacaagcggggctccagggcatttggaagagcacatttcacagtcggagctaacgcctcacttgtgcaccaactctttgcaccttaatgtggtacctccggtttgtttaaagggctcactttactgcgaagactgtctaaacaagccagcaagaaatagcataatcgatgcggctaaagtctggccaaatataccacctccaaatactcaacctgcacctcttgctgtccctctgtgtaatggctgtggaaccaaaggaacagggaaggagaccacgttgttattggcgaccagtctaggcaaagctgcttcaaaatttgggtcaccagaagttgcagtagctggacaggtgctagaaaacttaccccccattggagttttttgggatattgaaaactgctccgttccctctggccggtcagcaactgctgttgtgcaaagaatccgtgagaagttttttaaaggccacagagaagcagaattcatctgtgtatgtgacatcagtaaagaaaacaaggaagttattcaagagctgaataattgccaggtaaccgttgcccacatcaatgctactgcaaagaatgccgctgatgataaactgcggcagagtctccgcagatttgcaaatacacacactgctccagccacagtggttcttgtgtcaactgatgtcaattttgcattggaacttagtgacctgagacacaggcatggtttccacattattttggtccataaaaaccaggcctcagaagcactgctgcatcatgctaacgagctgatcagatttgaagagttcatttccgacttgccccccaggttaccactaaaaatgccagagctgtgccgcatggagtcaaaaactggtcatagaaacagtgagcaccagcaaggtcacctgaggctggtcgtacccactcacggtaactcaagtgctgcagtgtcgacgccgaaaaactcgggggtggcagaacccgtttacaaaaccagtcagaaaaaggagaacctcagtgcccgaagtgttaccagttctcctgtagagaaaaaagataaagaggagactgtattccaagtgagttacccgtctgcttttagcaagttagttgcatccaggcaagtcagtcctctgctcgcatctcagtcttggtcttctagcgaagccgactgcccagacccatttgcaaatggtgctgatgtccaagtcagcaacatagactacagattatcccggaaggagctgcagcagctcctgcaggaagcatttgccaggcatggcaaggtgaagagtgttgagctcagcccccatacagattatcaactcaaggctgttgtgcaaatggaaaacttacaagatgcgatcggtgcagtgaatagcctccacagatacaaaattggcagcaaaaagatcctggtctcacttgccaccggggctgccagcaaatcactctctttactgagtgcagaaacaatgtctgttcttcaggatgcccctgcctgttgcctgcctctgtttaaatttacagatatctatgaaaaaaagtttggacacaagttgaatgtgtcagatctatataaattaacagacacggtcgcaatccgtgaacaaggaaacggacggctggtgtgtctcctacccagcagtcaggcccgccagagccccttggggtcttcccagtcacacgacggctcctccacgaattgcagcccaattatatttgaagagttagaatatcacgagcctgtctgcagacagcattgttccaataaggatttcagcgaacatgaatttgatccagactcttacaagattccttttgtgattctttctttgaagacatttgcgccccaggttcacagtcttctccagacccacgagggcaccgtgcctttattgagctttccagattgttacattgcagagtttggcgatctagaagtagtgcaagaaaaccaaggaggtgttcccttagaacacttcattacctgtgttccaggtgtaaacattgccactgctcagaatggcatcaaagtggttaaatggattcacaacaagcccccgcctcccaacactgacccttggcttctgcgttcgaagagtcctgtaggtaacccccagctgatccagttcagtagagaagtgattgacttgctgaaaagccagccatcttgtgtcatacccatcagtcatttcatcccatcctatcaccatcattttgcaaagcagtgccgagtgtcagactacggatactccaagctgattgagttattagaagcagtgcctcatgtattgcagattcttggaatgggctccaaacgtctgctgacccttacccacagggcccaggtgaagcgctttactcaggatttactaaaacttctcaaatcccaggccagcaaacaggtcattgtgagagaattctcacaggcttatcactggtgtttctcaaaggactgggatgtcactgaatatggtgtttgtgagttgattgacatcgtatcagagattccagacacaaccatctgcttgtcccaacaagataatgaaatggtgatttgtatccccaaaagagaacgcactcaggatgaaatagaaaggacaaaacagttctccaaggatgtcgttgatttgctgcgtcaccaaccccatttccggatgccctttaataaatttatcccttcttaccatcaccactttggccggcagtgcaaacttgcgtactatgggtttaccaaactacttgaactttttgaagccatacctgatactttacaagtattggaatgtggagaagaaaagatccttactctgacagaggtggagcggttcaaagctctagctgcccagtttgttaaactccttcggtcccaaaaagataactgccttatgatgacagatctccttacagaatatgctaaaacttttggttatacatttcgtctccaagactatgatgtcagttccatttcggctttaactcagaaactctgccatgtcgtgaaggttgccgatatagaatctggcagacagattcagctgatcaaccgaaagtctctgcgatctctcactgcccagttgctggtattgttgatgtcttgggaaggaaccacccatctttctgttgaggagctcaagagacattacgaaagtacccacaacactccccttaacccctgtgaatatggattcatgaccttgaccgaactgctgaagagcctgccatacttggttgaggttttcactaatgataagatggaagaatgtgtgaagctcacaagtctgtatttgtttgcaaagaatgtgcggtctttacttcatacttaccactaccagcagattttccttcatgagttttccatggcctataccaagtatgtcggagaaactctgcagcccaagacctacggccacagcagcgtggaggagctcttgggagcaattccacaggtggtctggataaaaggacatggtcataagagaattgtagtgttaaaaaatgacatgaaaagtcgtttgagttcactcagtctctcccctgccaatcatgaaaaccagccctcggagggcgagcgcatcctggaggtgcccgaatcgcacacagcctcggaactcaagcttggagctgacggcagtgggcccagtcacacagagcaggagcttctccgcctgaccgacgactcccccgtcgacctcctgtgtgcgcctgtcccctcgtgcctgccgtcccctcagctgagaccagaccccgttatcctccaatctgctgatctcattcagtttgaggagcgccctcaagagccttctgaaattatgattttaaaccaagaagaaaaaatggagattccaataccaggaaagagcaaaactctgacctctgactccagctcgtcctgcatctcagcagctgtccccgtgcctccctgcccctcctcggaaacctccgagtcactgctcagcaaggaccccgtggaaagcccggccaaaaagcaacccaaaaatagagtcaaattggcagccaacttttccttagcacctataaccaagctttaactcccatttggaatatagaattaggatgggaaaacactgtctgattctgcacacaaaagtgggtttcaaaaatacatccttttctgtgtcatgaaaaccccccgaagccattgacttcatcttacctgtgttctatcatgtttttcttttccattgaacacagctttgagctgaagtctttcttttcttcttcctttttctttcttttttcaattatttgaagaacttgtggcatttgttaaagaatccttaatatattttaccaaatttttagtaactattatgaaatacaatggtgttccaaaagaagaaagcactaaaaactcaactagcaggaagcggttttgcttccattgagccacgtcggtggtgtcatcctacatgtagcataatagagtctctcagcctttgcttactggtgtttccgacagtattaacccagtgcgtggcatgtctttgaagcaaagcctgtcccgctagcctgtgtgttcacacaccaaaggagaagggtaggcgaggggttcggagtgtattttcaggttggaatgtgaaggttcctggcttccatgtgacttgtaagtgtgccttgttttttatttaaactatgtctgtagttgacaaaagtggcttcatcacaaatttttttaaacgtttctactttggggttccatttaggagctttctagaaagttgaggatgtttgaagcttcccttctgtgttccagtttgatatgggttaggttaaggaaaaggagatggtctcgatgtcatggatttaaagtcagcatttggattacaacacacattattgtgtgtcgagaggcagcattggaaagagcctgattttctaaaatatgcatcaagtgcataaattacaaatcagagctgagtggggaggtgcttcagcagcagcgggatcaatacgatttccactgggaagagacaggaattctacctacacataggaaggccaaggttgatccacttaaccttgttattgtaattttaaagctggtatcggtagctgggaagctttatgtgtgtgtatgtcagctcagcatcttttaatcgtgtctgattttactctcgttacttctcgctgttggaagcatctctgggtttcttgtggcgtctggtgtggaatggccttcctctctaggtgcctgaggtgtccgctgacgggtggcctctcacccccctctagagaaacctgacatttacaatggattgtatttgtccggcaaaaaaggcggattcattcatagagcagaaagaacctgttggcgtaaggtcttccactagttagatggtttcttttggggaaatgtttatatttggtaacttctagaaagccagaaaatggactctgatttcatagcattttgataaaatgccacaaaataagggctatagagagatttttacaagtcagattttttgttccccaaatcttttaaatgaagccagtgactcccagttctcaacacatggccccagtcaagacagaacaccatggaaaaaaccctgtaagtattatggcactctccgaatcctcctgaaggcatttcctctacagacatagtgttacaggaagtgaaatgcaaatgtgcaattttttttaaaggagcttttaaacaaagtaataataattggtgttgagaacatcagttgccttattctaagatttcataaggctgagtttgcacgcttggacttcagttctgctagcatgtaaagagtggtggactttaaaaccgtaagaggtatcattacaagtcacctggaacagactcaaagaacaggttctttgggcaacagacaaagaagaatcaagttctgtgctgtcccgtgagtgtgtctgagtaccattcactggagttgctgcttaggtctgggacgtgtgtgtgactcttaacaattgctgtctgaaaatgagagagaagacttcggaagcacattgtgttcataatgtactccacaatggccagtccaattgctatctatttttttatccagaggcttaattaaatgatgtggtaaaatgatgtttgagcattaagacaatgtaattctttatttctgggtggaaagatataccggattaaatttatctgtttaaaaaaatgacaaaagttatcaccaaaaccccctttcccatcttgcactgtttgttttggattgggtttgggggaaagagatgtttttcttagttgtctactttgtttgaacacttttgttgtggttcaagtgctgttttgtgtgttgggaccaaacagttgtcaataaactttacaagcgagcatcta

SEQ ID NO: 145819 - DNA, 581 bp, Homo sapiens
  Payload ID: 8916
  Gene Symbol: KIAA0430
  Gene Name: KIAA0430
  ENST ID: ENST00000549219
  CDS Start-End: 89-581
gcatttgtgtcttttggacttctctgagcgggtggaagaatgaaagaaaagaaagatgaaaggatgttgaatcactttgcatggctgtatgatggaaggaaacggaactgagaactcctgcagtagaacacgtggatggcttcaacaagataatgatgctaagccatggctttggaaattctctaattgcttttctcgtcctgagcagacgctgccacatagtccccaaacgaaagagtacatggagaacaagaaagttgctgtggaactaaaggatgtaccatcaccccttcatgctggctctaagctttttccagcagtcccacttcctgatattcgttctcttcagcagcctaaaatacagctttcttctgtccccaaagtaagctgctgtgctcattgccctaatgaaccctccacttcgccaatgcgttttggtggtggtggtggcggtagcggaggtaccagtagcttgattcacccgggcgcactgttagactcgcaaagcaccaggacaatcacgtgtcaggtagggtcagggtttgctttccagtctgcatcttcactccagaatgcctcag

SEQ ID NO: 145820 - DNA, 600 bp, Homo sapiens
  Payload ID: 8916
  Gene Symbol: KIAA0430
  Gene Name: KIAA0430
  ENST ID: ENST00000551878
  CDS Start-End: 1-59
cctcggaactcaagcttggagctgacggcagtggcttagaaggaaaacttcaggtgtgagcccagggtgtgtgctgggggtgggcgtggaggtcctgtggtgtcacggccctccttgtttgcccagggcccagtcacacagagcaggagcttctccgcctgaccgacgactcccccgtcgacctcctgtgtgcgcctgtcccctcgtgcctgccgtcccctcagctgagaccagaccccgttatcctccaatctgctgatctcattcagtttgaggagcgccctcaagagccttctgaaattatgattttaaaccaagaagaaaaaatggagattccaataccaggaaagagcaaaactctgacctctgactccagctcgtcctgcatctcagcagctgtccccgtgcctccctgcccctcctcggaaacctccgagtcactgctcagcaaggaccccgtggaaagcccggccaaaaagcaacccaaaaatagagtcaaattggcagccaacttttccttagcacctataaccaagctttaactcccatttggaatatagaattaggatgggaaaacactgtctgattctgcacacaaaa

SEQ ID NO: 145821 - DNA, 5053 bp, Homo sapiens
  Payload ID: 8916
  Gene Symbol: KIAA0430
  Gene Name: KIAA0430
  ENST ID: ENST00000552553
  CDS Start-End: 1-3114
atgatggaaggaaacggaactgagaactcctgcagtagaacacgtggatggcttcaacaagataatgatgctaagccatggctttggaaattctctaattgcttttctcgtcctgagcagacgctgccacatagtccccaaacgaaagagtacatggagaacaagaaagttgctgtggaactaaaggatgtaccatcaccccttcatgctggctctaagctttttccagcagtcccacttcctgatattcgttctcttcagcagcctaaaatacagctttcttctgtccccaaagtaagctgctgtgctcattgccctaatgaaccctccacttcgccaatgcgttttggtggtggtggtggcggtagcggaggtaccagtagcttgattcacccgggcgcactgttagactcgcaaagcaccaggacaatcacgtgtcaggtagggtcagggtttgctttccagtctgcatcttcactccagaatgcctcagctaggaacaatttggcaggcattgcaagtgactttcccagcatgtgtctagagagtaacctgtcttcctgcaaacacctgccctgttgtggaaaactccacttccagtcatgtcatggtaatgtgcacaagctgcatcagtttccgagtctgcagggctgcacctccgctggctatttcccctgttctgatttcacaagcggggctccagggcatttggaagagcacatttcacagtcggagctaacgcctcacttgtgcaccaactctttgcaccttaatgtggtacctccggtttgtttaaagggctcactttactgcgaagactgtctaaacaagccagcaagaaatagcataatcgatgcggctaaagtctggccaaatataccacctccaaatactcaacctgcacctcttgctgtccctctgtgtaatggctgtggaaccaaaggaacagggaaggagaccacgttgttattggcgaccagtctaggcaaagctgcttcaaaatttgggtcaccagaagttgcagtagctggacaggtgctagaaaacttaccccccattggagttttttgggatattgaaaactgctccgttccctctggccggtcagcaactgctgttgtgcaaagaatccgtgagaagttttttaaaggccacagagaagcagaattcatctgtgtatgtgacatcagtaaagaaaacaaggaagttattcaagagctgaataattgccaggtaaccgttgcccacatcaatgctactgcaaagaatgccgctgatgataaactgcggcagagtctccgcagatttgcaaatacacacactgctccagccacagtggttcttgtgtcaactgatgtcaattttgcattggaacttagtgacctgagacacaggcatggtttccacattattttggtccataaaaaccaggcctcagaagcactgctgcatcatgctaacgagctgatcagatttgaagagttcatttccgacttgccccccaggttaccactaaaaatgccacagtgccacactctgctctatgtttataacctaccagcaaataaggatggcaagagcgtcagcaacaggctcagacgcctgtccgataattgtggtgggaaagtgctgagtatcacaggctgcagtgcaattctccgcttcataaaccaagatagtgcagagcgcgctcagaagcgaatggaaaacgaagatgtctttggtaataggatcattgtgtcatttactccaaaaaatagagaactctgtgaaacaaagagttcaaatgcaattgctgataaagtgaagtctcccaaaaaacttaagaatccaaaattgtgcctcatcaaagatgcaagtgaacaatcttccagtgccaaagccacgcctggaaaagggtcacaggcaaattctggatctgctacaaaaaatacaaatgttaaaagtttacaggagctgtgccgcatggagtcaaaaactggtcatagaaacagtgagcaccagcaaggtcacctgaggctggtcgtacccactcacggtaactcaagtgctgcagtgtcgacgccgaaaaactcgggggtggcagaacccgtttacaaaaccagtcagaaaaaggagaacctcagtgcccgaagtgttaccagttctcctgtagagaaaaaagataaagaggagactgtattccaagtgagttacccgtctgcttttagcaagttagttgcatccaggcaagtcagtcctctgctcgcatctcagtcttggtcttctaggagtatgtctccaaaccttttaaacagagcatccccgcttgctttcaacattgcaaattcgagcagcgaagccgactgcccagacccatttgcaaatggtgctgatgtccaagtcagcaacatagactacagattatcccggaaggagctgcagcagctcctgcaggaagcatttgccaggcatggcaaggtgaagagtgttgagctcagcccccatacagattatcaactcaaggctgttgtgcaaatggaaaacttacaagatgcgatcggtgcagtgaatagcctccacagatacaaaattggcagcaaaaagatcctggtctcacttgccaccggggctgccagcaaatcactctctttactgagtgcagaaacaatgtctgttcttcaggatgcccctgcctgttgcctgcctctgtttaaatttacagatatctatgaaaaaaagtttggacacaagttgaatgtgtcagatctatataaattaacagacacggtcgcaatccgtgaacaaggaaacggacggctggtgtgtctcctacccagcagtcaggcccgccagagccccttggggtcttcccagtcacacgacggctcctccacgaattgcagcccaattatatttgaagagttagaatatcacgagcctgtctgcagacagcattgttccaataaggatttcagcgaacatgaatttgatccagactcttacaagattccttttgtgattctttctttgaagacatttgcgccccaggttcacagtcttctccagacccacgagggcaccgtgcctttattgagacccttggcttctgcgttcgaagagtcctgtaggtaacccccagctgatccagttcagtagagaagtgattgacttgctgaaaagccagccatcttgtgtcatacccatcagtcatttcatcccatcctatcaccatcattttgcaaagcagtgccgagtgtcagactacggatactccaagctgattgagttattagaagcagtgcctcatgtattgcagattcttggaatgggctccaaacgtctgctgacccttacccacagggcccaggtgaagcgctttactcaggatttactaaaacttctcaaatcccaggccagcaaacaggtcattgtgagagaattctcacaggcttatcactggtgtttctcaaaggactgggatgtcactgaatatggtgtttgtgagttgattgacatcgtatcagagattccagacacaaccatctgcttgtcccaacaagataatgaaatggtgatttgtatccccaaaagagaacgcactcaggatgaaatagaaaggacaaaacagttctccaaggatgtcgttgatttgctgcgtcaccaaccccatttccggatgccctttaataaatttatcccttcttaccatcaccactttggccggcagtgcaaacttgcgtactatgggtttaccaaactacttgaactttttgaagccatacctgatactttacaagtattggaatgtggagaagaaaagatccttactctgacagaggtggagcggttcaaagctctagctgcccagtttgttaaactccttcggtcccaaaaagataactgccttatgatgacagatctccttacagaatatgctaaaacttttggttatacatttcgtctccaagactatgatgtcagttccatttcggctttaactcagaaactctgccatgtcgtgaaggttgccgatatagaatctggcagacagattcagctgatcaaccgaaagtctctgcgatctctcactgcccagttgctggtattgttgatgtcttgggaaggaaccacccatctttctgttgaggagctcaagagacattacgaaagtacccacaacactccccttaacccctgtgaatatggattcatgaccttgaccgaactgctgaagagcctgccatacttggttgaggttttcactaatgataagatggaagaatgtgtgaagctcacaagtctgtatttgtttgcaaagaatgtgcggtctttacttcatacttaccactaccagcagattttccttcatgagttttccatggcctataccaagtatgtcggagaaactctgcagcccaagacctacggccacagcagcgtggaggagctcttgggagcaattccacaggtggtctggataaaaggacatggtcataagagaattgtagtgttaaaaaatgacatgaaaagtcgtttgagttcactcagtctctcccctgccaatcatgaaaaccagccctcggagggcgagcgcatcctggaggtgcccgaatcgcacacagcctcggaactcaagcttggagctgacggcagtgggcccagtcacacagagcaggagcttctccgcctgaccgacgactcccccgtcgacctcctgtgtgcgcctgtcccctcgtgcctgccgtcccctcagctgagaccagaccccgttatcctccaatctgctgatctcattcagtttgaggagcgccctcaagagccttctgaaattatgattttaaaccaagaagaaaaaatggagattccaataccaggaaagagcaaaactctgacctctgactccagctcgtcctgcatctcagcagctgtccccgtgcctccctgcccctcctcggaaacctccgagtcactgctcagcaaggaccccgtggaaagcccggccaaaaagcaacccaaaaatagagtcaaattggcagccaacttttccttagcacctataaccaagctttaa

SEQ ID NO: 145822 - DNA, 5891 bp, Homo sapiens
  Payload ID: 8916
  Gene Symbol: KIAA0430
  Gene Name: KIAA0430
  Uniprot ID: Q9Y4F3
  ENST ID: ENST00000548025
  CDS Start-End: 150-5369
gcggagtcgggaatcaaaacaaagggcctggggggggcggggggaaggcggcggggccggaatgtgagcggaggtggagccggcggcagagggtggaagaatgaaagaaaagaaagatgaaaggatgttgaatcactttgcatggctgtatgatggaaggaaacggaactgagaactcctgcagtagaacacgtggatggcttcaacaagataatgatgctaagccatggctttggaaattctctaattgcttttctcgtcctgagcagacgctgccacatagtccccaaacgaaagagtacatggagaacaagaaagttgctgtggaactaaaggatgtaccatcaccccttcatgctggctctaagctttttccagcagtcccacttcctgatattcgttctcttcagcagcctaaaatacagctttcttctgtccccaaagtaagctgctgtgctcattgccctaatgaaccctccacttcgccaatgcgttttggtggtggtggtggcggtagcggaggtaccagtagcttgattcacccgggcgcactgttagactcgcaaagcaccaggacaatcacgtgtcaggtagggtcagggtttgctttccagtctgcatcttcactccagaatgcctcagctaggaacaatttggcaggcattgcaagtgactttcccagcatgtgtctagagagtaacctgtcttcctgcaaacacctgccctgttgtggaaaactccacttccagtcatgtcatggtaatgtgcacaagctgcatcagtttccgagtctgcagggctgcacctccgctggctatttcccctgttctgatttcacaagcggggctccagggcatttggaagagcacatttcacagtcggagctaacgcctcacttgtgcaccaactctttgcaccttaatgtggtacctccggtttgtttaaagggctcactttactgcgaagactgtctaaacaagccagcaagaaatagcataatcgatgcggctaaagtctggccaaatataccacctccaaatactcaacctgcacctcttgctgtccctctgtgtaatggctgtggaaccaaaggaacagggaaggagaccacgttgttattggcgaccagtctaggcaaagctgcttcaaaatttgaagttgcagtagctggacaggtgctagaaaacttaccccccattggagttttttgggatattgaaaactgctccgttccctctggccggtcagcaactgctgttgtgcaaagaatccgtgagaagttttttaaaggccacagagaagcagaattcatctgtgtatgtgacatcagtaaagaaaacaaggaagttattcaagagctgaataattgccaggtaaccgttgcccacatcaatgctactgcaaagaatgccgctgatgataaactgcggcagagtctccgcagatttgcaaatacacacactgctccagccacagtggttcttgtgtcaactgatgtcaattttgcattggaacttagtgacctgagacacaggcatggtttccacattattttggtccataaaaaccaggcctcagaagcactgctgcatcatgctaacgagctgatcagatttgaagagttcatttccgacttgccccccaggttaccactaaaaatgccacagtgccacactctgctctatgtttataacctaccagcaaataaggatggcaagagcgtcagcaacaggctcagacgcctgtccgataattgtggtgggaaagtgctgagtatcacaggctgcagtgcaattctccgcttcataaaccaagatagtgcagagcgcgctcagaagcgaatggaaaacgaagatgtctttggtaataggatcattgtgtcatttactccaaaaaatagagaactctgtgaaacaaagagttcaaatgcaattgctgataaagtgaagtctcccaaaaaacttaagaatccaaaattgtgcctcatcaaagatgcaagtgaacaatcttccagtgccaaagccacgcctggaaaagggtcacaggcaaattctggatctgctacaaaaaatacaaatgttaaaagtttacaggagctgtgccgcatggagtcaaaaactggtcatagaaacagtgagcaccagcaaggtcacctgaggctggtcgtacccactcacggtaactcaagtgctgcagtgtcgacgccgaaaaactcgggggtggcagaacccgtttacaaaaccagtcagaaaaaggagaacctcagtgcccgaagtgttaccagttctcctgtagagaaaaaagataaagaggagactgtattccaagtgagttacccgtctgcttttagcaagttagttgcatccaggcaagtcagtcctctgctcgcatctcagtcttggtcttctaggagtatgtctccaaaccttttaaacagagcatccccgcttgctttcaacattgcaaattcgagcagcgaagccgactgcccagacccatttgcaaatggtgctgatgtccaagtcagcaacatagactacagattatcccggaaggagctgcagcagctcctgcaggaagcatttgccaggcatggcaaggtgaagagtgttgagctcagcccccatacagattatcaactcaaggctgttgtgcaaatggaaaacttacaagatgcgatcggtgcagtgaatagcctccacagatacaaaattggcagcaaaaagatcctggtctcacttgccaccggggctgccagcaaatcactctctttactgagtgcagaaacaatgtctgttcttcaggatgcccctgcctgttgcctgcctctgtttaaatttacagatatctatgaaaaaaagtttggacacaagttgaatgtgtcagatctatataaattaacagacacggtcgcaatccgtgaacaaggaaacggacggctggtgtgtctcctacccagcagtcaggcccgccagagccccttggggtcttcccagtcacacgacggctcctccacgaattgcagcccaattatatttgaagagttagaatatcacgagcctgtctgcagacagcattgttccaataaggatttcagcgaacatgaatttgatccagactcttacaagattccttttgtgattctttctttgaagacatttgcgccccaggttcacagtcttctccagacccacgagggcaccgtgcctttattgagctttccagattgttacattgcagagtttggcgatctagaagtagtgcaagaaaaccaaggaggtgttcccttagaacacttcattacctgtgttccaggtgtaaacattgccactgctcagaatggcatcaaagtggttaaatggattcacaacaagcccccgcctcccaacactgacccttggcttctgcgttcgaagagtcctgtaggtaacccccagctgatccagttcagtagagaagtgattgacttgctgaaaagccagccatcttgtgtcatacccatcagtcatttcatcccatcctatcaccatcattttgcaaagcagtgccgagtgtcagactacggatactccaagctgattgagttattagaagcagtgcctcatgtattgcagattcttggaatgggctccaaacgtctgctgacccttacccacagggcccaggtgaagcgctttactcaggatttactaaaacttctcaaatcccaggccagcaaacaggtcattgtgagagaattctcacaggcttatcactggtgtttctcaaaggactgggatgtcactgaatatggtgtttgtgagttgattgacatcgtatcagagattccagacacaaccatctgcttgtcccaacaagataatgaaatggtgatttgtatccccaaaagagaacgcactcaggatgaaatagaaaggacaaaacagttctccaaggatgtcgttgatttgctgcgtcaccaaccccatttccggatgccctttaataaatttatcccttcttaccatcaccactttggccggcagtgcaaacttgcgtactatgggtttaccaaactacttgaactttttgaagccatacctgatactttacaagtattggaatgtggagaagaaaagatccttactctgacagaggtggagcggttcaaagctctagctgcccagtttgttaaactccttcggtcccaaaaagataactgccttatgatgacagatctccttacagaatatgctaaaacttttggttatacatttcgtctccaagactatgatgtcagttccatttcggctttaactcagaaactctgccatgtcgtgaaggttgccgatatagaatctggcagacagattcagctgatcaaccgaaagtctctgcgatctctcactgcccagttgctggtattgttgatgtcttgggaaggaaccacccatctttctgttgaggagctcaagagacattacgaaagtacccacaacactccccttaacccctgtgaatatggattcatgaccttgaccgaactgctgaagagcctgccatacttggttgaggttttcactaatgataagatggaagaatgtgtgaagctcacaagtctgtatttgtttgcaaagaatgtgcggtctttacttcatacttaccactaccagcagattttccttcatgagttttccatggcctataccaagtatgtcggagaaactctgcagcccaagacctacggccacagcagcgtggaggagctcttgggagcaattccacaggtggtctggataaaaggacatggtcataagagaattgtagtgttaaaaaatgacatgaaaagtcgtttgagttcactcagtctctcccctgccaatcatgaaaaccagccctcggagggcgagcgcatcctggaggtgcccgaatcgcacacagcctcggaactcaagcttggagctgacggcagtgggcccagtcacacagagcaggagcttctccgcctgaccgacgactcccccgtcgacctcctgtgtgcgcctgtcccctcgtgcctgccgtcccctcagctgagaccagaccccgttatcctccaatctgctgatctcattcagtttgaggagcgccctcaagagccttctgaaattatgattttaaaccaagaagaaaaaatggagattccaataccaggaaagagcaaaactctgacctctgactccagctcgtcctgcatctcagcagctgtccccgtgcctccctgcccctcctcggaaacctccgagtcactgctcagcaaggaccccgtggaaagcccggccaaaaagcaacccaaaaatagagtcaaattggcagccaacttttccttagcacctataaccaagctttaactcccatttggaatatagaattaggatgggaaaacactgtctgattctgcacacaaaagtgggtttcaaaaatacatccttttctgtgtcatgaaaaccccccgaagccattgacttcatcttacctgtgttctatcatgtttttcttttccattgaacacagctttgagctgaagtctttcttttcttcttcctttttctttcttttttcaattatttgaagaacttgtggcatttgttaaagaatccttaatatattttaccaaatttttagtaactattatgaaatacaatggtgttccaaaagaagaaagcactaaaaactcaactagcaggaagcggttttgcttccattgagccacgtcggtggtgtcatcctacatgtagcataatagagtctctcagcctttgcttactggtgtttccgacagtattaacccagtgcgtggcatgtctttgaagcaaagcctgtcccgctagcctgtgtgttcacacaccaaaggagaagggtaggcgaggggt

SEQ ID NO: 145823 - DNA, 5900 bp, Homo sapiens
  Payload ID: 8916
  Gene Symbol: KIAA0430
  Gene Name: KIAA0430
  Uniprot ID: Q9Y4F3
  ENST ID: ENST00000551742
  CDS Start-End: 150-5378
gcggagtcgggaatcaaaacaaagggcctggggggggcggggggaaggcggcggggccggaatgtgagcggaggtggagccggcggcagagggtggaagaatgaaagaaaagaaagatgaaaggatgttgaatcactttgcatggctgtatgatggaaggaaacggaactgagaactcctgcagtagaacacgtggatggcttcaacaagataatgatgctaagccatggctttggaaattctctaattgcttttctcgtcctgagcagacgctgccacatagtccccaaacgaaagagtacatggagaacaagaaagttgctgtggaactaaaggatgtaccatcaccccttcatgctggctctaagctttttccagcagtcccacttcctgatattcgttctcttcagcagcctaaaatacagctttcttctgtccccaaagtaagctgctgtgctcattgccctaatgaaccctccacttcgccaatgcgttttggtggtggtggtggcggtagcggaggtaccagtagcttgattcacccgggcgcactgttagactcgcaaagcaccaggacaatcacgtgtcaggtagggtcagggtttgctttccagtctgcatcttcactccagaatgcctcagctaggaacaatttggcaggcattgcaagtgactttcccagcatgtgtctagagagtaacctgtcttcctgcaaacacctgccctgttgtggaaaactccacttccagtcatgtcatggtaatgtgcacaagctgcatcagtttccgagtctgcagggctgcacctccgctggctatttcccctgttctgatttcacaagcggggctccagggcatttggaagagcacatttcacagtcggagctaacgcctcacttgtgcaccaactctttgcaccttaatgtggtacctccggtttgtttaaagggctcactttactgcgaagactgtctaaacaagccagcaagaaatagcataatcgatgcggctaaagtctggccaaatataccacctccaaatactcaacctgcacctcttgctgtccctctgtgtaatggctgtggaaccaaaggaacagggaaggagaccacgttgttattggcgaccagtctaggcaaagctgcttcaaaatttgggtcaccagaagttgcagtagctggacaggtgctagaaaacttaccccccattggagttttttgggatattgaaaactgctccgttccctctggccggtcagcaactgctgttgtgcaaagaatccgtgagaagttttttaaaggccacagagaagcagaattcatctgtgtatgtgacatcagtaaagaaaacaaggaagttattcaagagctgaataattgccaggtaaccgttgcccacatcaatgctactgcaaagaatgccgctgatgataaactgcggcagagtctccgcagatttgcaaatacacacactgctccagccacagtggttcttgtgtcaactgatgtcaattttgcattggaacttagtgacctgagacacaggcatggtttccacattattttggtccataaaaaccaggcctcagaagcactgctgcatcatgctaacgagctgatcagatttgaagagttcatttccgacttgccccccaggttaccactaaaaatgccatgccacactctgctctatgtttataacctaccagcaaataaggatggcaagagcgtcagcaacaggctcagacgcctgtccgataattgtggtgggaaagtgctgagtatcacaggctgcagtgcaattctccgcttcataaaccaagatagtgcagagcgcgctcagaagcgaatggaaaacgaagatgtctttggtaataggatcattgtgtcatttactccaaaaaatagagaactctgtgaaacaaagagttcaaatgcaattgctgataaagtgaagtctcccaaaaaacttaagaatccaaaattgtgcctcatcaaagatgcaagtgaacaatcttccagtgccaaagccacgcctggaaaagggtcacaggcaaattctggatctgctacaaaaaatacaaatgttaaaagtttacaggagctgtgccgcatggagtcaaaaactggtcatagaaacagtgagcaccagcaaggtcacctgaggctggtcgtacccactcacggtaactcaagtgctgcagtgtcgacgccgaaaaactcgggggtggcagaacccgtttacaaaaccagtcagaaaaaggagaacctcagtgcccgaagtgttaccagttctcctgtagagaaaaaagataaagaggagactgtattccaagtgagttacccgtctgcttttagcaagttagttgcatccaggcaagtcagtcctctgctcgcatctcagtcttggtcttctagcaggagtatgtctccaaaccttttaaacagagcatccccgcttgctttcaacattgcaaattcgagcagcgaagccgactgcccagacccatttgcaaatggtgctgatgtccaagtcagcaacatagactacagattatcccggaaggagctgcagcagctcctgcaggaagcatttgccaggcatggcaaggtgaagagtgttgagctcagcccccatacagattatcaactcaaggctgttgtgcaaatggaaaacttacaagatgcgatcggtgcagtgaatagcctccacagatacaaaattggcagcaaaaagatcctggtctcacttgccaccggggctgccagcaaatcactctctttactgagtgcagaaacaatgtctgttcttcaggatgcccctgcctgttgcctgcctctgtttaaatttacagatatctatgaaaaaaagtttggacacaagttgaatgtgtcagatctatataaattaacagacacggtcgcaatccgtgaacaaggaaacggacggctggtgtgtctcctacccagcagtcaggcccgccagagccccttggggtcttcccagtcacacgacggctcctccacgaattgcagcccaattatatttgaagagttagaatatcacgagcctgtctgcagacagcattgttccaataaggatttcagcgaacatgaatttgatccagactcttacaagattccttttgtgattctttctttgaagacatttgcgccccaggttcacagtcttctccagacccacgagggcaccgtgcctttattgagctttccagattgttacattgcagagtttggcgatctagaagtagtgcaagaaaaccaaggaggtgttcccttagaacacttcattacctgtgttccaggtgtaaacattgccactgctcagaatggcatcaaagtggttaaatggattcacaacaagcccccgcctcccaacactgacccttggcttctgcgttcgaagagtcctgtaggtaacccccagctgatccagttcagtagagaagtgattgacttgctgaaaagccagccatcttgtgtcatacccatcagtcatttcatcccatcctatcaccatcattttgcaaagcagtgccgagtgtcagactacggatactccaagctgattgagttattagaagcagtgcctcatgtattgcagattcttggaatgggctccaaacgtctgctgacccttacccacagggcccaggtgaagcgctttactcaggatttactaaaacttctcaaatcccaggccagcaaacaggtcattgtgagagaattctcacaggcttatcactggtgtttctcaaaggactgggatgtcactgaatatggtgtttgtgagttgattgacatcgtatcagagattccagacacaaccatctgcttgtcccaacaagataatgaaatggtgatttgtatccccaaaagagaacgcactcaggatgaaatagaaaggacaaaacagttctccaaggatgtcgttgatttgctgcgtcaccaaccccatttccggatgccctttaataaatttatcccttcttaccatcaccactttggccggcagtgcaaacttgcgtactatgggtttaccaaactacttgaactttttgaagccatacctgatactttacaagtattggaatgtggagaagaaaagatccttactctgacagaggtggagcggttcaaagctctagctgcccagtttgttaaactccttcggtcccaaaaagataactgccttatgatgacagatctccttacagaatatgctaaaacttttggttatacatttcgtctccaagactatgatgtcagttccatttcggctttaactcagaaactctgccatgtcgtgaaggttgccgatatagaatctggcagacagattcagctgatcaaccgaaagtctctgcgatctctcactgcccagttgctggtattgttgatgtcttgggaaggaaccacccatctttctgttgaggagctcaagagacattacgaaagtacccacaacactccccttaacccctgtgaatatggattcatgaccttgaccgaactgctgaagagcctgccatacttggttgaggttttcactaatgataagatggaagaatgtgtgaagctcacaagtctgtatttgtttgcaaagaatgtgcggtctttacttcatacttaccactaccagcagattttccttcatgagttttccatggcctataccaagtatgtcggagaaactctgcagcccaagacctacggccacagcagcgtggaggagctcttgggagcaattccacaggtggtctggataaaaggacatggtcataagagaattgtagtgttaaaaaatgacatgaaaagtcgtttgagttcactcagtctctcccctgccaatcatgaaaaccagccctcggagggcgagcgcatcctggaggtgcccgaatcgcacacagcctcggaactcaagcttggagctgacggcagtgggcccagtcacacagagcaggagcttctccgcctgaccgacgactcccccgtcgacctcctgtgtgcgcctgtcccctcgtgcctgccgtcccctcagctgagaccagaccccgttatcctccaatctgctgatctcattcagtttgaggagcgccctcaagagccttctgaaattatgattttaaaccaagaagaaaaaatggagattccaataccaggaaagagcaaaactctgacctctgactccagctcgtcctgcatctcagcagctgtccccgtgcctccctgcccctcctcggaaacctccgagtcactgctcagcaaggaccccgtggaaagcccggccaaaaagcaacccaaaaatagagtcaaattggcagccaacttttccttagcacctataaccaagctttaactcccatttggaatatagaattaggatgggaaaacactgtctgattctgcacacaaaagtgggtttcaaaaatacatccttttctgtgtcatgaaaaccccccgaagccattgacttcatcttacctgtgttctatcatgtttttcttttccattgaacacagctttgagctgaagtctttcttttcttcttcctttttctttcttttttcaattatttgaagaacttgtggcatttgttaaagaatccttaatatattttaccaaatttttagtaactattatgaaatacaatggtgttccaaaagaagaaagcactaaaaactcaactagcaggaagcggttttgcttccattgagccacgtcggtggtgtcatcctacatgtagcataatagagtctctcagcctttgcttactggtgtttccgacagtattaacccagtgcgtggcatgtctttgaagcaaagcctgtcccgctagcctgtgtgttcacacaccaaaggagaagggtaggcgaggggt

SEQ ID NO: 145824 - DNA, 7743 bp, Homo sapiens; identical to SEQ ID NO: 145817
  Payload ID: 8916
  Gene Symbol: KIAA0430
  Gene Name: KIAA0430
  Uniprot ID: Q9Y4F3
  ENST ID: ENST00000621511
  CDS Start-End: 208-5436

SEQ ID NO: 145825 - DNA, 5053 bp, Homo sapiens; identical to SEQ ID NO: 145821
  Payload ID: 8916
  Gene Symbol: KIAA0430
  Gene Name: KIAA0430
  ENST ID: ENST00000633811
  CDS Start-End: 1-3114

SEQ ID NO: 145826 - DNA, 5891 bp, Homo sapiens; identical to SEQ ID NO: 145822
  Payload ID: 8916
  Gene Symbol: KIAA0430
  Gene Name: KIAA0430
  Uniprot ID: Q9Y4F3
  ENST ID: ENST00000632465
  CDS Start-End: 150-5369

SEQ ID NO: 145827 - DNA, 5900 bp, Homo sapiens; identical to SEQ ID NO: 145823
  Payload ID: 8916
  Gene Symbol: KIAA0430
  Gene Name: KIAA0430
  Uniprot ID: Q9Y4F3
  ENST ID: ENST00000632628
  CDS Start-End: 150-5378

SEQ ID NO: 145828 - DNA, 581 bp, Homo sapiens; identical to SEQ ID NO: 145819
  Payload ID: 8916
  Gene Symbol: KIAA0430
  Gene Name: KIAA0430
  ENST ID: ENST00000633837
  CDS Start-End: 89-581

SEQ ID NO: 145829 - DNA, 600 bp, Homo sapiens; identical to SEQ ID NO: 145820
  Payload ID: 8916
  Gene Symbol: KIAA0430
  Gene Name: KIAA0430
  ENST ID: ENST00000633549
  CDS Start-End: 1-59

SEQ ID NO: 145830 - DNA, 7098 bp, Homo sapiens
  Payload ID: 8916
  Gene Symbol: KIAA0430
  Gene Name: KIAA0430
  ENST ID: ENST00000631398
  CDS Start-End: 59-4792
ggtggaagaatgaaagaaaagaaagatgaaaggatgttgaatcactttgcatggctgtatgatggaaggaaacggaactgagaactcctgcagtagaacacgtggatggcttcaacaagataatgatgctaagccatggctttggaaattctctaattgcttttctcgtcctgagcagacgctgccacatagtccccaaacgaaagagtacatggagaacaagaaagttgctgtggaactaaaggatgtaccatcaccccttcatgctggctctaagctttttccagcagtcccacttcctgatattcgttctcttcagcagcctaaaatacagctttcttctgtccccaaagtaagctgctgtgctcattgccctaatgaaccctccacttcgccaatgcgttttggtggtggtggtggcggtagcggaggtaccagtagcttgattcacccgggcgcactgttagactcgcaaagcaccaggacaatcacgtgtcaggtagggtcagggtttgctttccagtctgcatcttcactccagaatgcctcagctaggaacaatttggcaggcattgcaagtgactttcccagcatgtgtctagagagtaacctgtcttcctgcaaacacctgccctgttgtggaaaactccacttccagtcatgtcatggtaatgtgcacaagctgcatcagtttccgagtctgcagggctgcacctccgctggctatttcccctgttctgatttcacaagcggggctccagggcatttggaagagcacatttcacagtcggagctaacgcctcacttgtgcaccaactctttgcaccttaatgtggtacctccggtttgtttaaagggctcactttactgcgaagactgtctaaacaagccagcaagaaatagcataatcgatgcggctaaagtctggccaaatataccacctccaaatactcaacctgcacctcttgctgtccctctgtgtaatggctgtggaaccaaaggaacagggaaggagaccacgttgttattggcgaccagtctaggcaaagctgcttcaaaatttgggtcaccagaagttgcagtagctggacaggtgctagaaaacttaccccccattggagttttttgggatattgaaaactgctccgttccctctggccggtcagcaactgctgttgtgcaaagaatccgtgagaagttttttaaaggccacagagaagcagaattcatctgtgtatgtgacatcagtaaagaaaacaaggaagttattcaagagctgaataattgccaggtaaccgttgcccacatcaatgctactgcaaagaatgccgctgatgataaactgcggcagagtctccgcagatttgcaaatacacacactgctccagccacagtggttcttgtgtcaactgatgtcaattttgcattggaacttagtgacctgagacacaggcatggtttccacattattttggtccataaaaaccaggcctcagaagcactgctgcatcatgctaacgagctgatcagatttgaagagttcatttccgacttgccccccaggttaccactaaaaatgccagagctgtgccgcatggagtcaaaaactggtcatagaaacagtgagcaccagcaaggtcacctgaggctggtcgtacccactcacggtaactcaagtgctgcagtgtcgacgccgaaaaactcgggggtggcagaacccgtttacaaaaccagtcagaaaaaggagaacctcagtgcccgaagtgttaccagttctcctgtagagaaaaaagataaagaggagactgtattccaagtgagttacccgtctgcttttagcaagttagttgcatccaggcaagtcagtcctctgctcgcatctcagtcttggtcttctagcgaagccgactgcccagacccatttgcaaatggtgctgatgtccaagtcagcaacatagactacagattatcccggaaggagctgcagcagctcctgcaggaagcatttgccaggcatggcaaggtgaagagtgttgagctcagcccccatacagattatcaactcaaggctgttgtgcaaatggaaaacttacaagatgcgatcggtgcagtgaatagcctccacagatacaaaattggcagcaaaaagatcctggtctcacttgccaccggggctgccagcaaatcactctctttactgagtgcagaaacaatgtctgttcttcaggatgcccctgcctgttgcctgcctctgtttaaatttacagatatctatgaaaaaaagtttggacacaagttgaatgtgtcagatctatataaattaacagacacggtcgcaatccgtgaacaaggaaacggacggctggtgtgtctcctacccagcagtcaggcccgccagagccccttggggtcttcccagtcacacgacggctcctccacgaattgcagcccaattatatttgaagagttagaatatcacgagcctgtctgcagacagcattgttccaataaggatttcagcgaacatgaatttgatccagactcttacaagattccttttgtgattctttctttgaagacatttgcgccccaggttcacagtcttctccagacccacgagggcaccgtgcctttattgagctttccagattgttacattgcagagtttggcgatctagaagtagtgcaagaaaaccaaggaggtgttcccttagaacacttcattacctgtgttccaggtgtaaacattgccactgctcagaatggcatcaaagtggttaaatggattcacaacaagcccccgcctcccaacactgacccttggcttctgcgttcgaagagtcctgtaggtaacccccagctgatccagttcagtagagaagtgattgacttgctgaaaagccagccatcttgtgtcatacccatcagtcatttcatcccatcctatcaccatcattttgcaaagcagtgccgagtgtcagactacggatactccaagctgattgagttattagaagcagtgcctcatgtattgcagattcttggaatgggctccaaacgtctgctgacccttacccacagggcccaggtgaagcgctttactcaggatttactaaaacttctcaaatcccaggccagcaaacaggtcattgtgagagaattctcacaggcttatcactggtgtttctcaaaggactgggatgtcactgaatatggtgtttgtgagttgattgacatcgtatcagagattccagacacaaccatctgcttgtcccaacaagataatgaaatggtgatttgtatccccaaaagagaacgcactcaggatgaaatagaaaggacaaaacagttctccaaggatgtcgttgatttgctgcgtcaccaaccccatttccggatgccctttaataaatttatcccttcttaccatcaccactttggccggcagtgcaaacttgcgtactatgggtttaccaaactacttgaactttttgaagccatacctgatactttacaagtattggaatgtggagaagaaaagatccttactctgacagaggtggagcggttcaaagctctagctgcccagtttgttaaactccttcggtcccaaaaagataactgccttatgatgacagatctccttacagaatatgctaaaacttttggttatacatttcgtctccaagactatgatgtcagttccatttcggctttaactcagaaactctgccatgtcgtgaaggttgccgatatagaatctggcagacagattcagctgatcaaccgaaagtctctgcgatctctcactgcccagttgctggtattgttgatgtcttgggaaggaaccacccatctttctgttgaggagctcaagagacattacgaaagtacccacaacactccccttaacccctgtgaatatggattcatgaccttgaccgaactgctgaagagcctgccatacttggttgaggttttcactaatgataagatggaagaatgtgtgaagctcacaagtctgtatttgtttgcaaagaatgtgcggtctttacttcatacttaccactaccagcagattttccttcatgagttttccatggcctataccaagtatgtcggagaaactctgcagcccaagacctacggccacagcagcgtggaggagctcttgggagcaattccacaggtggtctggataaaaggacatggtcataagagaattgtagtgttaaaaaatgacatgaaaagtcgtttgagttcactcagtctctcccctgccaatcatgaaaaccagccctcggagggcgagcgcatcctggaggtgcccgaatcgcacacagcctcggaactcaagcttggagctgacggcagtgggcccagtcacacagagcaggagcttctccgcctgaccgacgactcccccgtcgacctcctgtgtgcgcctgtcccctcgtgcctgccgtcccctcagctgagaccagaccccgttatcctccaatctgctgatctcattcagtttgaggagcgccctcaagagccttctgaaattatgattttaaaccaagaagaaaaaatggagattccaataccaggaaagagcaaaactctgacctctgactccagctcgtcctgcatctcagcagctgtccccgtgcctccctgcccctcctcggaaacctccgagtcactgctcagcaaggaccccgtggaaagcccggccaaaaagcaacccaaaaatagagtcaaattggcagccaacttttccttagcacctataaccaagctttaactcccatttggaatatagaattaggatgggaaaacactgtctgattctgcacacaaaagtgggtttcaaaaatacatccttttctgtgtcatgaaaaccccccgaagccattgacttcatcttacctgtgttctatcatgtttttcttttccattgaacacagctttgagctgaagtctttcttttcttcttcctttttctttcttttttcaattatttgaagaacttgtggcatttgttaaagaatccttaatatattttaccaaatttttagtaactattatgaaatacaatggtgttccaaaagaagaaagcactaaaaactcaactagcaggaagcggttttgcttccattgagccacgtcggtggtgtcatcctacatgtagcataatagagtctctcagcctttgcttactggtgtttccgacagtattaacccagtgcgtggcatgtctttgaagcaaagcctgtcccgctagcctgtgtgttcacacaccaaaggagaagggtaggcgaggggttcggagtgtattttcaggttggaatgtgaaggttcctggcttccatgtgacttgtaagtgtgccttgttttttatttaaactatgtctgtagttgacaaaagtggcttcatcacaaatttttttaaacgtttctactttggggttccatttaggagctttctagaaagttgaggatgtttgaagcttcccttctgtgttccagtttgatatgggttaggttaaggaaaaggagatggtctcgatgtcatggatttaaagtcagcatttggattacaacacacattattgtgtgtcgagaggcagcattggaaagagcctgattttctaaaatatgcatcaagtgcataaattacaaatcagagctgagtggggaggtgcttcagcagcagcgggatcaatacgatttccactgggaagagacaggaattctacctacacataggaaggccaaggttgatccacttaaccttgttattgtaattttaaagctggtatcggtagctgggaagctttatgtgtgtgtatgtcagctcagcatcttttaatcgtgtctgattttactctcgttacttctcgctgttggaagcatctctgggtttcttgtggcgtctggtgtggaatggccttcctctctaggtgcctgaggtgtccgctgacgggtggcctctcacccccctctagagaaacctgacatttacaatggattgtatttgtccggcaaaaaaggcggattcattcatagagcagaaagaacctgttggcgtaaggtcttccactagttagatggtttcttttggggaaatgtttatatttggtaacttctagaaagccagaaaatggactctgatttcatagcattttgataaaatgccacaaaataagggctatagagagatttttacaagtcagattttttgttccccaaatcttttaaatgaagccagtgactcccagttctcaacacatggccccagtcaagacagaacaccatggaaaaaaccctgtaagtattatggcactctccgaatcctcctgaaggcatttcctctacagacatagtgttacaggaagtgaaatgcaaatgtgcaattttttttaaaggagcttttaaacaaagtaataataattggtgttgagaacatcagttgccttattctaagatttcataaggctgagtttgcacgcttggacttcagttctgctagcatgtaaagagtggtggactttaaaaccgtaagaggtatcattacaagtcacctggaacagactcaaagaacaggttctttgggcaacagacaaagaagaatcaagttctgtgctgtcccgtgagtgtgtctgagtaccattcactggagttgctgcttaggtctgggacgtgtgtgtgactcttaacaattgctgtctgaaaatgagagagaagacttcggaagcacattgtgttcataatgtactccacaatggccagtccaattgctatctatttttttatccagaggcttaattaaatgatgtggtaaaatgatgtttgagcattaagacaatgtaattctttatttctgggtggaaagatataccggattaaatttatctgtttaaaaaaatgacaaaagttatcaccaaaaccccctttcccatcttgcactgtttgttttggattgggtttgggggaaagagatgtttttcttagttgtctactttgtttgaacacttttgttgtggttcaagtgctgttttgtgtgttgggaccaaacagttgtcaataaactttacaagcgagcatcta

SEQ ID NO: 145831 - DNA, 7404 bp, Homo sapiens
  Payload ID: 8917
  Gene Symbol: KIAA0513
  Gene Name: KIAA0513
  Uniprot ID: O60268
  ENST ID: ENST00000258180
  CDS Start-End: 274-1509
tcgcgccgcggcgccgggaaaggacccggctgctcgcgggcggcgcagtcgccgcagcagccgagtctgacggcgccggttcgctgcccggtccgcccgcgatgccgtagggccaggtgagctgctgtgaaggactcattcttggtagccggcagttactggcaacttgtgagcttggtgggctcctactaacgcacctgggacaccaggctgctgggctcccctctaggcagcctcccctccaggcagcctcaccagcagctcccctgagccatggagaccccagaggtccccgtgggctcgctaatcgactttgggcctgaggcacccacctcttctcccctggaggcaccaccccctgtgctgcaggacggcgatggctccctgggggacggtgcatcagagagtgagaccactgagtctgcggacagtgagaatgacatgggcgagtcgccctcgcacccgtcctgggaccaagaccgccgttcctcctccaacgagtccttctcctccaaccagagcaccgagtctacccaggatgaagagaccctggcactcagggacttcatgcgtggctacgtggagaagatcttctctggaggggaggacttggatcaggaggagaaagccaagtttggagagtactgcagcagtgaaaatggaaaaggccgggagtggtttgctcgatacgtgagtgcccagcgctgcaactccaagtgtgtctcagaggcaaccttctaccgcctggtgcagtcttttgcagtggtgctgttcgagtgtcatcagatggatgactttgggcctgccaagaacctcatgaccatgtgcttcacctactaccacatcggaaaaccacagctgctgcccccggagtcccgggagaagcccgcgggcagcatcgactcctacctgaaatccgcaaacagctggctggccgaaaagaaggacatcgccgagcggctgctgaagaacacctcggccaggactgagaatgtcaagggcttcttcggggggctggagaccaagctgaaggggcccctggccaggaggaacgaggaagacgagaacaaaccccaggagaagcggcccagggctgtgaccgcgtacagccccgaggacgaaaagaagggggagaagatctacctgtacacgcacctgaagcaacagcccatctggcacactctgaggttctggaatgcagccttttttgacgctgtccattgtgagaggacaaagcgatctcccactaccagaggggatgctggagaggaggaggagaagagggagaagtggtgccacatgacccaggaggagcgcgacgacagcctccggttcaacgagaacatcaccttcgggcagctgggcacattcacgcacaacatgctggcctttggactgaacaagaagctgtgcaatgacttcctgaagaagcaggctgtgattggcaacctggatgaagagcaatacaagctgcttagtgaccacattgagcaaatggccactgagtaggccccagaggtcgcactccgcaggaggactgaggccatgtgccattctcccgggcccagcgcccggccgtcaccccacccgatgacctgcatgaagccagcagcacccagagccactcctgctgccctagaactagcggttagaagaatccgctgttcctccctcatctcctctgcctgtgtctgcgacccccatccatgtgccaaagtgtcccttgggtcacacagctaaagccgaggtgaccagttgtaccccgagtgccaggcttgtgagatgagaccaagagggaggaggggaaggactccatgggccatcgtgggccaagggctggcgagggtgggggcgggcaagggatgcaggcaggacagccatgaggtggggctgcagccggcacacccagtggtggagggccggcgctgccactcacggtgggtggccgtgggccaccttccctgcaatgggtgcacacgcggctcccatccagccctctcagcgtggggctgtggctggtcctcactattccccagtctcccgctgtggggcaggaacaggaagtgacgggaaccttgaggaggaaacgcctgtgttagggagagagtgggtgcggtgtagaggatgctcttggccggctggagcaagacctggctcccaccagagggacgtgtgtgtgcctgcagacggcccgggagctgtgtgtctccgccagagtcacagcagtgccgaggtgtccgcggcagaccacacagaccgtctgaaatgcgcccgcctggcggacagctcccttctgaagcagagaagcctccatggtcacgaagcagcgttgtgctgtgtgtccctcgcaagaagcacaggaaagagaagtttctttagtagccactagacaaccaccctttctgaaagcaaacagtgctgctctttattccagacaaggcaggaaagtctgagttgggagtgacagtggctggagagaagcagatctgtgcaacgtgcagggcaagccagtggcgtggcctctgcctctaagcgctgagcattgggccccttccccaccagacctttgtagctcctccagcctctgcagagactcccttcacctcgcacttactgcctgggaaccacggcccttctcttctgtgggtctgtaccaggtactccaggccagcccatgggcccggggcctgaccccaacacctgcatgctgggtccagagccttctgtttcaccgtgcgtggacactgctaggccgcctggggtcccctgcctcctgcctgtcgctgccgtggtccctgactgcgaaataggcccgcggggctctccctcctcctgccatcctcccctcccgcccttcctggctacctcctctgacatgcggtcagataagtcccgtcttgtttgtgagtaccacagaaacgcctgagagtcacttacccggccactgcttggaaggtttccctccggggaatgcctccctggaatgttccagagacggaacattctctagagacaacagtctgtgctgcagattggttggatcacagaatgtgtgtctggggcattatctgaaacgtggtgtcatctgatgcatttggaccatatgctgccagactgcagaacgggggagccggggctcagggcccctgactgcatggtgcatgagtgatctcagcctagcgatgccgctggccagaccgtgaccatgctgccagtgtgctcgccatgagctgggtcagggctggggagttgtgcaggctggggtgacccttcccccatcattgggccccaacgggcatgtctccaccgaatccatttagagaaatgtcagagcgagggttgtgtggacacccctcgctctgatgccaactgcagataatacacacctcctgcagcgtccagccacggctccagggcactgctctcctccttgcaccggtgaaactcaggccacactcaagggctgactgtccaggcgctcccttcagccgcctcgtcgtcagcgttcttagtcatgcattattcgtgttagctgaaatgcattcagactttgttctgcggtgcccacaggacttacccctgtatgtacaggatttttgtatgaaagttttgtttgattctgagactctcttgggaacgctggagagcttgtgcacagcctctggaaggaaaggcagcgctgacttcgttgggcttttttccaagcactttaacttcagaaatggtcttgacacttttttctccacatagactcttgaaatagccatttcaggggaggaaagggttggggttttctttgtttgtttgtttgtttccccctttactacctgttcttgtagatctagctcctcagagttggaggaaggctgacagagaaggtctcctctgtgctccatccacacaggatgccggagagacagccccttgtgctgtgagcagagcaggcagtggctctggaggctgcctgtggtctccttccggctgtggctgacagtggctctggccagggttgcttggagaaggctcagtgtgcctgggacagggcttaccacctgccaccaaggtttcctctcttcccccaggacctgggcagagcaggcatgagctgggctgtggtgcagagcaagcagacccagccacactgctcaaaggtccctgcgtggggaggtgtcacaccaggggcacacccagggccacctgggtgtaggagagctctggtggcccctccgtaaactcaggaagtgtcaggtgatttcctagggagaggttcccagtcccagcaggcagaatgcccaaaaccaggagcacgaaggcctgtcatccatggggccattgcaggcactctgccgcccgaccttgagggctgtgccaatcctagtgaaccaaaatgcaaacaactcacacaagtgaaaagctccctgctttgaaaacaggacatgttgacaggcagcatggtatgtttttagcctttgttacagttttagcaacattgatgtctaagaggggccgtggtaatagattgcatctgccctgtgcatgcgcatgtttaaccacaggccagagaactcaattctgatgtcgtaagttctctgtaagtgaaatggggtagactgtatgattttcctattgccaaaagaaagaaagggggccaaacagctctgaaatttccaaaaaatggctagagggagagtccagtttctgagctctgtacccaaattaaaatcctgatgttcaggttaatccaagcaacacgcattgggtttaaaaccagcaccgaggcccagtgggggaatcacagacatcaccaagtctcgtcttctttccttcctgtgagttgaaaccaaacaggcctctcgctcactcctcccagcccagtaatgctgaggagttcagttgtgaggaaagaaggctggagctgtgagattcgcttttccctaggctgttccgcgtgggttaccttatcaccctggagcacttggtattccagacccctgacatgaggaatgcaggttcacactgtaaagagtttgtgaaaggtttcagtctaactggggttccttagctggaagccagggctggaagctacaggcctgaccttcctgggtcccactatctgttggcattttttttttttttttttttttagacggagttttgctcttgttgcccaggctggagtgcagtgacacaatctctactcactgcaacctccacctcccgggttcaagcaattctcctgcctcagcctcctgagtagctgggatgacaggtgcacgccaccacgcccggctaatttttatatttttggtagagatggggtttcaccatgctggccaggctggtctcgaactcctgacctcaggtgatcccccccacctcagcctcccaaagtgctgggattacaggcgtgaggcatcacacctgcctctgttggctttttagttaggaaggatccagctaggcccgtgtggttagatcagctttgttactgaattacctaaaaccagaccacagcacagccagggagcccagtagtgtttccaagaacagtgtggagcttgagaaagagaactttaaaaattagagggtccctttctgcagaggaagggatgctcgcagggtggcagtggcccagccccagcctcagggacggggagggagagccccctctgggcccagcaggcaggtgttctgaggctggtccctcctcagtttccgcagccacaaggcgaaacggccagattctcactcaaggtcgttctcactccttttcctgtcccgtttccagtcccactgagccattcacttctgctgaaccatttttcttaggatgcagccgtctcactcccttgtcctgtaaatcgtgtattcatgttgatgattcttggagataggtttcactttttcccagctgcgtccacaggaaaggggagtcggatgccagctgcaccccgcctggctcgcacaggctaagaccacagacagagcagggcttcccggagccacacaggccacgcaccccaggaacccttgctgccgcgggccaggaacaggaatgtgttggtgcctgagacaccaaatggaagaagcacatcaagactgttctcctgcggccaacactggcccggaagccgccctccatacaggccctcagggggcctgccttctgcgcctcagtcccccgtgcatccctgggcctgggtatcacatgctctccaggaaagggacggaatcaatcctgtgaccgatgggctcgcaaggatgggtgccgccgtgggagccctgcctctggtgctggcaagggattgggtttgtgtgggtgtctctagcctgcagagtgcagtgagtgagagtccttgggagcgcggcgctgcctgtagctgtgcctggggatgcacgtggccacgggatttcagtgggacagcgctcccacaggggctgggggtgggggtggggtttcttagttactgttggaaagggaaaaattcaccatatccaaggggagagacgatgggctgggtttgtttactccaacttcccttctacacccctcctgcaggacagtacgatttggggagaacccagctccccactttatctgcagactctgggacctgacaaaacagtcagagcctgagtgcactgcagcctgaactcccttgagcagcgctataagggactttgcactttaaaaaggggatgcctgtcagtaaatcccctgtgcattgactagaactggggggctgcgcccgctccctccttaatcctagatgatttgctcatgaaatagaggtgggggacgaccgcatgcactctgggaggtgcagccctaaggggtggactccagatctccctgcaagagacagcttggcttggctttggctgttggggaggagtccctgccatcccggtgagcctggggctgttgcttagggtcttctgggtggacacgtggagaaagagaaggcaaacgttggaacactaggaaaagctagaaattcagacaacacacatggatccccttaaaacatgtaaatgtgtcagaacacggttgacctgccgccttcttgaacctggtggcccccgttggaactatcagtggcgtctcccatgcacacgccctctgctttctctttcctagactcgcggtgctcacatccagacattaccttgttggtagcccccaagtggcgtgcagtgacaccagtatcttctctgttgcatttttgcaatcttgtgtcccgctcggtgatgttctacaaactctgttttaaggttgagaaagtttcaagggtgaagatctcaaaacagtgctaaaatcaaaggtgtttgctgtgaagaaaaacatgtgtatatattgcaccttgagttgtcagaaggtagaaactgaaataaactaacttt

SEQ ID NO: 145832 - DNA, 7381 bp, Homo sapiens
  Payload ID: 8917
  Gene Symbol: KIAA0513
  Gene Name: KIAA0513
  Uniprot ID: O60268
  ENST ID: ENST00000538274
  CDS Start-End: 281-1486
tcgcgccgcggcgccgggaaaggacccggctgctcgcgggcggcgcagtcgccgcagcagccgagtctgacggcgccggttcgctgcccggtccgcccgcggtgagagatgccgtagggccaggtgagctgctgtgaaggactcattcttggtagccggcagttactggcaacttgtgagcttggtgggctcctactaacgcacctgggacaccaggctgctgggctcccctctaggcagcctcccctccaggcagcctcaccagcagctcccctgagccatggagaccccagaggtccccgtgggctcgctaatcgactttgggcctgaggcacccacctcttctcccctggaggcaccaccccctgtgctgcaggacggcgatggctccctgggggacggtgcatcagagagtgagaccactgagtctgcggacagtgagaatgacatgggcgagtcgccctcgcacccgtcctgggaccaagaccgccgttcctcctccaacgagtccttctcctccaaccagagcaccgagtctacccaggatgaagagaccctggcactcagggacttcatgcgtggctacgtggagaagatcttctctggaggggaggacttggatcaggaggagaaagccaagtttggagagtactgcagcagtgaaaatggaaaaggccgggagtggtttgctcgatacgtgagtgcccagcgctgcaactccaagtgtgtctcagaggcaaccttctaccgcctggtgcagtcttttgcagtggtgctgttcgagtgtcatcagatggatgactttgggcctgccaagaacctcatgaccatgtgcttcacctactaccacatcggaaaaccacagctgctgcccccggagtcccgggagaagcccgcgggcagcatcgactcctacctgaaatccgcaaacagctggctggccgaaaagaaggacatcgccgagcggctgctgaagaacacctcggccaggactgagaatgtcaagggcttcttcggggggctggagaccaagctgaaggggcccctggccaggaggaacgaggaagacgagaacaaaccccaggagaagcggcccagggctgtgaccgcgtacagccccgaggacgaaaagaagggggagaagatctacctgtacacgcacctgaagcaacagcccatctggcacactctgaggttctggaatgcagccttttttgacgctgtccattgtgagaggacaaagcgatctcccactaccagggagaagtggtgccacatgacccaggaggagcgcgacgacagcctccggttcaacgagaacatcaccttcgggcagctgggcacattcacgcacaacatgctggcctttggactgaacaagaagctgtgcaatgacttcctgaagaagcaggctgtgattggcaacctggatgaagagcaatacaagctgcttagtgaccacattgagcaaatggccactgagtaggccccagaggtcgcactccgcaggaggactgaggccatgtgccattctcccgggcccagcgcccggccgtcaccccacccgatgacctgcatgaagccagcagcacccagagccactcctgctgccctagaactagcggttagaagaatccgctgttcctccctcatctcctctgcctgtgtctgcgacccccatccatgtgccaaagtgtcccttgggtcacacagctaaagccgaggtgaccagttgtaccccgagtgccaggcttgtgagatgagaccaagagggaggaggggaaggactccatgggccatcgtgggccaagggctggcgagggtgggggcgggcaagggatgcaggcaggacagccatgaggtggggctgcagccggcacacccagtggtggagggccggcgctgccactcacggtgggtggccgtgggccaccttccctgcaatgggtgcacacgcggctcccatccagccctctcagcgtggggctgtggctggtcctcactattccccagtctcccgctgtggggcaggaacaggaagtgacgggaaccttgaggaggaaacgcctgtgttagggagagagtgggtgcggtgtagaggatgctcttggccggctggagcaagacctggctcccaccagagggacgtgtgtgtgcctgcagacggcccgggagctgtgtgtctccgccagagtcacagcagtgccgaggtgtccgcggcagaccacacagaccgtctgaaatgcgcccgcctggcggacagctcccttctgaagcagagaagcctccatggtcacgaagcagcgttgtgctgtgtgtccctcgcaagaagcacaggaaagagaagtttctttagtagccactagacaaccaccctttctgaaagcaaacagtgctgctctttattccagacaaggcaggaaagtctgagttgggagtgacagtggctggagagaagcagatctgtgcaacgtgcagggcaagccagtggcgtggcctctgcctctaagcgctgagcattgggccccttccccaccagacctttgtagctcctccagcctctgcagagactcccttcacctcgcacttactgcctgggaaccacggcccttctcttctgtgggtctgtaccaggtactccaggccagcccatgggcccggggcctgaccccaacacctgcatgctgggtccagagccttctgtttcaccgtgcgtggacactgctaggccgcctggggtcccctgcctcctgcctgtcgctgccgtggtccctgactgcgaaataggcccgcggggctctccctcctcctgccatcctcccctcccgcccttcctggctacctcctctgacatgcggtcagataagtcccgtcttgtttgtgagtaccacagaaacgcctgagagtcacttacccggccactgcttggaaggtttccctccggggaatgcctccctggaatgttccagagacggaacattctctagagacaacagtctgtgctgcagattggttggatcacagaatgtgtgtctggggcattatctgaaacgtggtgtcatctgatgcatttggaccatatgctgccagactgcagaacgggggagccggggctcagggcccctgactgcatggtgcatgagtgatctcagcctagcgatgccgctggccagaccgtgaccatgctgccagtgtgctcgccatgagctgggtcagggctggggagttgtgcaggctggggtgacccttcccccatcattgggccccaacgggcatgtctccaccgaatccatttagagaaatgtcagagcgagggttgtgtggacacccctcgctctgatgccaactgcagataatacacacctcctgcagcgtccagccacggctccagggcactgctctcctccttgcaccggtgaaactcaggccacactcaagggctgactgtccaggcgctcccttcagccgcctcgtcgtcagcgttcttagtcatgcattattcgtgttagctgaaatgcattcagactttgttctgcggtgcccacaggacttacccctgtatgtacaggatttttgtatgaaagttttgtttgattctgagactctcttgggaacgctggagagcttgtgcacagcctctggaaggaaaggcagcgctgacttcgttgggcttttttccaagcactttaacttcagaaatggtcttgacacttttttctccacatagactcttgaaatagccatttcaggggaggaaagggttggggttttctttgtttgtttgtttgtttccccctttactacctgttcttgtagatctagctcctcagagttggaggaaggctgacagagaaggtctcctctgtgctccatccacacaggatgccggagagacagccccttgtgctgtgagcagagcaggcagtggctctggaggctgcctgtggtctccttccggctgtggctgacagtggctctggccagggttgcttggagaaggctcagtgtgcctgggacagggcttaccacctgccaccaaggtttcctctcttcccccaggacctgggcagagcaggcatgagctgggctgtggtgcagagcaagcagacccagccacactgctcaaaggtccctgcgtggggaggtgtcacaccaggggcacacccagggccacctgggtgtaggagagctctggtggcccctccgtaaactcaggaagtgtcaggtgatttcctagggagaggttcccagtcccagcaggcagaatgcccaaaaccaggagcacgaaggcctgtcatccatggggccattgcaggcactctgccgcccgaccttgagggctgtgccaatcctagtgaaccaaaatgcaaacaactcacacaagtgaaaagctccctgctttgaaaacaggacatgttgacaggcagcatggtatgtttttagcctttgttacagttttagcaacattgatgtctaagaggggccgtggtaatagattgcatctgccctgtgcatgcgcatgtttaaccacaggccagagaactcaattctgatgtcgtaagttctctgtaagtgaaatggggtagactgtatgattttcctattgccaaaagaaagaaagggggccaaacagctctgaaatttccaaaaaatggctagagggagagtccagtttctgagctctgtacccaaattaaaatcctgatgttcaggttaatccaagcaacacgcattgggtttaaaaccagcaccgaggcccagtgggggaatcacagacatcaccaagtctcgtcttctttccttcctgtgagttgaaaccaaacaggcctctcgctcactcctcccagcccagtaatgctgaggagttcagttgtgaggaaagaaggctggagctgtgagattcgcttttccctaggctgttccgcgtgggttaccttatcaccctggagcacttggtattccagacccctgacatgaggaatgcaggttcacactgtaaagagtttgtgaaaggtttcagtctaactggggttccttagctggaagccagggctggaagctacaggcctgaccttcctgggtcccactatctgttggcattttttttttttttttttttttagacggagttttgctcttgttgcccaggctggagtgcagtgacacaatctctactcactgcaacctccacctcccgggttcaagcaattctcctgcctcagcctcctgagtagctgggatgacaggtgcacgccaccacgcccggctaatttttatatttttggtagagatggggtttcaccatgctggccaggctggtctcgaactcctgacctcaggtgatcccccccacctcagcctcccaaagtgctgggattacaggcgtgaggcatcacacctgcctctgttggctttttagttaggaaggatccagctaggcccgtgtggttagatcagctttgttactgaattacctaaaaccagaccacagcacagccagggagcccagtagtgtttccaagaacagtgtggagcttgagaaagagaactttaaaaattagagggtccctttctgcagaggaagggatgctcgcagggtggcagtggcccagccccagcctcagggacggggagggagagccccctctgggcccagcaggcaggtgttctgaggctggtccctcctcagtttccgcagccacaaggcgaaacggccagattctcactcaaggtcgttctcactccttttcctgtcccgtttccagtcccactgagccattcacttctgctgaaccatttttcttaggatgcagccgtctcactcccttgtcctgtaaatcgtgtattcatgttgatgattcttggagataggtttcactttttcccagctgcgtccacaggaaaggggagtcggatgccagctgcaccccgcctggctcgcacaggctaagaccacagacagagcagggcttcccggagccacacaggccacgcaccccaggaacccttgctgccgcgggccaggaacaggaatgtgttggtgcctgagacaccaaatggaagaagcacatcaagactgttctcctgcggccaacactggcccggaagccgccctccatacaggccctcagggggcctgccttctgcgcctcagtcccccgtgcatccctgggcctgggtatcacatgctctccaggaaagggacggaatcaatcctgtgaccgatgggctcgcaaggatgggtgccgccgtgggagccctgcctctggtgctggcaagggattgggtttgtgtgggtgtctctagcctgcagagtgcagtgagtgagagtccttgggagcgcggcgctgcctgtagctgtgcctggggatgcacgtggccacgggatttcagtgggacagcgctcccacaggggctgggggtgggggtggggtttcttagttactgttggaaagggaaaaattcaccatatccaaggggagagacgatgggctgggtttgtttactccaacttcccttctacacccctcctgcaggacagtacgatttggggagaacccagctccccactttatctgcagactctgggacctgacaaaacagtcagagcctgagtgcactgcagcctgaactcccttgagcagcgctataagggactttgcactttaaaaaggggatgcctgtcagtaaatcccctgtgcattgactagaactggggggctgcgcccgctccctccttaatcctagatgatttgctcatgaaatagaggtgggggacgaccgcatgcactctgggaggtgcagccctaaggggtggactccagatctccctgcaagagacagcttggcttggctttggctgttggggaggagtccctgccatcccggtgagcctggggctgttgcttagggtcttctgggtggacacgtggagaaagagaaggcaaacgttggaacactaggaaaagctagaaattcagacaacacacatggatccccttaaaacatgtaaatgtgtcagaacacggttgacctgccgccttcttgaacctggtggcccccgttggaactatcagtggcgtctcccatgcacacgccctctgctttctctttcctagactcgcggtgctcacatccagacattaccttgttggtagcccccaagtggcgtgcagtgacaccagtatcttctctgttgcatttttgcaatcttgtgtcccgctcggtgatgttctacaaactctgttttaaggttgagaaagtttcaagggtgaagatctcaaaacagtgctaaaatcaaaggtgtttgctgtgaagaaaaacatgtgtatatattgcaccttgagttgtcagaaggtagaaactgaaataaactaacttt

SEQ ID NO: 145833 - DNA, 675 bp, Homo sapiens
  Payload ID: 8917
  Gene Symbol: KIAA0513
  Gene Name: KIAA0513
  ENST ID: ENST00000562580
  CDS Start-End: 1-597
aagcccgcgggcagcatcgactcctacctgaaatccgcaaacagctggctggccgaaaagaaggacatcgccgagcggctgctgaagaacacctcggccaggactgagaatgtcaagggcttcttcggggggctggagaccaagctgaaggggcccctggccaggaggaacgaggaagacgagaacaaaccccaggagaagcggcccagggctgtgaccgcgtacagccccgaggacgaaaagaagggggagaagatctacctgtacacgcacctgaagcaacagcccatctggcacactctgaggttctggaatgcagccttttttgacgctgtccattgtgagaggacaaagcgatctcccactaccagggagaagtggtgccacatgacccaggaggagcgcgacgacagcctccggttcaacgagaacatcaccttcgggcagctgggcacattcacgcacaacatgctggcctttggactgaacaagaagctgtgcaatgacttcctgaagaagcaggctgtgattggcaacctggatgaagagcaatacaagctgcttagtgaccacattgagcaaatggccactgagtaggccccagaggtcgcactccgcaggaggactgaggccatgtgccattctcccgggcccagcgcccggccgtcaccccac

SEQ ID NO: 145834 - DNA, 364 bp, Homo sapiens
  Payload ID: 8917
  Gene Symbol: KIAA0513
  Gene Name: KIAA0513
  ENST ID: ENST00000562564
  CDS Start-End: 1-342
gacgagaacaaaccccaggagaagcggcccagggctgtgaccgcgtacagccccgaggacgaaaagaagggggagaagatctacctgtacacgcacctgaagcaacagcccatctgggagaagtggtgccacatgacccaggaggagcgcgacgacagcctccggttcaacgagaacatcaccttcgggcagctgggcacattcacgcacaacatgctggcctttggactgaacaagaagctgtgcaatgacttcctgaagaagcaggctgtgattggcaacctggatgaagagcaatacaagctgcttagtgaccacattgagcaaatggccactgagtaggccccagaggtcgcactccgca

SEQ ID NO: 145835 - DNA, 1873 bp, Homo sapiens
  Payload ID: 8917
  Gene Symbol: KIAA0513
  Gene Name: KIAA0513
  Uniprot ID: O60268
  ENST ID: ENST00000567328
  CDS Start-End: 221-1126
ttctggtgaggagtggcgctaatgtctgtgtctgtgtttccattctagatgccgtagggccaggtgagctgctgtgaaggactcattcttggtagccggcagttactggcaacttgtgagcttggtgggctcctactaacgcacctgggacaccaggctgctgggctcccctctaggcagcctcccctccaggcagcctcaccagcagctcccctgagccatggagaccccagaggtccccgtgggctcgctaatcgactttgggcctgaggcacccacctcttctcccctggaggcaccaccccctgtgctgcaggacggcgatggctccctgggggacggtgcatcagagagtgagaccactgagtctgcggacagtgagaatgacatgggcgagtcgccctcgcacccgtcctgggaccaagaccgccgttcctcctccaacgagtccttctcctccaaccagagcaccgagtctacccaggatgaagagaccctggcactcagggacttcatgcgtggctacgtggagaagatcttctctggaggggaggacttggatcaggaggagaaagccaagtttggagagtactgcagcagtgaaaatggaaaaggccgggagtggtttgctcgatacgtgagtgcccagcgctgcaactccaagtgtgtctcagaggcaaccttctaccgcctggtgcagtcttttgcagtggtgctgttcgagtgtcatcagatggatgactttgggcctgccaagaacctcatgaccatgtgcttcacctactaccacatcggaaaaccacagctgctgcccccggagtcccgggagaagcccgcgggcagcatcgactcctacctgaaatccgcaaacagctggctggccgaaaagaaggacatcgccgagcggctgctgaagaacacctcggccaggactgagaatgtcaagggcttcttcggggggctggagaccaagctgaaggggcccctggccaggaggaacgaggaagacgagaacaaaccccaggagaagcggcccagggctgtgaccgcgtacagccccgaggacgaaaagaagggggagaagatctacctgtacacgcacctgaagcaacagcccatctggtaaggccgagcccgcggcttcccgtcaccctcttactgacggggccagcagtcactccccgggatcacttctagctgcctttgtccccatcagaatggcagaattctcacactcaccagagtggcagaataaaaagatgaacactcacaggcgttggtgaggatgtggagaaactggagctctcctgtatggctaggagcaatgtaaatgagcagccgctgagaaacagtctggcagttcctttaaaggtgaaacacaagagttactctgtgacccagcagctccactcctaggagtcgcccaagagaaaaacatgtcctcacaaaaccttgtacacaaatgtctgtagcaacgtcgtttattatggccccgaggtggaaaccaccttcatggctgtccagtgatgaatgggtaaacaaaatgtggtccatccgttgcatggactattagccagccatgaaaagcaatggcatgctgctccacgctgtagcagggatagacctgggaaacatcgtgaaactcagtggaagaagccagacacagaagcccaagtattgtatcatccctatgaaatgtccagaactgcagattcctagagacacagcagatgacagattgcccgggcagagggtggggaatggggagcagggcgtgactgctgatggggatggggcttctttatggggtgagagaatgttctggaaatggtggtggctgcacaactctgtgaatacactaaaaatcactgaa

SEQ ID NO: 145836 - DNA, 7772 bp, Homo sapiens
  Payload ID: 8917
  Gene Symbol: KIAA0513
  Gene Name: KIAA0513
  Uniprot ID: O60268
  ENST ID: ENST00000566428
  CDS Start-End: 632-1867
caagagtgcctgaggctggatcagaaatagccacgatcgtccagtttgattgattgattgattgatttagttgtgatggagtctcgctgtatttcccaggctggagtgcagaggcacgatctccgttcactgcagcctccacctccccggttcaagtgattctcctgcctcagccttccgagtagctgggattacaggcacctgccaccacgcccggctgatttttgtgtttttagtagagacagggtttcgccatgttggccaggctggtcttgaactcctgacctcaggtgagccacccgcctcggcctcccaaagtgttgggattacaggcgtgagccactgcccccagccccagcttgatcttgaacctcctgtgtgtgggcagagagacatggccctgctactgcttgaacggcttccggagacagtgacttgtttcctttttccctctgaactatgccgtagggccaggtgagctgctgtgaaggactcattcttggtagccggcagttactggcaacttgtgagcttggtgggctcctactaacgcacctgggacaccaggctgctgggctcccctctaggcagcctcccctccaggcagcctcaccagcagctcccctgagccatggagaccccagaggtccccgtgggctcgctaatcgactttgggcctgaggcacccacctcttctcccctggaggcaccaccccctgtgctgcaggacggcgatggctccctgggggacggtgcatcagagagtgagaccactgagtctgcggacagtgagaatgacatgggcgagtcgccctcgcacccgtcctgggaccaagaccgccgttcctcctccaacgagtccttctcctccaaccagagcaccgagtctacccaggatgaagagaccctggcactcagggacttcatgcgtggctacgtggagaagatcttctctggaggggaggacttggatcaggaggagaaagccaagtttggagagtactgcagcagtgaaaatggaaaaggccgggagtggtttgctcgatacgtgagtgcccagcgctgcaactccaagtgtgtctcagaggcaaccttctaccgcctggtgcagtcttttgcagtggtgctgttcgagtgtcatcagatggatgactttgggcctgccaagaacctcatgaccatgtgcttcacctactaccacatcggaaaaccacagctgctgcccccggagtcccgggagaagcccgcgggcagcatcgactcctacctgaaatccgcaaacagctggctggccgaaaagaaggacatcgccgagcggctgctgaagaacacctcggccaggactgagaatgtcaagggcttcttcggggggctggagaccaagctgaaggggcccctggccaggaggaacgaggaagacgagaacaaaccccaggagaagcggcccagggctgtgaccgcgtacagccccgaggacgaaaagaagggggagaagatctacctgtacacgcacctgaagcaacagcccatctggcacactctgaggttctggaatgcagccttttttgacgctgtccattgtgagaggacaaagcgatctcccactaccagaggggatgctggagaggaggaggagaagagggagaagtggtgccacatgacccaggaggagcgcgacgacagcctccggttcaacgagaacatcaccttcgggcagctgggcacattcacgcacaacatgctggcctttggactgaacaagaagctgtgcaatgacttcctgaagaagcaggctgtgattggcaacctggatgaagagcaatacaagctgcttagtgaccacattgagcaaatggccactgagtaggccccagaggtcgcactccgcaggaggactgaggccatgtgccattctcccgggcccagcgcccggccgtcaccccacccgatgacctgcatgaagccagcagcacccagagccactcctgctgccctagaactagcggttagaagaatccgctgttcctccctcatctcctctgcctgtgtctgcgacccccatccatgtgccaaagtgtcccttgggtcacacagctaaagccgaggtgaccagttgtaccccgagtgccaggcttgtgagatgagaccaagagggaggaggggaaggactccatgggccatcgtgggccaagggctggcgagggtgggggcgggcaagggatgcaggcaggacagccatgaggtggggctgcagccggcacacccagtggtggagggccggcgctgccactcacggtgggtggccgtgggccaccttccctgcaatgggtgcacacgcggctcccatccagccctctcagcgtggggctgtggctggtcctcactattccccagtctcccgctgtggggcaggaacaggaagtgacgggaaccttgaggaggaaacgcctgtgttagggagagagtgggtgcggtgtagaggatgctcttggccggctggagcaagacctggctcccaccagagggacgtgtgtgtgcctgcagacggcccgggagctgtgtgtctccgccagagtcacagcagtgccgaggtgtccgcggcagaccacacagaccgtctgaaatgcgcccgcctggcggacagctcccttctgaagcagagaagcctccatggtcacgaagcagcgttgtgctgtgtgtccctcgcaagaagcacaggaaagagaagtttctttagtagccactagacaaccaccctttctgaaagcaaacagtgctgctctttattccagacaaggcaggaaagtctgagttgggagtgacagtggctggagagaagcagatctgtgcaacgtgcagggcaagccagtggcgtggcctctgcctctaagcgctgagcattgggccccttccccaccagacctttgtagctcctccagcctctgcagagactcccttcacctcgcacttactgcctgggaaccacggcccttctcttctgtgggtctgtaccaggtactccaggccagcccatgggcccggggcctgaccccaacacctgcatgctgggtccagagccttctgtttcaccgtgcgtggacactgctaggccgcctggggtcccctgcctcctgcctgtcgctgccgtggtccctgactgcgaaataggcccgcggggctctccctcctcctgccatcctcccctcccgcccttcctggctacctcctctgacatgcggtcagataagtcccgtcttgtttgtgagtaccacagaaacgcctgagagtcacttacccggccactgcttggaaggtttccctccggggaatgcctccctggaatgttccagagacggaacattctctagagacaacagtctgtgctgcagattggttggatcacagaatgtgtgtctggggcattatctgaaacgtggtgtcatctgatgcatttggaccatatgctgccagactgcagaacgggggagccggggctcagggcccctgactgcatggtgcatgagtgatctcagcctagcgatgccgctggccagaccgtgaccatgctgccagtgtgctcgccatgagctgggtcagggctggggagttgtgcaggctggggtgacccttcccccatcattgggccccaacgggcatgtctccaccgaatccatttagagaaatgtcagagcgagggttgtgtggacacccctcgctctgatgccaactgcagataatacacacctcctgcagcgtccagccacggctccagggcactgctctcctccttgcaccggtgaaactcaggccacactcaagggctgactgtccaggcgctcccttcagccgcctcgtcgtcagcgttcttagtcatgcattattcgtgttagctgaaatgcattcagactttgttctgcggtgcccacaggacttacccctgtatgtacaggatttttgtatgaaagttttgtttgattctgagactctcttgggaacgctggagagcttgtgcacagcctctggaaggaaaggcagcgctgacttcgttgggcttttttccaagcactttaacttcagaaatggtcttgacacttttttctccacatagactcttgaaatagccatttcaggggaggaaagggttggggttttctttgtttgtttgtttgtttccccctttactacctgttcttgtagatctagctcctcagagttggaggaaggctgacagagaaggtctcctctgtgctccatccacacaggatgccggagagacagccccttgtgctgtgagcagagcaggcagtggctctggaggctgcctgtggtctccttccggctgtggctgacagtggctctggccagggttgcttggagaaggctcagtgtgcctgggacagggcttaccacctgccaccaaggtttcctctcttcccccaggacctgggcagagcaggcatgagctgggctgtggtgcagagcaagcagacccagccacactgctcaaaggtccctgcgtggggaggtgtcacaccaggggcacacccagggccacctgggtgtaggagagctctggtggcccctccgtaaactcaggaagtgtcaggtgatttcctagggagaggttcccagtcccagcaggcagaatgcccaaaaccaggagcacgaaggcctgtcatccatggggccattgcaggcactctgccgcccgaccttgagggctgtgccaatcctagtgaaccaaaatgcaaacaactcacacaagtgaaaagctccctgctttgaaaacaggacatgttgacaggcagcatggtatgtttttagcctttgttacagttttagcaacattgatgtctaagaggggccgtggtaatagattgcatctgccctgtgcatgcgcatgtttaaccacaggccagagaactcaattctgatgtcgtaagttctctgtaagtgaaatggggtagactgtatgattttcctattgccaaaagaaagaaagggggccaaacagctctgaaatttccaaaaaatggctagagggagagtccagtttctgagctctgtacccaaattaaaatcctgatgttcaggttaatccaagcaacacgcattgggtttaaaaccagcaccgaggcccagtgggggaatcacagacatcaccaagtctcgtcttctttccttcctgtgagttgaaaccaaacaggcctctcgctcactcctcccagcccagtaatgctgaggagttcagttgtgaggaaagaaggctggagctgtgagattcgcttttccctaggctgttccgcgtgggttaccttatcaccctggagcacttggtattccagacccctgacatgaggaatgcaggttcacactgtaaagagtttgtgaaaggtttcagtctaactggggttccttagctggaagccagggctggaagctacaggcctgaccttcctgggtcccactatctgttggcattttttttttttttttttttttagacggagttttgctcttgttgcccaggctggagtgcagtgacacaatctctactcactgcaacctccacctcccgggttcaagcaattctcctgcctcagcctcctgagtagctgggatgacaggtgcacgccaccacgcccggctaatttttatatttttggtagagatggggtttcaccatgctggccaggctggtctcgaactcctgacctcaggtgatcccccccacctcagcctcccaaagtgctgggattacaggcgtgaggcatcacacctgcctctgttggctttttagttaggaaggatccagctaggcccgtgtggttagatcagctttgttactgaattacctaaaaccagaccacagcacagccagggagcccagtagtgtttccaagaacagtgtggagcttgagaaagagaactttaaaaattagagggtccctttctgcagaggaagggatgctcgcagggtggcagtggcccagccccagcctcagggacggggagggagagccccctctgggcccagcaggcaggtgttctgaggctggtccctcctcagtttccgcagccacaaggcgaaacggccagattctcactcaaggtcgttctcactccttttcctgtcccgtttccagtcccactgagccattcacttctgctgaaccatttttcttaggatgcagccgtctcactcccttgtcctgtaaatcgtgtattcatgttgatgattcttggagataggtttcactttttcccagctgcgtccacaggaaaggggagtcggatgccagctgcaccccgcctggctcgcacaggctaagaccacagacagagcagggcttcccggagccacacaggccacgcaccccaggaacccttgctgccgcgggccaggaacaggaatgtgttggtgcctgagacaccaaatggaagaagcacatcaagactgttctcctgcggccaacactggcccggaagccgccctccatacaggccctcagggggcctgccttctgcgcctcagtcccccgtgcatccctgggcctgggtatcacatgctctccaggaaagggacggaatcaatcctgtgaccgatgggctcgcaaggatgggtgccgccgtgggagccctgcctctggtgctggcaagggattgggtttgtgtgggtgtctctagcctgcagagtgcagtgagtgagagtccttgggagcgcggcgctgcctgtagctgtgcctggggatgcacgtggccacgggatttcagtgggacagcgctcccacaggggctgggggtgggggtggggtttcttagttactgttggaaagggaaaaattcaccatatccaaggggagagacgatgggctgggtttgtttactccaacttcccttctacacccctcctgcaggacagtacgatttggggagaacccagctccccactttatctgcagactctgggacctgacaaaacagtcagagcctgagtgcactgcagcctgaactcccttgagcagcgctataagggactttgcactttaaaaaggggatgcctgtcagtaaatcccctgtgcattgactagaactggggggctgcgcccgctccctccttaatcctagatgatttgctcatgaaatagaggtgggggacgaccgcatgcactctgggaggtgcagccctaaggggtggactccagatctccctgcaagagacagcttggcttggctttggctgttggggaggagtccctgccatcccggtgagcctggggctgttgcttagggtcttctgggtggacacgtggagaaagagaaggcaaacgttggaacactaggaaaagctagaaattcagacaacacacatggatccccttaaaacatgtaaatgtgtcagaacacggttgacctgccgccttcttgaacctggtggcccccgttggaactatcagtggcgtctcccatgcacacgccctctgctttctctttcctagactcgcggtgctcacatccagacattaccttgttggtagcccccaagtggcgtgcagtgacaccagtatcttctctgttgcatttttgcaatcttgtgtcccgctcggtgatgttctacaaactctgttttaaggttgagaaagtttcaagggtgaagatctcaaaacagtgctaaaatcaaaggtgtttgctgtgaagaaaaacatgtgtatatattgcaccttgagttgtcagaaggtagaaactgaaataaactaactttaaaaaaaaaa

SEQ ID NO: 145837 - DNA, 6616 bp, Homo sapiens
  Payload ID: 8918
  Gene Symbol: KIAA0556
  Gene Name: KIAA0556
  Uniprot ID: O60303
  ENST ID: ENST00000261588
  CDS Start-End: 20-4876
ggaaccgccgcctctagggatggacggtcagactctgcgaaaggccgagagaagctggtcctgctcacgagagaaaaaggagggttacgctaaggacatggtgacagactttgatgagaaacatgatgagtatttaatattgcttcagcagaggaaccggatattaaagcatttgaaaagcaaggaccccgtgcaattgaggctggagcacttggagcaaggtttctctgtctatgtcaacggtgccaattcggagctgaaatcatcaccgcggaaagctattcactctgacttctccagaagtgcctcccacacggaggggacacacgattatggacgaagaactctgtttcgagaagctgaagaagccttaagacgcagttcacggacagcccccagtaaagtccagcgccgaggatggcaccagaaatctgtgcagatcagaacagaagctggcccacggctccacatcgaacctcctgtggactattctgatgattttgagctgtgtggggatgtgactctccaggcaaacaacacttctgaggatcgtccgcaggagctgagaagaagcctggaacttagtgtaaatctacaaaggaaacaaaaggattgttccagcgatgagtatgactctattgaggaagacatactctctgagcctgagccagaggacccggcactggtgggccatcccagacatgaccgccctccttccagtggcgactggactcagaaagatgttcacggggaacaggagacagaaggacgctcttctccaggcccagacaccctcgtggtgctggaatttaacccagcttccaaaagtcataaaagggaaaggaatttgtctgcaaagcggaaggacaatgctgaggttttcgttcccaccaaacctgagccaaacctgactccccaagctcctgctgtattcccagaccaggagaggatgtgctccagacctggaagccggcgagagagacccctgtctgcaacccgcaaaactctttgcgaggctgagtacccagaggaagatgcctctgctgtgctccaagccatccaggtggagaacgcagccctgcagagggcgctcctcagcagaaaggccgagcagccagccagcccactgcaggatgcagaaggaccaccagcaaaaccatggaccagtctgctggaggagaaggaagagacccttgagctgcttcccatcaccacggcgactactactcaggagccggccggggcagcaggaggagccagggccatcaaccaggccatggacagaattgggcttctgggaagcagacaacagcagaagcttctgaaagtcctccaggccgtcgaaagtgactctgcccatctcggcagggtggtttcaccaaccaaggagcaagtatcagacacagaggacaaacagagaatgagggcagacgagatcaaagatgccatctacgtgaccatggagatcctgtccaactggggcaactcgtggtgggtgggtctcacagaagtcgagttctttgacttgaatgacacaaagctttatgtgtcgccccacgatgtggatatccggaacacagccacgcctggggagctgggccgcctcgtcaacaggaacttagctggcaagaaagactcctccccgtggacctgccccttccacccaccactccagctgttttttgttattcgaaacacaagacagctgggggacttccatctggccaagatcaaggttcggaattactggacagctgatggcgatcttgacattggtgccaagaacgtgaagctttacgtcaacagaaacctcatcttcaatggcaagttagacaaaggagatagggaggccccagctgaccacagcatcctggttgaccagaagaacgagaagagcgagcaactagaggaggccatgaacgctcactcggaagaaagcaaaggcacccatgagatggctggtgccagcggggacaaggagcttggtctcggttgctcaccgccagctgaaacattagcggatgcaaagctttcttcacaaggaaatgtgtctggcaaaagaaagaattctactaattgcaggaaagacagtttgtcccagttagaggaatatttgagactgtcggcagtccccacttcgatgggtgacatgcccagtgctcctgccacttccccacctgtgaagtgccctcctgtccatgaggagccctctctcatccaacaactggaaaacctcatgggcagaaaaatctgtgagccacccgggaaaaccccatcctggttacaaccttctcccaccggcaaggacaggaagcagggaggcaggaagccaaaacccctctggcttagtcccgagaagcccctggcctggaagggcaggctcccatcagacgatgtcatcggtgagggtcctggagagaccgaggccagggataaaggcctacggcatgagccagggtgggggaccagccggagtgtcaacaccaaggagagaccccagagggcaaccaccaaagtccacagtgatgactcagacatctttaaccagccccccaacagagagcgccctgctagtgggaggaggggctcaaggaaggatgctggcagcagtagtcatggggacgaccagccagccagcagagaagacacctggtcttccaggacgccgtcacggtcaaggtggcgcagtgagcaggagcacacacttcacgagtcatggagctccctcagtgccttcgaccgctcccaccggggacgcatctccaacacggagctcccgggggacatcctggatgagctcctgcagcaaaagagcagccggcacagcgacttgcccccctccaagaagggggagcagccagggctgtcgagagggcaggatggctactctggagagacagacgctgggggtgactttaaaatccccgtcttgccttatggacagcgcttggtcattgacatcaagtctacctggggggacagacactatgtcggcctcaacggaatagaaatattcagttccaagggtgaaccggtgcagatttcaaacataaaagcagaccctcccgatatcaatattttaccagcctatgggaaagacccccgcgtggtcaccaacctcatcgacggggtgaacaggacccaggatgacatgcatgtctggctggcccccttcacgcggggcagatcccactccatcaccattgacttcacgcacccttgccacgttgccctgatcagaatttggaactacaataaatctcggatacattccttccgaggcgtgaaggacatcacaatgctgttagacacccagtgcatctttgaaggagaaatcgccaaggcctctggaaccctggcgggagccccagagcactttggagacacgatcttattcacaaccgatgatgacattctcgaggccatattctattctgatgagatgtttgacctggatgtggggagcctggacagcctgcaggatgaagaggcaatgaggaggcccagcacggccgacggcgagggggatgagcggcccttcacccaggctggcttgggggctgatgaacggatcccggagctagagctcccatccagttcccctgtcccccaagtcaccacgccagagccaggcatctaccacggaatctgccttcagctgaatttcactgcctcctggggagacttgcactacctggggctcactggcctggaagtggtgggcaaggagggccaggcgctgcccatccacctgcaccagatctctgcttcccccagagacttaaatgagctccccgagtactctgacgactcccgggccctggacaagttaattgatggcaccaacatcaccatggaggatgagcatatgtggctgatccccttctcgccggggctggaccatgtggtcacgatccgcctggacagggccgaaagcatcgcaggcctgcgcttctggaactacaataaatctcccgaggacacctatcgcggggccaagattgtccacgtctccctggatggcctgtgcgtctccccgccagagggctttctcatccggaaggggccaggcaactgccactttgattttgctcaagaaatcctcttcgtggactacctacgggctcagctgctgccccagccggccaggaggctggacatgagaagcctggagtgtgcaagcatggactacgaggcaccgctgatgccctgtggcttcattttccagtttcagcttctcaccagctggggcgacccctactacatcggcctcaccggcctggagctgtatgacgagcgaggagaaaaaatccccttgtcggaaaacaatattgcggccttccccgacagcgtgaactccctggagggtgtgggcggggacgtccgcaccccagacaagctcatcgaccaagtgaacgacaccagtgatggccggcacatgtggctggctcccatcctgccgggcctggtgaaccgggtttatgtgattttcgatctgcctaccaccgtgtcaatgatcaaactgtggaattatgcgaaaacaccccatcgaggggtgaaggagtttggcctcctggtggacgacctgcttgtgtacaatgggatcctggccatggtgagccacctggtggggggcatcctgcccacatgtgagcccaccgtgccctaccacaccatcctcttcaccgaggacagggacatccgccaccaggagaaacacaccaccatcagtaatcaggccgaggatcaagatgtccagatgatgaatgaaaaccaaatcattaccaacgcgaaacggaagcagagcgttgttgacccagccttacgtcccaaaacctgcatcagcgagaaggagacgagacgacggcgctgctgactggtgaaggagggagagctggtcctcccactatggtgggctccgtcagcagccccactcagtgcctgcgtccctcaccctcagtcccaggagctggaagcgaaccacagtgttgaggggagcccgctgggaagaggggactcgggaggacagccctggatactaccagagtgacagatggctgtggctgcagggcaaagagatcccctgcagttctgggttggccacagggagcccaggacacccgccttcatgcctctgctgtgagacccagcaaagcagggcccatgaccactagggcctgggctgaccctgactcagaacaggacaatgacggggtggggaggcatcccatccagcctcagagggcccagagaatggctgagcaggacagtgggagaccagaccctaccccgcaactccagtaagcagggcactgcccagggagactgccttcagaaacctgagcttcagcggccaacaccccccatcccctgcgcatccttgtctcatttggggactggtggagctggctgagaggttggggtagtttcctggttacaggggtccacaagaccctctctcatcccggtataggggcctctctcctctcatcgggcctgataagggattggccaaggctgtgtgcatcctgcagagggaaggaagtcagctgggccacccgccatccaccttggcaagagctgggcccactctggcaggccagggtatcatctgcgtgctgctgccgggccaggaagggtgggtgggtggccagcaggctggcagctccagaccccagagggccagaagaactcaccccagtgccctctggatgcaggtgttggggaacactgaggacaatcccccatctcccctcacccttgagcaggccctccctgcactctctgccacatgtccctcctggtctgatcacggctgtgctcactgatgtggctgctttctgtctctgcccctgtgcccttggaggcaggcagtgaggtgctcctttcccaggcccccaccccttctcccccttcagccacttcccagcgagttggaaatgtgccttgcacccccagccgagtgaagcccagaacgcatctatatgcatcgatgtaacaagctcggatcagggacctaattggtttcccagtagtgggtaatttctcgttgcaaatattaatccgttgtttttctggcgcccagcccggcccgccgcagtactgtactcgaggtacgttcctatgcaaccgagagccccggcaaatacttcatgagcttagcagcctgggctcgagcagctatgcaaacgcgcttttcatttggagcacggggctgatgtgaagataagaattgtttctcctggagaaagatccatcatttctccagcttccaagcccccggcacctctgctcagctcccagatgtgacgagcacctcccgccagggggagtcaggggttgatcaaaccagctcttgtgacccaaaccagtgccgctgcattaaagggaggcccagctactccttcccagctgagatgtgggtacaggtcagatttgtcagggagatggcactaacacgacacaagctcactcccagaaccgcagctgatgtttataataatcgtatgtactgtgcaatttaggaggggaaaaaaaggctgtacaagctttaactctaaaataaatttctatttttttcctcttgcaaaattaataaaagatgttattaagaata

SEQ ID NO: 145838 - DNA, 746 bp, Homo sapiens
  Payload ID: 8918
  Gene Symbol: KIAA0556
  Gene Name: KIAA0556
  ENST ID: ENST00000568258
  CDS Start-End: 1-746
ctctgcgaaaggccgagagaagctggtcctgctcacgagagaaaaaggagggttacgctaaggacatggtgacagactttgatgagaaacatgatgagtatttaatattgcttcagcagaggaaccggatattaaagcatttgaaaagcaaggaccccgtgcaattgaggctggagcacttggagcaaggtttctctgtctatgtcaacggtgccaattcggagctgaaatcatcaccgcggaaagctattcactctgacttctccagaagtgcctcccacacggaggggacacacgattatggacgaagaactctgtttcgagaagctgaagaagccttaagacgcagttcacggacagcccccagtaaagtccagcgccgaggatggcaccagaaatctgtgcagatcagaacagaagctggcccacggctccacatcgaacctcctgtggactattctgatgattttgagctgtgtggggatgtgactctccaggcaaacaacacttctgaggatcgtccgcaggataccaaatctcccaccagtaccaagccctgtggttttaacttctcccttctgaatgcatgtggacattctgacccttcaagcagcgtggacaaagaaaggatcctcttaactattcaggatgtgatggagctgagaagaagcctggaacttagtgtaaatctacaaaggaaacaaaaggattgttccagcgatgagtatgactctattgaggaagac

SEQ ID NO: 145839 - DNA, 767 bp, Homo sapiens
  Payload ID: 8918
  Gene Symbol: KIAA0556
  Gene Name: KIAA0556
  ENST ID: ENST00000565672
  CDS Start-End: 1-167
agagaagctggtcctgctcacgagagaaaaaggaggatattaaagcatttgaaaagcaaggaccccgtgcaattgaggctggagcacttggagcaaggtttctctgtctatgtcaacggtgccaattcggagctgaaatcatcaccgcggaaagctattcactctgacttctccagaagtgcctcccacacggaggggacacacgattatggacgaagaactctgtttcgagaagctgaagaagccttaagacgcagttcacggacagcccccagtaaagtccagcgccgaggatggcaccagaaatctgtgcagatcagaacagaagctggcccacggctccacatcgaacctcctgtggactattctgatgattttgagctgtgtggggatgtgactctccaggcaaacaacacttctgaggatcgtccgcaggataccaaatctcccaccagtaccaagccctgtggttttaacttctcccttctgaatgcatgtggacattctgacccttcaagcagcgtggacaaagaaaggatcctcttaactattcaggatgtgatggagctgagaagaagcctggaacttagtgtaaatctacaaaggaaacaaaaggattgttccagcgatgagtatgactctattgaggaagacatactctctgagcctgagccagaggacccggcactggtgggccatcccagacatgaccgccctccttccagtggcgactggactcagaaagatgttcacggggaacaggagac

SEQ ID NO: 145840 - DNA, 392 bp, Homo sapiens
  Payload ID: 8918
  Gene Symbol: KIAA0556
  Gene Name: KIAA0556
  ENST ID: ENST00000618117
  CDS Start-End: 1-333
gagtatttaatattgcttcagcagaggaaccggatattaaagcatttgaaaagcaaggaccccgtgcaattgaggctggagcacttggagcaaggtttctctgtctatgtcaacggtgccaattcggagctgaaatcatcaccgcggaaagctattcactctgacttctccagaagtgcctcccacacggaggggacacacgattatggacgaagaactctgtttcgagaagctgaagaagccttaagacgcagttcacggacagcccccagtaaagtccagcgccgaggatggcaccaggtctggagactgtggccccagcccacgctttagaatacagagtgtgggtggctgtgggaatagaaatacaatcagagcatttaaaaccccca

SEQ ID NO: 145841 - DNA, 4807 bp, Homo sapiens
  Payload ID: 8919
  Gene Symbol: KIAA0586
  Gene Name: KIAA0586
  Uniprot ID: Q9BVV6
  ENST ID: ENST00000261244
  CDS Start-End: 276-4694
ggttattgttgctcctgtggccattctcttgtcatccccactttcacattttggcgtggtgtattaatagactgagtgggattaatgggtaaatatgactttatagtcagctctaatcctggattcaatatcagaatttagattttcagctttgtggatgttcgacattttaaaaacagttattgcaaagaggtgaaaattttgttctgaagtcttaaggaaacagagaaagtttttccgtccttaagtgtgggacttgttttgtgaccaacaatatgaaaggctctgaggtcagcttggagaagaaaaaaaagattaagatgccagtgaagagacttcgtgaggtagtttctcaaaatcatggagatcatttggttttgctgaaagatgagttgccctgtgttcctccggcattgtctgcaaataaacgtcttcctgttggaacggggactagtttgaatggaacatcacgtggttcatcagacttaacttctgctagaaattgttaccagcctctattagaaaatcccatggtgtcagaaagtgatttttctaaagacgttgcagtgcaagtgttgcctttggataaaatagaagagaacaacaagcaaaaagcaaatgacatcttcatttctcagtatacaatgggacagaaagatgctctaagaacagttttaaagcaaaaagctcaaagcatgcctgtttttaaggaagtaaaggtacatctgttagaagatgcaggcatagagaaggatgctgttactcaggagactagaatttcacccagtggaattgattcagctacaaccgtggctgcagcaactgctgctgccattgcaaccgcagctccgttgataaaggtgcagagtgatttggaagcaaaagtcaattctgttacagaattacttagtaaattacaggagactgataaacacctgcaacgtgttacagagcagcaaacaagcattcagaggaaacaagagaaattacattgtcatgatcacgaaaagcaaatgaatgtgtttatggagcagcacataaggcatcttgaaaagttacaacaacaacaaatagatattcagactcattttattagtgctgcactcaagactagtagttttcagcctgttagtatgccctcctccagagcagtggaaaagtattccgtaaaaccagaacaccctaatcttggtagctgtaatccatctttatataacacatttgcttccaaacaagcacctttaaaagaagttgaagatacgagttttgataaacagaaatctcctttggagacaccagcacctcgcagatttgctcctgtacctgtttcaagggatgatgaactatcaaagagggaaaatcttttggaagaaaaagaaaatatggaagtgtcgtgtcacagaggaaatgtaagactattggaacaaattttgaataataatgattctttgacaagaaaaagtgaatcatcaaacaccacctcactaactaggtcaaaaataggatggactcctgagaaaacaaacagatttccttcctgtgaagagctagaaacaactaaagtgactatgcagaagtctgatgatgttcttcatgaccttggccaaaaagagaaagaaacaaatagcatggtccagccaaaagaatctctgagtatgttgaagcttccagatcttccacagaattctgttaagcttcaaacaaccaatacaacaagatctgtattgaaagatgctgagaagattttgagaggagtacaaaacaataaaaaagtacttgaagaaaacctggaagctattattcgtgcaaaagatggagctgccatgtattcgcttatcaatgctttatctaccaacagagagatgtcagagaaaattaggatcagaaagacagtggatgaatggattaaaactatttctgcagaaattcaggggcttttgaaagcaaccacagtaatacaagatgaagattatatgttacaagtctatggaaagccagtttatcagggccatcgaagcactcttaaaaaaggaccatatctcagatttaattctccatctcctaagtccagaccacagagaccaaaagtaatagaacgagttaaaggcactaaggtaaagtcaataagaacacagactgacttctatgcaacaaaacctaagaagatggattctaaaatgaaacattctgttcctgtgttacctcatggcgatcagcaatatttgttcagcccaagtagagaaatgcctactttttcaggtacattggaaggtcatctgattcctatggcaattcttttaggacaaacccaaagtaatagtgataccatgccacctgctggagtgattgtcagcaagccacaccctgtaactgtgactacttctattcctccatcatctcgaaaagtagaaactggagtaaagaaacctaacatagccattgtagaaatgaagtcagaaaaaaaggatcctcctcagcttactgtgcaggtattacccagtgtagatattgacagcatttcaaatagtagtgctgatgtcctttcacctctgtctagccccaaagaagcatctcttcctcctgtgcaaacttggataaagactccagaaattatgaaggtagatgaagaagaggtgaagtttccaggaactaactttgatgaaataatcgatgtcatacaggaagaagaaaaatgtgatgaaattccagactctgaaccaattctggagtttaacagaagtgttaaagctgattctacaaaatataatggtcctccatttccgccagttgcttctacttttcagcccactgctgatattctggataaagtaattgagagaaaagaaacactggaaaatagcttaattcaatgggtagagcaagaaataatgtcaagaattatctctgggctctttccagtccagcaacagattgcacctagtatcagtgtttcagtcagtgagacaagtgaaccactgacttctgacattgtggaaggaacaagcagtggcgccctccagctttttgttgatgctggtgttcctgtgaactcaaatgtgattaaacattttgttaacgaagctcttgctgagaccattgctgtcatgctgggtgacagagaagcaaagaagcaaggtcctgttgctacaggtgtttctggggatgcttcaacaaatgaaacatatttgccggcaagagtgtgcaccccactgcctaccccacagcctacgcctccttgctcaccttcatcacctgctaaggagtgtgttttggtaaagactccagattcttctccctgtgattcggatcatgatatggcttttcctgtgaaagaaatatgtgctgaaaaaggagatgatatgcctgccatcatgcttgttaatactccaacagttacccctactactacacctcctccagcggcggcagtttttaccccaactttgtcagatatttccattgataaattgaaggtatcaagcccagagcttcccaagccatggggtgatggagacctgccactggaagaagagaaccctaactcacctcaagaagaacttcatccaagagctattgtaatgtctgtggctaaggatgaagaaccagagagtatggatttccctgctcagcctccacctccagagccagttccctttatgccatttcctgccggcaccaaggccccttccccctcacagatgccaggttctgattcatcaacactggagagcacattgagtgttactgtcactgaaactgaaactttagataaacccatctctgaaggagagattttatttagctgtggtcaaaaattggcccccaagattttagaagatataggactgtacctgacaaaccttaatgatagcttatccagcactctgcatgatgccgttgaaatggaggatgatcctcctagtgaagggcaagtgattaggatgtcccataaaaaatttcatgcagatgcaattctttcttttgctaaacaaaaccaggagtcagcagtttcccagcaagcagtctatcattcagaggacttggaaaacagtgtgggtgaacttagtgaaggacaaagaccccagctaacagcggcagcagagaacatcttaatgggacattctctctatatgcagccacctgtcactaatacacagtctttggatcaacaatgtgatcctaaaccattatctcggcaatttgacacagtttcaggtagtatttatgaagattcatgtgctagtcatggtccaatgagtttgggagaattggagttggagccaaattctaagctggttcttcccacaacacttctgacagcacaagaaaatgatgttaatttaccagtagccgctgaagatttttcccagtaccaactaaagcaaaatcaggatgttaagcaagttgaacacaaaccatcacaaagttacctacgtgttagaaataaatctgatattgcaccttcacagcaacaagtttcaccaggtgatatggatcggacacaaattgagcttaatccgtacctcacatgtgtattttcaggtgggaaagcagtgccactctccgcttcacagatgccccctgccaagatgtcagtgatgctgccgtcagtgaacctcgaggactgctctcagtctctgagtctcagcacaatgcaggaggacatggagtcttcgggggcagataccttctgaacgggaagagacagccagcacagtgtttatgccactggttttaaagtcattttaccttggcttaaaaccctctctcagactgtttggtttttgagcatattctgaaaaaaaaa

SEQ ID NO: 145842 - DNA, 5226 bp, Homo sapiens
  Payload ID: 8919
  Gene Symbol: KIAA0586
  Gene Name: KIAA0586
  Uniprot ID: Q9BVV6
  ENST ID: ENST00000354386
  CDS Start-End: 245-5179
aatttacctaatcccacgtccctaacggtcttcggaagcgaagcagtgtcaacagtccctggtaaacacaagtagtattacaagtcgggagctcttcaagtcttggatgagactgtagagcggtcttgtgcggcaatgtgctaccttaaaataaataaataaataaacccctgttatgtccggagtttgtttccacccggagaggaatggaagagcaccagagagcgcttagctttctggttggatgttttggtgtgggacttgttttgtgaccaacaatatgaaaggctctgaggtcagcttggagaagaaaaaaaagattaagatgccagtgaagagacttcgtgaggtagtttctcaaaatcatggagatcatttggttttgctgaaagatgagttgccctgtgttcctccggcattgtctgcaaataaacgtcttcctgttggaacggggactagtttgaatggaacatcacgtggttcatcagacttaacttctgctagaaattgttaccagcctctattagaaaatcccatggtgtcagaaagtgatttttctaaagacgttgcagtgcaagtgttgcctttggataaaatagaagagaacaacaagcaaaaagcaaatgacatcttcatttctcagtatacaatgggacagaaagatgctctaagaacagttttaaagcaaaatgtctcactttgtctcacaggctggagtgatcacagtggggtgatcacaactcactgcagtctctacctcctcaggctcatgagatcctcccacctcagcctcccgagtagctgggactacagagctcaaagcatgcctgtttttaaggaagtaaaggtacatctgttagaagatgcaggcatagagaaggatgctgttactcaggagactagaatttcacccagtggaattgattcagctacaaccgtggctgcagcaactgctgctgccattgcaaccgcagctccgttgataaaggtgcagagtgatttggaagcaaaagtcaattctgttacagaattacttagtaaattacaggagactgataaacacctgcaacgtgttacagagcagcaaacaagcattcagaggaaacaagagaaattacattgtcatgatcacgaaaagcaaatgaatgtgtttatggagcagcacataaggcatcttgaaaagttacaacaacaacaaatagatattcagactcattttattagtgctgcactcaagactagtagttttcagcctgttagtatgccctcctccagagcagtggaaaagtattccgtaaaaccagaacaccctaatcttggtagctgtaatccatctttatataacacatttgcttccaaacaagcacctttaaaagaagttgaagatacgagttttgataaacagaaatctcctttggagacaccagcacctcgcagatttgctcctgtacctgtttcaagggatgatgaactatcaaagagggaaaatcttttggaagaaaaagaaaatatggaagtgtcgtgtcacagaggaaatgtaagactattggaacaaattttgaataataatgattctttgacaagaaaaagtgaatcatcaaacaccacctcactaactaggtcaaaaataggatggactcctgagaaaacaaacagatttccttcctgtgaagagctagaaacaactaaagtgactatgcagaagtctgatgatgttcttcatgaccttggccaaaaagagaaagaaacaaatagcatggtccagccaaaagaatctctgagtatgttgaagcttccagatcttccacagaattctgttaagcttcaaacaaccaatacaacaagatctgtattgaaagatgctgagaagattttgagaggagtacaaaacaataaaaaagtacttgaagaaaacctggaagctattattcgtgcaaaagatggagctgccatgtattcgcttatcaatgctttatctaccaacagagagatgtcagagaaaattaggatcagaaagacagtggatgaatggattaaaactatttctgcagaaattcaggatgaactgtcaagaacagattatgaacaaaaaagatttgatcagaagaatcagagaaccaagaaaggtcagaatatgactaaagatattagaaccaacacacaagataaaactgtcaacaaatctgtaattccaagaaaacattctcaaaagcaaatagaagagcattttagaaatctacctatgaggggcatgcctgcttcaagtttacagaaagagagaaaggaagggcttttgaaagcaaccacagtaatacaagatgaagattatatgttacaagtctatggaaagccagtttatcagggccatcgaagcactcttaaaaaaggaccatatctcagatttaattctccatctcctaagtccagaccacagagaccaaaagtaatagaacgagttaaaggcactaaggtaaagtcaataagaacacagactgacttctatgcaacaaaacctaagaagatggattctaaaatgaaacattctgttcctgtgttacctcatggcgatcagcaatatttgttcagcccaagtagagaaatgcctactttttcaggtacattggaaggtcatctgattcctatggcaattcttttaggacaaacccaaagtaatagtgataccatgccacctgctggagtgattgtcagcaagccacaccctgtaactgtgactacttctattcctccatcatctcgaaaagtagaaactggagtaaagaaacctaacatagccattgtagaaatgaagtcagaaaaaaaggatcctcctcagcttactgtgcaggtattacccagtgtagatattgacagcatttcaaatagtagtgctgatgtcctttcacctctgtctagccccaaagaagcatctcttcctcctgtgcaaacttggataaagactccagaaattatgaaggtagatgaagaagaggtgaagtttccaggaactaactttgatgaaataatcgatgtcatacaggaagaagaaaaatgtgatgaaattccagactctgaaccaattctggagtttaacagaagtgttaaagctgattctacaaaatataatggtcctccatttccgccagttgcttctacttttcagcccactgctgatattctggataaagtaattgagagaaaagaaacactggaaaatagcttaattcaatgggtagagcaagaaataatgtcaagaattatctctgggctctttccagtccagcaacagattgcacctagtatcagtgtttcagtcagtgagacaagtgaaccactgacttctgacattgtggaaggaacaagcagtggcgccctccagctttttgttgatgctggtgttcctgtgaactcaaatgtgattaaacattttgttaacgaagctcttgctgagaccattgctgtcatgctgggtgacagagaagcaaagaagcaaggtcctgttgctacaggtgtttctggggatgcttcaacaaatgaaacatatttgccggcaagagtgtgcaccccactgcctaccccacagcctacgcctccttgctcaccttcatcacctgctaaggagtgtgttttggtaaagactccagattcttctccctgtgattcggatcatgatatggcttttcctgtgaaagaaatatgtgctgaaaaaggagatgatatgcctgccatcatgcttgttaatactccaacagttacccctactactacacctcctccagcggcggcagtttttaccccaactttgtcagatatttccattgataaattgaaggtatcaagcccagagcttcccaagccatggggtgatggagacctgccactggaagaagagaaccctaactcacctcaagaagaacttcatccaagagctattgtaatgtctgtggctaaggatgaagaaccagagagtatggatttccctgctcagcctccacctccagagccagttccctttatgccatttcctgccggcaccaaggccccttccccctcacagatgccaggttctgattcatcaacactggagagcacattgagtgttactgtcactgaaactgaaactttagataaacccatctctgaaggagagattttatttagctgtggtcaaaaattggcccccaagattttagaagatataggactgtacctgacaaaccttaatgatagcttatccagcactctgcatgatgccgttgaaatggaggatgatcctcctagtgaagggcaagtgattaggatgtcccataaaaaatttcatgcagatgcaattctttcttttgctaaacaaaaccaggagtcagcagtttcccagcaagcagtctatcattcagaggacttggaaaacagtgtgggtgaacttagtgaaggacaaagaccccagctaacagcggcagcagagaacatcttaatgggacattctctctatatgcagccacctgtcactaatacacagtctttggatcaacaatgtgatcctaaaccattatctcggcaatttgacacagtttcaggtagtatttatgaagattcatgtgctagtcatggtccaatgagtttgggagaattggagttggagccaaattctaagctggttcttcccacaacacttctgacagcacaagaaaatgatgttaatttaccagtagccgctgaagatttttcccagtaccaactaaagcaaaatcaggatgttaagcaagttgaacacaaaccatcacaaagttacctacgtgttagaaataaatctgatattgcaccttcacagcaacaagtttcaccaggtgatatggatcggacacaaattgagcttaatccgtacctcacatgtgtattttcaggtttgggggtacatgtgaagaaggtttcctgtataggtaaactcgggctgtggaggtttgtcatacagattatttcatcacccaggtgggaaagcagtgccactctccgcttcacagatgccccctgccaagatgtcagtgatgctgccgtcagtgaacctcgaggactgctctcagtctctgagtctcagcacaatgcaggaggacatggagtcttcgggggcagataccttctgaacgggaagagacagccagcacagtgtttatgccactggttttaaagtcattttaccttggcttaaaaccctctctcagactgtttggtttt

SEQ ID NO: 145843 - DNA, 5339 bp, Homo sapiens
  Payload ID: 8919
  Gene Symbol: KIAA0586
  Gene Name: KIAA0586
  Uniprot ID: Q9BVV6
  ENST ID: ENST00000423743
  CDS Start-End: 259-4773
acagtccctggtaaacacaagtagtattacaagtcgggagctcttcaagtcttggatgagactgtagagcggtcttgtgcggcaatgtgctaccttaaaataaataaataaataaacccctgttatgtccggagtttgtttccacccggagaggaatggaagagcaccagagagcgcttagctttctggttggatgttttgggttcatcagacttaacttctgctagaaattgttaccagcctctattagaaaatcccatggtgtcagaaagtgatttttctaaagacgttgcagtgcaagtgttgcctttggataaaatagaagagaacaacaagcaaaaagcaaatgacatcttcatttctcagtatacaatgggacagaaagatgctctaagaacagttttaaagcaaaatgtctcactttgtctcacaggctggagtgatcacagtggggtgatcacaactcactgcagtctctacctcctcaggctcatgagatcctcccacctcagcctcccgagtagctgggactacagagctcaaagcatgcctgtttttaaggaagtaaaggtacatctgttagaagatgcaggcatagagaaggatgctgttactcaggagactagaatttcacccagtggaattgattcagctacaaccgtggctgcagcaactgctgctgccattgcaaccgcagctccgttgataaaggtgcagagtgatttggaagcaaaagtcaattctgttacagaattacttagtaaattacaggagactgataaacacctgcaacgtgttacagagcagcaaacaagcattcagaggaaacaagagaaattacattgtcatgatcacgaaaagcaaatgaatgtgtttatggagcagcacataaggcatcttgaaaagttacaacaacaacaaatagatattcagactcattttattagtgctgcactcaagactagtagttttcagcctgttagtatgccctcctccagagcagtggaaaagtattccgtaaaaccagaacaccctaatcttggtagctgtaatccatctttatataacacatttgcttccaaacaagcacctttaaaagaagttgaagatacgagttttgataaacagaaatctcctttggagacaccagcacctcgcagatttgctcctgtacctgtttcaagggatgatgaactatcaaagagggaaaatcttttggaagaaaaagaaaatatggaagtgtcgtgtcacagaggaaatgtaagactattggaacaaattttgaataataatgattctttgacaagaaaaagtgaatcatcaaacaccacctcactaactaggtcaaaaataggatggactcctgagaaaacaaacagatttccttcctgtgaagagctagaaacaactaaagtgactatgcagaagtctgatgatgttcttcatgaccttggccaaaaagagaaagaaacaaatagcatggtccagccaaaagaatctctgagtatgttgaagcttccagatcttccacagaattctgttaagcttcaaacaaccaatacaacaagatctgtattgaaagatgctgagaagattttgagaggagtacaaaacaataaaaaagtacttgaagaaaacctggaagctattattcgtgcaaaagatggagctgccatgtattcgcttatcaatgctttatctaccaacagagagatgtcagagaaaattaggatcagaaagacagtggatgaatggattaaaactatttctgcagaaattcaggatgaactgtcaagaacagattatgaacaaaaaagatttgatcagaagaatcagagaaccaagaaaggtcagaatatgactaaagatattagaaccaacacacaagataaaactgtcaacaaatctgtaattccaagaaaacattctcaaaagcaaatagaagagcattttagaaatctacctatgaggggcatgcctgcttcaagtttacagaaagagagaaaggaagggcttttgaaagcaaccacagtaatacaagatgaagattatatgttacaagtctatggaaagccagtttatcagggccatcgaagcactcttaaaaaaggaccatatctcagatttaattctccatctcctaagtccagaccacagagaccaaaagtaatagaacgagttaaaggcactaaggtaaagtcaataagaacacagactgacttctatgcaacaaaacctaagaagatggattctaaaatgaaacattctgttcctgtgttacctcatggcgatcagcaatatttgttcagcccaagtagagaaatgcctactttttcaggtacattggaaggtcatctgattcctatggcaattcttttaggacaaacccaaagtaatagtgataccatgccacctgctggagtgattgtcagcaagccacaccctgtaactgtgactacttctattcctccatcatctcgaaaagtagaaactggagtaaagaaacctaacatagccattgtagaaatgaagtcagaaaaaaaggatcctcctcagcttactgtgcaggtattacccagtgtagatattgacagcatttcaaatagtagtgctgatgtcctttcacctctgtctagccccaaagaagcatctcttcctcctgtgcaaacttggataaagactccagaaattatgaaggtagatgaagaagaggtgaagtttccaggaactaactttgatgaaataatcgatgtcatacaggaagaagaaaaatgtgatgaaattccagactctgaaccaattctggagtttaacagaagtgttaaagctgattctacaaaatataatggtcctccatttccgccagttgcttctacttttcagcccactgctgatattctggataaagtaattgagagaaaagaaacactggaaaatagcttaattcaatgggtagagcaagaaataatgtcaagaattatctctgggctctttccagtccagcaacagattgcacctagtatcagtgtttcagtcagtgagacaagtgaaccactgacttctgacattgtggaaggaacaagcagtggcgccctccagctttttgttgatgctggtgttcctgtgaactcaaatgtgattaaacattttgttaacgaagctcttgctgagaccattgctgtcatgctgggtgacagagaagcaaagaagcaaggtcctgttgctacaggtgtttctggggatgcttcaacaaatgaaacatatttgccggcaagagtgtgcaccccactgcctaccccacagcctacgcctccttgctcaccttcatcacctgctaaggagtgtgttttggtaaagactccagattcttctccctgtgattcggatcatgatatggcttttcctgtgaaagaaatatgtgctgaaaaaggagatgatatgcctgccatcatgcttgttaatactccaacagttacccctactactacacctcctccagcggcggcagtttttaccccaactttgtcagatatttccattgataaattgaaggtatcaagcccagagcttcccaagccatggggtgatggagacctgccactggaagaagagaaccctaactcacctcaagaagaacttcatccaagagctattgtaatgtctgtggctaaggatgaagaaccagagagtatggatttccctgctcagcctccacctccagagccagttccctttatgccatttcctgccggcaccaaggccccttccccctcacagatgccaggttctgattcatcaacactggagagcacattgagtgttactgtcactgaaactgaaactttagataaacccatctctgaaggagagattttatttagctgtggtcaaaaattggcccccaagattttagaagatataggactgtacctgacaaaccttaatgatagcttatccagcactctgcatgatgccgttgaaatggaggatgatcctcctagtgaagggcaagtgattaggatgtcccataaaaaatttcatgcagatgcaattctttcttttgctaaacaaaaccaggagtcagcagtttcccagcaagcagtctatcattcagaggacttggaaaacagtgtgggtgaacttagtgaaggacaaagaccccagctaacagcggcagcagagaacatcttaatgggacattctctctatatgcagccacctgtcactaatacacagtctttggatcaacaatgtgatcctaaaccattatctcggcaatttgacacagtttcaggtagtatttatgaagattcatgtgctagtcatggtccaatgagtttgggagaattggagttggagccaaattctaagctggttcttcccacaacacttctgacagcacaagaaaatgatgttaatttaccagtagccgctgaagatttttcccagtaccaactaaagcaaaatcaggatgttaagcaagttgaacacaaaccatcacaaagttacctacgtgttagaaataaatctgatattgcaccttcacagcaacaagtttcaccaggtgatatggatcggacacaaattgagcttaatccgtacctcacatgtgtattttcaggtgggaaagcagtgccactctccgcttcacagatgccccctgccaagatgtcagtgatgctgccgtcagtgaacctcgaggactgctctcagtctctgagtctcagcacaatgcaggaggacatggagtcttcgggggcagataccttctgaacgggaagagacagccagcacagtgtttatgccactggttttaaagtcattttaccttggcttaaaaccctctctcagactgtttggtttttgagcatattctgaaaaaaaaattccaatattttaaaataaaacaaaaagcataatttgggtatttaaagtttttaaataaaataagtataagtcattataagtctgattgtgagttgtttcttagaatcctgagatagcatagagtagtgaaagggcatggcttttgacatctaggcatttaatctataggtgtaattatctgtatgtatttataaaattatgtagctcaaggttattcattctaacatttttataacagcaaatagaaaaaatcaaatgtctatcaataatagactggttttaaagtgatggtacatcagtacaatggaatactatgtattacaaaaaaaaatttaaaaagtttattgatatggaataatctttgagatgcactgttaaagtgaaaaaagccatgtgcaaaatagtgtgtgaactatgcagttgttgaaattatttaaaatggggtggggagg

SEQ ID NO: 145844 - DNA, 846 bp, Homo sapiens
  Payload ID: 8919
  Gene Symbol: KIAA0586
  Gene Name: KIAA0586
  ENST ID: ENST00000555833
  CDS Start-End: 143-846
agattacacccacgacggtgcgggtctcgggcgttctggagatacgtaggggtgaatttatgtttccgacgattgcatctggaggggttcatcagacttaacttctgctagaaattgttaccagcctctattagaaaatcccatggtgtcagaaagtgatttttctaaagacgttgcagtgcaagtgttgcctttggataaaatagaagagaacaacaagcaaaaagcaaatgacatcttcatttctcagtatacaatgggacagaaagatgctctaagaacagttttaaagcaaaaagctcaaagcatgcctgtttttaaggaagtaaaggtacatctgttagaagatgcaggcatagagaaggatgctgttactcaggagactagaatttcacccagtggaattgattcagctacaaccgtggctgcagcaactgctgctgccattgcaaccgcagctccgttgataaaggtgcagagtgatttggaagcaaaagtcaattctgttacagaattacttagtaaattacaggagactgataaacacctgcaacgtgttacagagcagcaaacaagcattcagaggaaacaagagaaattacattgtcatgatcacgaaaagcaaatgaatgtgtttatggagcagcacataaggcatcttgaaaagttacaacaacaacaaatagatattcagactcattttattagtgctgcactcaagactagtagttttcagcctgttagtatgccctcctccagagcagtggaaaagtattccgtaaaaccagaacaccctaatcttggtagctgtaatccatctttatataacacatttgcttccaaaca

SEQ ID NO: 145845 - DNA, 814 bp, Homo sapiens
  Payload ID: 8919
  Gene Symbol: KIAA0586
  Gene Name: KIAA0586
  ENST ID: ENST00000555397
  CDS Start-End: 1-627
agcttatccagcactctgcatgatgccgttgaaatggacttggaaaacagtgtgggtgaacttagtgaaggacaaagaccccagctaacagcggcagcagagaacatcttaatgggacattctctctatatgcagccacctgtcactaatacacagtctttggatcaacaatgtgatcctaaaccattatctcggcaatttgacacagtttcaggtagtatttatgaagattcatgtgctagtcatggtccaatgagtttgggagaattggagttggagccaaattctaagctggttcttcccacaacacttctgacagcacaagaaaatgatgttaatttaccagtagccgctgaagatttttcccagtaccaactaaagcaaaatcaggatgttaagcaagttgaacacaaaccatcacaaagttacctacgtgttagaaataaatctgatattgcaccttcacagcaacaaggtgggaaagcagtgccactctccgcttcacagatgccccctgccaagatgtcagtgatgctgccgtcagtgaacctcgaggactgctctcagtctctgagtctcagcacaatgcaggaggacatggagtcttcgggggcagataccttctgaacgggaagagacagccagcacagtgtttatgccactggttttaaagtcattttaccttggcttaaaaccctctctcagactgtttggtttttgagcatattctgaaaaaaaaattccaatattttaaaataaaacaaaaagcataatttgggtatttaaagtttttaaataaaataagtataagtca

SEQ ID NO: 145846 - DNA, 582 bp, Homo sapiens
  Payload ID: 8919
  Gene Symbol: KIAA0586
  Gene Name: KIAA0586
  ENST ID: ENST00000554463
  CDS Start-End: 187-582
agattacacccacgacggtgcgggtctcgggcgttctggagatacgtaggggtgaatttatgtttccgacgattgcatctggaggggtgtgtaagactctgtggctgaagaaagctattacgcttcttatgttcatcagacttaacttctgctagaaattgttaccagcctctattagaaaatcccatggtgtcagaaagtgatttttctaaagacgttgcagtgcaagtgttgcctttggataaaatagaagagaacaacaagcaaaaagcaaatgacatcttcatttctcagtatacaatgggacagaaagatgctctaagaacagttttaaagcaaaaagctcaaagcatgcctgtttttaaggaagtaaaggtacatctgttagaagatgcaggcatagagaaggatgctgttactcaggagactagaatttcacccagtggaattgattcagctacaaccgtggctgcagcaactgctgctgccattgcaaccgcagctccgttgataaaggtgcagagtgatttggaagcaaaagtcaattctgttacagaattacttagtaaattacaggagact

SEQ ID NO: 145847 - DNA, 5912 bp, Homo sapiens
  Payload ID: 8919
  Gene Symbol: KIAA0586
  Gene Name: KIAA0586
  Uniprot ID: Q9BVV6
  ENST ID: ENST00000556134
  CDS Start-End: 502-5016
aatttacctaatcccacgtccctaacggtcttcggaagcgaagcagtgtcaacagtccctggtaaacacaagtagtattacaagtcgggagctcttcaagtcttggatgagactgtagagcggtcttgtgcggcaatgtgctaccttaaaataaataaataaataaacccctgttatgtccggagtttgtttccacccggagaggaatggaagagcaccagagagcgcttagctttctggttggatgttttgggctctgaggtcagcttggagaagaaaaaaaagattaagatgccagtgaagagacttcgtgaggtagtttctcaaaatcatggagatcatttggttttgctgaaagatgagttgccctgtgttcctccggcattgtctgcaaataaacgtcttcctgttggaacggggactagtttgaatggaacatcacgtggttcatcagacttaacttctgctagaaattgttaccagcctctattagaaaatcccatggtgtcagaaagtgatttttctaaagacgttgcagtgcaagtgttgcctttggataaaatagaagagaacaacaagcaaaaagcaaatgacatcttcatttctcagtatacaatgggacagaaagatgctctaagaacagttttaaagcaaaatgtctcactttgtctcacaggctggagtgatcacagtggggtgatcacaactcactgcagtctctacctcctcaggctcatgagatcctcccacctcagcctcccgagtagctgggactacagagctcaaagcatgcctgtttttaaggaagtaaaggtacatctgttagaagatgcaggcatagagaaggatgctgttactcaggagactagaatttcacccagtggaattgattcagctacaaccgtggctgcagcaactgctgctgccattgcaaccgcagctccgttgataaaggtgcagagtgatttggaagcaaaagtcaattctgttacagaattacttagtaaattacaggagactgataaacacctgcaacgtgttacagagcagcaaacaagcattcagaggaaacaagagaaattacattgtcatgatcacgaaaagcaaatgaatgtgtttatggagcagcacataaggcatcttgaaaagttacaacaacaacaaatagatattcagactcattttattagtgctgcactcaagactagtagttttcagcctgttagtatgccctcctccagagcagtggaaaagtattccgtaaaaccagaacaccctaatcttggtagctgtaatccatctttatataacacatttgcttccaaacaagcacctttaaaagaagttgaagatacgagttttgataaacagaaatctcctttggagacaccagcacctcgcagatttgctcctgtacctgtttcaagggatgatgaactatcaaagagggaaaatcttttggaagaaaaagaaaatatggaagtgtcgtgtcacagaggaaatgtaagactattggaacaaattttgaataataatgattctttgacaagaaaaagtgaatcatcaaacaccacctcactaactaggtcaaaaataggatggactcctgagaaaacaaacagatttccttcctgtgaagagctagaaacaactaaagtgactatgcagaagtctgatgatgttcttcatgaccttggccaaaaagagaaagaaacaaatagcatggtccagccaaaagaatctctgagtatgttgaagcttccagatcttccacagaattctgttaagcttcaaacaaccaatacaacaagatctgtattgaaagatgctgagaagattttgagaggagtacaaaacaataaaaaagtacttgaagaaaacctggaagctattattcgtgcaaaagatggagctgccatgtattcgcttatcaatgctttatctaccaacagagagatgtcagagaaaattaggatcagaaagacagtggatgaatggattaaaactatttctgcagaaattcaggatgaactgtcaagaacagattatgaacaaaaaagatttgatcagaagaatcagagaaccaagaaaggtcagaatatgactaaagatattagaaccaacacacaagataaaactgtcaacaaatctgtaattccaagaaaacattctcaaaagcaaatagaagagcattttagaaatctacctatgaggggcatgcctgcttcaagtttacagaaagagagaaaggaagggcttttgaaagcaaccacagtaatacaagatgaagattatatgttacaagtctatggaaagccagtttatcagggccatcgaagcactcttaaaaaaggaccatatctcagatttaattctccatctcctaagtccagaccacagagaccaaaagtaatagaacgagttaaaggcactaaggtaaagtcaataagaacacagactgacttctatgcaacaaaacctaagaagatggattctaaaatgaaacattctgttcctgtgttacctcatggcgatcagcaatatttgttcagcccaagtagagaaatgcctactttttcaggtacattggaaggtcatctgattcctatggcaattcttttaggacaaacccaaagtaatagtgataccatgccacctgctggagtgattgtcagcaagccacaccctgtaactgtgactacttctattcctccatcatctcgaaaagtagaaactggagtaaagaaacctaacatagccattgtagaaatgaagtcagaaaaaaaggatcctcctcagcttactgtgcaggtattacccagtgtagatattgacagcatttcaaatagtagtgctgatgtcctttcacctctgtctagccccaaagaagcatctcttcctcctgtgcaaacttggataaagactccagaaattatgaaggtagatgaagaagaggtgaagtttccaggaactaactttgatgaaataatcgatgtcatacaggaagaagaaaaatgtgatgaaattccagactctgaaccaattctggagtttaacagaagtgttaaagctgattctacaaaatataatggtcctccatttccgccagttgcttctacttttcagcccactgctgatattctggataaagtaattgagagaaaagaaacactggaaaatagcttaattcaatgggtagagcaagaaataatgtcaagaattatctctgggctctttccagtccagcaacagattgcacctagtatcagtgtttcagtcagtgagacaagtgaaccactgacttctgacattgtggaaggaacaagcagtggcgccctccagctttttgttgatgctggtgttcctgtgaactcaaatgtgattaaacattttgttaacgaagctcttgctgagaccattgctgtcatgctgggtgacagagaagcaaagaagcaaggtcctgttgctacaggtgtttctggggatgcttcaacaaatgaaacatatttgccggcaagagtgtgcaccccactgcctaccccacagcctacgcctccttgctcaccttcatcacctgctaaggagtgtgttttggtaaagactccagattcttctccctgtgattcggatcatgatatggcttttcctgtgaaagaaatatgtgctgaaaaaggagatgatatgcctgccatcatgcttgttaatactccaacagttacccctactactacacctcctccagcggcggcagtttttaccccaactttgtcagatatttccattgataaattgaaggtatcaagcccagagcttcccaagccatggggtgatggagacctgccactggaagaagagaaccctaactcacctcaagaagaacttcatccaagagctattgtaatgtctgtggctaaggatgaagaaccagagagtatggatttccctgctcagcctccacctccagagccagttccctttatgccatttcctgccggcaccaaggccccttccccctcacagatgccaggttctgattcatcaacactggagagcacattgagtgttactgtcactgaaactgaaactttagataaacccatctctgaaggagagattttatttagctgtggtcaaaaattggcccccaagattttagaagatataggactgtacctgacaaaccttaatgatagcttatccagcactctgcatgatgccgttgaaatggaggatgatcctcctagtgaagggcaagtgattaggatgtcccataaaaaatttcatgcagatgcaattctttcttttgctaaacaaaaccaggagtcagcagtttcccagcaagcagtctatcattcagaggacttggaaaacagtgtgggtgaacttagtgaaggacaaagaccccagctaacagcggcagcagagaacatcttaatgggacattctctctatatgcagccacctgtcactaatacacagtctttggatcaacaatgtgatcctaaaccattatctcggcaatttgacacagtttcaggtagtatttatgaagattcatgtgctagtcatggtccaatgagtttgggagaattggagttggagccaaattctaagctggttcttcccacaacacttctgacagcacaagaaaatgatgttaatttaccagtagccgctgaagatttttcccagtaccaactaaagcaaaatcaggatgttaagcaagttgaacacaaaccatcacaaagttacctacgtgttagaaataaatctgatattgcaccttcacagcaacaagtttcaccaggtgatatggatcggacacaaattgagcttaatccgtacctcacatgtgtattttcaggtgggaaagcagtgccactctccgcttcacagatgccccctgccaagatgtcagtgatgctgccgtcagtgaacctcgaggactgctctcagtctctgagtctcagcacaatgcaggaggacatggagtcttcgggggcagataccttctgaacgggaagagacagccagcacagtgtttatgccactggttttaaagtcattttaccttggcttaaaaccctctctcagactgtttggtttttgagcatattctgaaaaaaaaattccaatattttaaaataaaacaaaaagcataatttgggtatttaaagtttttaaataaaataagtataagtcattataagtctgattgtgagttgtttcttagaatcctgagatagcatagagtagtgaaagggcatggcttttgacatctaggcatttaatctataggtgtaattatctgtatgtatttataaaattatgtagctcaaggttattcattctaacatttttataacagcaaatagaaaaaatcaaatgtctatcaataatagactggttttaaagtgatggtacatcagtacaatggaatactatgtattacaaaaaaaaatttaaaaagtttattgatatggaataatctttgagatgcactgttaaagtgaaaaaagccatgtgcaaaatagtgtgtgaactatgcagttgttgaaattatttaaaatggggtggggaggaattcaaatgtatggtatgtcacatattcttacatgtatttgcttgtaaatatattatataaacaagaaactgctaagtttgtctccagggagtagaattgttggctgggtgataggagaggctaagtgataggaatcaaggataatcgtggttactatgtatttgaacttcagttgtgatagaaaaaaatcatcagtgagattaatttttatatgccttatgtataccatataaacctttataaacctgtgaaacatgtaactctattaccttttgcaacataaatacataaaattaaaggaaaataaaaagcattgcttcgtaatcag

SEQ ID NO: 145848 - DNA, 684 bp, Homo sapiens
  Payload ID: 8919
  Gene Symbol: KIAA0586
  Gene Name: KIAA0586
  ENST ID: ENST00000555203
  CDS Start-End: 187-456
gaagggaagtgggtgttgacctgcgggcaactgacgctgttgtcagattacacccacgacggtgcgggtctcgggcgttctggagatacgtaggggtgaatttatgtttccgacgattgcatctggaggggttcatcagacttaacttctgctagaaattgttaccagcctctattagaaaatcccatggtgtcagaaagtgatttttctaaagacgttgcagtgcaagtgttgcctttggataaaatagaagagaacaacaagcaaaaagcaaatgacatcttcatttctcagtatacaatgggacagaaagatgctctaagaacagttttaaagcaaaaagacagggtttgccatgttgcccagctggtcttgaactcctgggctcaagcagtcttcctgcctcagcctcccacagtgctaggattacagagctcaaagcatgcctgtttttaaggaagtaaaggtacatctgttagaagatgcaggcatagagaaggatgctgttactcaggagactagaatttcacccagtggaattgattcagctacaaccgtggctgcagcaactgctgctgccattgcaaccgcagctccgttgataaaggtgcagagtgatttggaagcaaaagtcaattctgttacagaattacttagtaaattacaggagactgataaacacct

SEQ ID NO: 145849 - DNA, 8233 bp, Homo sapiens
  Payload ID: 8919
  Gene Symbol: KIAA0586
  Gene Name: KIAA0586
  Uniprot ID: Q9BVV6
  ENST ID: ENST00000619416
  CDS Start-End: 275-4876
gtccctaacggtcttcggaagcgaagcagtgtcaacagtccctggtaaacacaagtagtattacaagtcgggagctcttcaagtcttggatgagactgtagagcggtcttgtgcggcaatgtgctaccttaaaataaataaataaataaacccctgttatgtccggagtttgtttccacccggagaggaatggaagagcaccagagagcgcttagctttctggttggatgttttgggctctgaggtcagcttggagaagaaaaaaaagattaagatgccagtgaagagacttcgtgaggtagtttctcaaaatcatggagatcatttggttttgctgaaagatgagttgccctgtgttcctccggcattgtctgcaaataaacgtcttcctgttggaacggggactagtttgaatggaacatcacgtggttcatcagacttaacttctgctagaaattgttaccagcctctattagaaaatcccatggtgtcagaaagtgatttttctaaagacgttgcagtgcaagtgttgcctttggataaaatagaagagaacaacaagcaaaaagcaaatgacatcttcatttctcagtatacaatgggacagaaagatgctctaagaacagttttaaagcaaaaagctcaaagcatgcctgtttttaaggaagtaaaggtacatctgttagaagatgcaggcatagagaaggatgctgttactcaggagactagaatttcacccagtggaattgattcagctacaaccgtggctgcagcaactgctgctgccattgcaaccgcagctccgttgataaaggtgcagagtgatttggaagcaaaagtcaattctgttacagaattacttagtaaattacaggagactgataaacacctgcaacgtgttacagagcagcaaacaagcattcagaggaaacaagagaaattacattgtcatgatcacgaaaagcaaatgaatgtgtttatggagcagcacataaggcatcttgaaaagttacaacaacaacaaatagatattcagactcattttattagtgctgcactcaagactagtagttttcagcctgttagtatgccctcctccagagcagtggaaaagtattccgtaaaaccagaacaccctaatcttggtagctgtaatccatctttatataacacatttgcttccaaacaagcacctttaaaagaagttgaagatacgagttttgataaacagaaatctcctttggagacaccagcacctcgcagatttgctcctgtacctgtttcaagggatgatgaactatcaaagagggaaaatcttttggaagaaaaagaaaatatggaagtgtcgtgtcacagaggaaatgtaagactattggaacaaattttgaataataatgattctttgacaagaaaaagtgaatcatcaaacaccacctcactaactaggtcaaaaataggatggactcctgagaaaacaaacagatttccttcctgtgaagagctagaaacaactaaagtgactatgcagaagtctgatgatgttcttcatgaccttggccaaaaagagaaagaaacaaatagcatggtccagccaaaagaatctctgagtatgttgaagcttccagatcttccacagaattctgttaagcttcaaacaaccaatacaacaagatctgtattgaaagatgctgagaagattttgagaggagtacaaaacaataaaaaagtacttgaagaaaacctggaagctattattcgtgcaaaagatggagctgccatgtattcgcttatcaatgctttatctaccaacagagagatgtcagagaaaattaggatcagaaagacagtggatgaatggattaaaactatttctgcagaaattcaggatgaactgtcaagaacagattatgaacaaaaaagatttgatcagaagaatcagagaaccaagaaaggtcagaatatgactaaagatattagaaccaacacacaagataaaactgtcaacaaatctgtaattccaagaaaacattctcaaaagcaaatagaagagcattttagaaatctacctatgaggggcatgcctgcttcaagtttacagaaagagagaaaggaagggcttttgaaagcaaccacagtaatacaagatgaagattatatgttacaagtctatggaaagccagtttatcagggccatcgaagcactcttaaaaaaggaccatatctcagatttaattctccatctcctaagtccagaccacagagaccaaaagtaatagaacgagttaaaggcactaaggtaaagtcaataagaacacagactgacttctatgcaacaaaacctaagaagatggattctaaaatgaaacattctgttcctgtgttacctcatggcgatcagcaatatttgttcagcccaagtagagaaatgcctactttttcaggtacattggaaggtcatctgattcctatggcaattcttttaggacaaacccaaagtaatagtgataccatgccacctgctggagtgattgtcagcaagccacaccctgtaactgtgactacttctattcctccatcatctcgaaaagtagaaactggagtaaagaaacctaacatagccattgtagaaatgaagtcagaaaaaaaggatcctcctcagcttactgtgcaggtattacccagtgtagatattgacagcatttcaaatagtagtgctgatgtcctttcacctctgtctagccccaaagaagcatctcttcctcctgtgcaaacttggataaagactccagaaattatgaaggtagatgaagaagaggtgaagtttccaggaactaactttgatgaaataatcgatgtcatacaggaagaagaaaaatgtgatgaaattccagactctgaaccaattctggagtttaacagaagtgttaaagctgattctacaaaatataatggtcctccatttccgccagttgcttctacttttcagcccactgctgatattctggataaagtaattgagagaaaagaaacactggaaaatagcttaattcaatgggtagagcaagaaataatgtcaagaattatctctgggctctttccagtccagcaacagattgcacctagtatcagtgtttcagtcagtgagacaagtgaaccactgacttctgacattgtggaaggaacaagcagtggcgccctccagctttttgttgatgctggtgttcctgtgaactcaaatgtgattaaacattttgttaacgaagctcttgctgagaccattgctgtcatgctgggtgacagagaagcaaagaagcaaggtcctgttgctacaggtgtttctggggatgcttcaacaaatgaaacatatttgccggcaagagtgtgcaccccactgcctaccccacagcctacgcctccttgctcaccttcatcacctgctaaggagtgtgttttggtaaagactccagattcttctccctgtgattcggatcatgatatggcttttcctgtgaaagaaatatgtgctgaaaaaggagatgatatgcctgccatcatgcttgttaatactccaacagttacccctactactacacctcctccagcggcggcagtttttaccccaactttgtcagatatttccattgataaattgaaggtatcaagcccagagcttcccaagccatggggtgatggagacctgccactggaagaagagaaccctaactcacctcaagaagaacttcatccaagagctattgtaatgtctgtggctaaggatgaagaaccagagagtatggatttccctgctcagcctccacctccagagccagttccctttatgccatttcctgccggcaccaaggccccttccccctcacagatgccaggttctgattcatcaacactggagagcacattgagtgttactgtcactgaaactgaaactttagataaacccatctctgaaggagagattttatttagctgtggtcaaaaattggcccccaagattttagaagatataggactgtacctgacaaaccttaatgatagcttatccagcactctgcatgatgccgttgaaatggaggatgatcctcctagtgaagggcaagtgattaggatgtcccataaaaaatttcatgcagatgcaattctttcttttgctaaacaaaaccaggagtcagcagtttcccagcaagcagtctatcattcagaggacttggaaaacagtgtgggtgaacttagtgaaggacaaagaccccagctaacagcggcagcagagaacatcttaatgggacattctctctatatgcagccacctgtcactaatacacagtctttggatcaacaatgtgatcctaaaccattatctcggcaatttgacacagtttcaggtagtatttatgaagattcatgtgctagtcatggtccaatgagtttgggagaattggagttggagccaaattctaagctggttcttcccacaacacttctgacagcacaagaaaatgatgttaatttaccagtagccgctgaagatttttcccagtaccaactaaagcaaaatcaggatgttaagcaagttgaacacaaaccatcacaaagttacctacgtgttagaaataaatctgatattgcaccttcacagcaacaagtttcaccaggtgatatggatcggacacaaattgagcttaatccgtacctcacatgtgtattttcaggtgggaaagcagtgccactctccgcttcacagatgccccctgccaagatgtcagtgatgctgccgtcagtgaacctcgaggactgctctcagtctctgagtctcagcacaatgcaggaggacatggagtcttcgggggcagataccttctgaacgggaagagacagccagcacagtgtttatgccactggttttaaagtcattttaccttggcttaaaaccctctctcagactgtttggtttttgagcatattctgaaaaaaaaattccaatattttaaaataaaacaaaaagcataatttgggtatttaaagtttttaaataaaataagtataagtcattataagtctgattgtgagttgtttcttagaatcctgagatagcatagagtagtgaaagggcatggcttttgacatctaggcatttaatctataggtgtaattatctgtatgtatttataaaattatgtagctcaaggttattcattctaacatttttataacagcaaatagaaaaaatcaaatgtctatcaataatagactggttttaaagtgatggtacatcagtacaatggaatactatgtattacaaaaaaaaatttaaaaagtttattgatatggaataatctttgagatgcactgttaaagtgaaaaaagccatgtgcaaaatagtgtgtgaactatgcagttgttgaaattatttaaaatggggtggggaggaattcaaatgtatggtatgtcacatattcttacatgtatttgcttgtaaatatattatataaacaagaaactgctaagtttgtctccagggagtagaattgttggctgggtgataggagaggctaagtgataggaatcaaggataatcgtggttactatgtatttgaacttcagttgtgatagaaaaaaatcatcagtgagattaatttttatatgccttatgtataccatataaacctttataaacctgtgaaacatgtaactctattaccttttgcaacataaatacataaaattaaaggaaaataaaaagcattgcttcgtaatcagatacatgtaggttctaatcccaattctgtaacttcttgctttgtgataggggccaacgaaacgccttcttatcagctgtttcagattaatgggtttaatacttatttttgcagaataatggacatcagtgattgtgtgtggagatgggggtgggtagtgcccagcacagtgcttgataccatgtaagtgctcaataaatggtgttgttcttattatcttgagggatttcagtactgtatagtagagggcataagcacatgaaaagaaaggcagcctagcactagtgaaaaaaatttacctcccagaaaaatcattttctgtcacaactgaatttcaaacacacagtaattacagtcatccttgactttttcagcatttttgtaggttgctaagtggatctcagcactggcagcacattagaacctctgggagctttaaaaaatactaatgcctgggccttgtaccaagggatttcaatttaattgatcttggatggggtccagcattggtattaaaaaaaaaaaaagaccttttcaggtaattttaatgggcactcaaggctgagaattactgaagagcaatttagaattccttaaacttctagtaggagccattgcctggggattttttttctcactgaacatagaagctgcaagagtctatggaaactcagaaatgtgtcagccttccacatgcacttcctcacagcttctctcaggtatttggttactggaatgttttaggtttcactttagaacccgttttctttgatatggccctttggacagttctgcttataacagtttcctttaaacaagtggaagaaaaattctgctctgtggattttaatttgtttttgatattcatctacaagactctgggcaaggtgaaagctggagaaatgttgcttagtgctgcttcattttaaacatgacaccccaccccccaaccttggtttctggttttcatagttttttctgccttggaaggatttcagcaaaatcttgttttagttaaagcattttttatttaaaggtgttggtagatttttcctcctaaccatagaaagcctgccttttctaactttagggtagaagtgtaatctttgatttattctactccctgtgcacgtgagcttttcttttaaaaaaaattagtgtccattcgacggtttcttttttttttttttgagatggaattttgctcgttgcccaggctggagtgcaatggcacaatcttggctcaccgcaacctctgcctcctggtttcaagcgattctcctgccttagcctccttagtagctgggattacaggcgtgcgccaccatgcccggcaaattttgtatttttagtagagatggggtttctccgtgttggtcaggctagtcctgaactcccgacctcaggtgatctgcctgcctcagcctcccaaagtgctgggattacaggcgtgagccaccgcgcccggcattcatctagtattttgttttataggattatttctgttcatggttactcctgtacacattcctctgccaaccacttcagattcttttggaataagacgatgtacgtaaaaacaaactaaatggaacttttgattttataagctttaaaatttttattttatattaaattttacaatttccaacttccggaataaactatttatgagacatgctattaagagactatcaagatcaaggctgttactattgctgggctgtgactggacacggtggctcatgcctgtaatcccaagactttgggaggccgagggtggatcacttgagctcaggagtttgagaccagcctgggcaacatggcaaaacccatctctaccaaaaatacaaaaaattagctggtcatggttgcacacacctgtagccccagctactcaagagggtgaggtgagaggatcgcttgagcccaggatgtcaagactgcagtgagccgtggttgtgccactgcactccagcctgggtgacagaatgagaccgtgtctcaaaaaaaaaaaaaaaaaaattgctgagctatcatgccttaacactaggtaacgtgtttaaaatgttcctttctgctgggtgcgggtggctcacacctgtaatcccagcactttgggaggctgaggcaggcagatcacccaaggttaggagttcaagaccagtctggccaacatggtgaaaccccatctctactaaaaatacaaaaattagccaggcatggtggcgtgtgcctgtaatcccagctacttgggaggctgaggcaggagaattgcttcaacccaggaggcagaggtggcaacgagctgagactgcaccacttaactccagcctgggcaacagagtaagactctgtctcaaaaataaataaataaataaataaaatgttcctctgttttaaatcctaaattcgttctttgtatactttaatagaatcttgaataaatatttttattctta

SEQ ID NO: 145850 - DNA, 5597 bp, Homo sapiens
  Payload ID: 8919
  Gene Symbol: KIAA0586
  Gene Name: KIAA0586
  ENST ID: ENST00000619722
  CDS Start-End: 310-4701
aatttacctaatcccacgtccctaacggtcttcggaagcgaagcagtgtcaacagtccctggtaaacacaagtagtattacaagtcgggagctcttcaagtcttggatgagactgtagagcggtcttgtgcggcaatgtgctaccttaaaataaataaataaataaacccctgttatgtccggagtttgtttccacccggagaggaatggaagagcaccagagagcgcttagctttctggttggatgttttgggttcatcagacttaacttctgctagaaattgttaccagcctctattagaaaatcccatggtgtcagaaagtgatttttctaaagacgttgcagtgcaagtgttgcctttggataaaatagaagagaacaacaagcaaaaagcaaatgacatcttcatttctcagtatacaatgggacagaaagatgctctaagaacagttttaaagcaaaaagctcaaagcatgcctgtttttaaggaagtaaaggtacatctgttagaagatgcaggcatagagaaggatgctgttactcaggagactagaatttcacccagtggaattgattcagctacaaccgtggctgcagcaactgctgctgccattgcaaccgcagctccgttgataaaggtgcagagtgatttggaagcaaaagtcaattctgttacagaattacttagtaaattacaggagactgataaacacctgcaacgtgttacagagcagcaaacaagcattcagaggaaacaagagaaattacattgtcatgatcacgaaaagcaaatgaatgtgtttatggagcagcacataaggcatcttgaaaagttacaacaacaacaaatagatattcagactcattttattagtgctgcactcaagactagtagttttcagcctgttagtatgccctcctccagagcagtggaaaagtattccgtaaaaccagaacaccctaatcttggtagctgtaatccatctttatataacacatttgcttccaaacaagcacctttaaaagaagttgaagatacgagttttgataaacagaaatctcctttggagacaccagcacctcgcagatttgctcctgtacctgtttcaagggatgatgaactatcaaagagggaaaatcttttggaagaaaaagaaaatatggaagtgtcgtgtcacagaggaaatgtaagactattggaacaaattttgaataataatgattctttgacaagaaaaagtgaatcatcaaacaccacctcactaactaggtcaaaaataggatggactcctgagaaaacaaacagatttccttcctgtgaagagctagaaacaactaaagtgactatgcagaagtctgatgatgttcttcatgaccttggccaaaaagagaaagaaacaaatagcatggtccagccaaaagaatctctgagtatgttgaagcttccagatcttccacagaattctgttaagcttcaaacaaccaatacaacaagatctgtattgaaagatgctgagaagattttgagaggagtacaaaacaataaaaaagtacttgaagaaaacctggaagctattattcgtgcaaaagatggagctgccatgtattcgcttatcaatgctttatctaccaacagagagatgtcagagaaaattaggatcagaaagacagtggatgaatggattaaaactatttctgcagaaattcaggatgaactgtcaagaacagattatgaacaaaaaagatttgatcagaagaatcagagaaccaagaaaggtcagaatatgactaaagatattagaaccaacacacaagataaaactgtcaacaaatctgtaattccaagaaaacattctcaaaagcaaatagaagagcattttagaaatctacctatgaggggcatgcctgcttcaagtttacagaaagagagaaaggaagggcttttgaaagcaaccacagtaatacaagatgaagattatatgttacaagtctatggaaagccagtttatcagggccatcgaagcactcttaaaaaaggaccatatctcagatttaattctccatctcctaagtccagaccacagagaccaaaagtaatagaacgagttaaaggcactaaggtaaagtcaataagaacacagactgacttctatgcaacaaaacctaagaagatggattctaaaatgaaacattctgttcctgtgttacctcatggcgatcagcaatatttgttcagcccaagtagagaaatgcctactttttcaggtacattggaaggtcatctgattcctatggcaattcttttaggacaaacccaaagtaatagtgataccatgccacctgctggagtgattgtcagcaagccacaccctgtaactgtgactacttctattcctccatcatctcgaaaagtagaaactggagtaaagaaacctaacatagccattgtagaaatgaagtcagaaaaaaaggatcctcctcagcttactgtgcaggtattacccagtgtagatattgacagcatttcaaatagtagtgctgatgtcctttcacctctgtctagccccaaagaagcatctcttcctcctgtgcaaacttggataaagactccagaaattatgaaggtagatgaagaagaggtgaagtttccaggaactaactttgatgaaataatcgatgtcatacaggaagaagaaaaatgtgatgaaattccagactctgaaccaattctggagtttaacagaagtgttaaagctgattctacaaaatataatggtcctccatttccgccagttgcttctacttttcagcccactgctgatattctggataaagtaattgagagaaaagaaacactggaaaatagcttaattcaatgggtagagcaagaaataatgtcaagaattatctctgggctctttccagtccagcaacagattgcacctagtatcagtgtttcagtcagtgagacaagtgaaccactgacttctgacattgtggaaggaacaagcagtggcgccctccagctttttgttgatgctggtgttcctgtgaactcaaatgtgattaaacattttgttaacgaagctcttgctgagaccattgctgtcatgctgggtgacagagaagcaaagaagcaaggtcctgttgctacaggtgtttctggggatgcttcaacaaatgaaacatatttgccggcaagagtgtgcaccccactgcctaccccacagcctacgcctccttgctcaccttcatcacctgctaaggagtgtgttttggtaaagactccagattcttctccctgtgattcggatcatgatatggcttttcctgtgaaagaaatatgtgctgaaaaaggagatgatatgcctgccatcatgcttgttaatactccaacagttacccctactactacacctcctccagcggcggcagtttttaccccaactttgtcagatatttccattgataaattgaaggtatcaagcccagagcttcccaagccatggggtgatggagacctgccactggaagaagagaaccctaactcacctcaagaagaacttcatccaagagctattgtaatgtctgtggctaaggatgaagaaccagagagtatggatttccctgctcagcctccacctccagagccagttccctttatgccatttcctgccggcaccaaggccccttccccctcacagatgccaggttctgattcatcaacactggagagcacattgagtgttactgtcactgaaactgaaactttagataaacccatctctgaaggagagattttatttagctgtggtcaaaaattggcccccaagattttagaagatataggactgtacctgacaaaccttaatgatagcttatccagcactctgcatgatgccgttgaaatggaggatgatcctcctagtgaagggcaagtgattaggatgtcccataaaaaatttcatgcagatgcaattctttcttttgctaaacaaaaccaggagtcagcagtttcccagcaagcagtctatcattcagaggacttggaaaacagtgtgggtgaacttagtgaaggacaaagaccccagctaacagcggcagcagagaacatcttaatgggacattctctctatatgcagccacctgtcactaatacacagtctttggatcaacaatgtgatcctaaaccattatctcggcaatttgacacagtttcaggtagtatttatgaagattcatgtgctagtcatggtccaatgagtttgggagaattggagttggagccaaattctaagctggttcttcccacaacacttctgacagcacaagaaaatgatgttaatttaccagtagccgctgaagatttttcccagtaccaactaaagcaaaatcaggatgttaagcaagttgaacacaaaccatcacaaagttacctacgtgttagaaataaatctgatattgcaccttcacagcaacaagtttcaccaggtgatatggatcggacacaaattgagcttaatccgtacctcacatgtgtattttcaggtgggaaagcagtgccactctccgcttcacagatgccccctgccaagatgtcagtgatgctgccgtcagtgaacctcgaggactgctctcagtctctgagtctcagcacaatgcaggaggacatggagtcttcgggggcagataccttctgaacgggaagagacagccagcacagtgtttatgccactggttttaaagtcattttaccttggcttaaaaccctctctcagactgtttggtttttgagcatattctgaaaaaaaaattccaatattttaaaataaaacaaaaagcataatttgggtatttaaagtttttaaataaaataagtataagtcattataagtctgattgtgagttgtttcttagaatcctgagatagcatagagtagtgaaagggcatggcttttgacatctaggcatttaatctataggtgtaattatctgtatgtatttataaaattatgtagctcaaggttattcattctaacatttttataacagcaaatagaaaaaatcaaatgtctatcaataatagactggttttaaagtgatggtacatcagtacaatggaatactatgtattacaaaaaaaaatttaaaaagtttattgatatggaataatctttgagatgcactgttaaagtgaaaaaagccatgtgcaaaatagtgtgtgaactatgcagttgttgaaattatttaaaatggggtggggaggaattcaaatgtatggtatgtcacatattcttacatgtatttgcttgtaaatatattatataaacaagaaactgctaagtttgtctccagggagtagaattgttggctgggtgataggagaggctaagtgataggaatcaaggataatcgtggttactatgtatttgaacttcagttgtgatagaaaaaaatcatcagtgagattaatttttatatgccttatgtataccatataaacctttataaacctgtgaaacatgtaactctattaccttttgcaacataaatacataaaattaaaggaaaataaaaagcattgcttcgtaatcag

SEQ ID NO: 145851 - DNA, 4859 bp, Homo sapiens
  Payload ID: 8920
  Gene Symbol: KIAA0753
  Gene Name: KIAA0753
  Uniprot ID: Q2KHM9
  ENST ID: ENST00000361413
  CDS Start-End: 360-3263
aatccatccgcatggctttttgctctagttcctcagatctttctgcgctagctgcactcccaagcccaggcttagatctaccctaatctagtcccagccccgacctcatggacactggctgcaaaacttaccgccttgcaacacctggatccttaaatagttcagggcctcaaaggctcccaagccgccctgcgcctgttgctatggcgactgggcaggcggccggaagcgcggccttgttgggggcccccgttgcccgcctcccagtagccgcgcctcaccctaggccaggaatggttttagggaagactgttgccggatgacaaggctgtcactattgttctgtactacctgacattatgggaccaggccagccagcttcaacctgtgttcatctagcacctaggacccaacttgatgggaggagcgaccccaaagtacttcagacccagaaccagctgcagtttaataggaatgttcctacacattcaagcaacttggcgatccgatattcttgcccacatgccattagaattgaaaaactgaagcactcatacaatgaatcataccattgtaaagatgcagattgtagagttggtcctgacctgggcagttctgtttcattttccgtcatatcccaagagagacttagctatgctgtccacctagccagaagagatgtgaaacgaagacaatttgaaaaacatataaaagaacatcatctcagaagtcagcctcaaagctctcagaagtgtggacatactaagtataaaatacccgaccacagggtggaaaggaaggaatcaaagagtcaagcagcctgtcagtgtagccaccagccatccaaagtagaaatctccagctctggtgccaaagtatacctttactcatctcatccaggccagtcagatcttactgtgccaaattcgccacccacccatgatccgggacttcagcctcatcccaggataggtgaccacaaaaacataagtgaacagaaaagcctgctagaagtccagcgactccagaaagaactgagcagttgtatccacaaaattgaagaggtaactaaaaaagatagactagaagaagctttggatccagatgaagaacgtcgaatccgtatcaggagacaggagcaagctgctcgctctgcccgaatgctctacgtcctccagcagcaggtaaaagaaatccaggaagaattggataaattgagtccacataaaattaaacacactaagaagtcatgggcaatgtctaagctggcggctgcccatcgaggagccattcgggccttacagatgtttgtcactcagtttactgaccgaggggagcatccacttcctgctcggtgtaaggaactgggcagccttattcgccagctttcactttgttctgtcaagctggatgcagacccttctgttcctgatgtggttatagatattctgcaacaaattgaggctttggaatctctcctggaaaagaaactgtcaccaaaaaaggtgaaaaaatgtttcagtgaaattcggagcagatttcctatcggtagccaaaaggccttggagagatggccaagtacatcaccaaagggtgagaggaggcccctcacagcaaaggacacattcccacaggaaacaagtcgaccttctgtagcaaagcagcttcttgccgataagtatcagcccgatacggagcttccggagacccagaggttgcagagtgagcttgatgtattagatgcggatatagttctggaagaaggaccatttattctagaccaaagtgcaagcttcaaagacgaggtgttagccgtggcaaaaacaaaagcagggaaaaagaagcctgtgactgagaatgtgccgtttaggaagaaagatactctggcgccagcaagacagcaaggactccgcaaagctgaaagaggtagacaaagccaacctcacagtaaaagcagagtgcagcagacaacagtttcatccagattaaaaatgaaccggcagcctgtgaaagaccgcaaggcaccatggatacccccaaaccccacatccccaccagcgtctcctaaatgtgctgcatggctaaaggtgaaaactagccccagagatgccacaaaagagcctctccagcaagaagatcctcaagaggaaagtcacctgacaggtgctgttgagcatgaagcagccaggctcgcttggcttgatgctgaaacttccaaaagattgaaggaactagaagagttaaaagccaaggaaattgacagcatgcaaaaacagaggcttgattggcttgatgctgaaacttctagaagaacaaaggaactgaatgagctcaaagctgaagaaatgtatagactccaacaattgagtgtttctgccacccacttagcagacaaggtagaggaggcagttctggatcgtttgaagcctctcttggtcaaggcccagagagtcaattctactacagaagcaaatattcatttgaaagatggctcgtcagtaaacacagcgaaagcccagcctgcacaggaggttgcagctgttgattttgaatccaacaacattcgtcagcttgatgattttttggaagattgtgccagtgagctctgggctgtgactcatgctaagatcttggggtctgaaaccttagccaccgttgaggacagcaaggatagcccagatctggagatcatgatgcgccgaatggaagagatggaaaaataccaggagtctgttcgtcaaagatataataaaatcgcatatgctgatcctcgactttggatgcaggaagaaaacaatgaccaaaaaatctcagcaataagtgaaaagcctctatctcctcatccaatcagaatcacgaagacagtggatcgcaaggatccagccgtgaacatcatgttagaaaggccctgtaatggcaattccctggatgaaagtgtgggaacagaggaaggatcagagaaaagagaggcccctcttctctccctagccgaagattctcaacagaaagaaggccgagctcccctctttgtcccaccgggtatgcagcacagcatcggtgactactgtagtcgttttgagcagtaccttcggatcatatctcatgaggctgtaggctccttcaacccgtggctgatagctgaaagcttttcagaagagctggtagatgaagctctgggtgctgtggctgctgaacttcaggatatgtgcgaagattatgcagaagctgtgttcacctcagaattcttagaggctgctacataaaggctctctgaggcgaggccatttgtgtcacactggagaagggatggcaccaccctttgttttggcccacaggaaattttcatcctcagctgtccatccaggcccagaaggtgctgcccactgaaaggaaggcagtgccggggaggtcatcctcactttgcattttcttttgtcatggcaatggttctggaaatgtatgatgcaatgtatcacacttatcagtgcccaggcaacacaacttgattatggcaatattttcagaatgtgtacttttcctattgaaataccatgttcattcctctggctcagtttggtgatgaaaatgttttgaaagataatcgatacgtatatttcacacaaggattcaggttgctgttgaacccttgctggcattgataccaacacaagtgcggctactagctggtcccatcacggggcccctgttttgcatctttggcgatttcctgtcaggacctctggccctactaggctgtagactcagggagagcacagtctggctgtgctgccaaacctctcctctgctgcagtttattccaaacaggagccccctggctgtcagtgcacaataatagacacacatttcttcaacgttccattcctaggtgattttcacatttttagttcctcagcatattttattgctgtgtgttgacacaatctggtataaaaaactttctctggattcagaggaagtttgaggaatcaggagaggaccaggccttctcctgtgcctgggtgaaggtacagacctcgctgtgtctccgatgaggtcagaagtgtctctatttcataccacaaaggaacccaagtgggagtagggaacagatggatggcgcgaagacctctgtgtctccccagagaaaggaagaaacttaagaaccatcatagcctggtcctccaacatcttacagatcatgttttccaagagaaaagcctgtgttttcagaaactctgaattcagaaaaagaaacggaatgtgcgtaagaatcaggccactgcctggaaagactttctctcaattcgtagcctgaggctcagtgaaggaaacatgcagaaagaatgcctgagacgcccccagggaataagggaactctttataacctgtccagtgccgtcatctgggatttttctctgaagtacaagaatttcaggtgatttaagctgcttgatcacacttatttgtgcaaaattgattttcatttaatgttaatgttttcctgcttaattttatataacttcagaatgtaaagagcttcaaggtaaattacagggtgtttaacctggggagttaaatgtgtacacttgaattaataggagcaccggttgttgctagtataaagtaatttgtgtggcagtttgtactgtgctgagtttttaaaataaacccaatattttaaagtatgtgcctattttaaataacttacatctcctttttttcccacaggcaaagtgaaatgtgatttacagaaaccactgagaatacttttatatgtgatatgactatagtggattatttgccaccccttccccccgagaaaaaaattagtgacaataaaagctaacatttattgagca

SEQ ID NO: 145852 - DNA, 1572 bp, Homo sapiens
  Payload ID: 8920
  Gene Symbol: KIAA0753
  Gene Name: KIAA0753
  ENST ID: ENST00000542826
  CDS Start-End: 1-137
aaaaggccttggagagatggccaagtacatcaccaaagggtgagaggaggcccctcacagcaaaggacacattcccacaggaaacaagtcgaccttctgtagcaaagcagcttcttgccgggactccgcaaagctgaaagaggtagacaaagccaacctcacagtaaaagcagagtgcagcagacaacagtttcatccagattaaaaatgaaccggcagcctgtgaaagaccgcaaggcaccatggatacccccaaaccccacatccccaccagcgtctcctaaatgtgctgcatggctaaaggtgaaaactagccccagagatgccacaaaagagcctctccagcaagaagatcctcaagaggaaagtcacctgacaggtgctgttgagcatgaagcagccaggctcgcttggcttgatgctgaaacttccaaaagattgaaggaactagaagagttaaaagccaaggaaattgacagcatgcaaaaacagaggcttgattggcttgatgctgaaacttctagaagaacaaaggaactgaatgagctcaaagctgaagaaatgtatagactccaacaattgagtgtttctgccacccacttagcagacaaggtagaggaggcagttctggatcgtttgaagcctctcttggtcaaggcccagagagtcaattctactacagaagcaaatattcatttgaaagatggctcgtcagtaaacacagcgaaagcccagcctgcacaggaggttgcagctgttgattttgaatccaacaacattcgtcagcttgatgattttttggaagattgtgccagtgagctctgggctgtgactcatgctaagatcttggggtctgaaaccttagccaccgttgaggacagcaaggatagcccagatctggagatcatgatgcgccgaatggaagagatggaaaaataccaggagtctgttcgtcaaagatataataaaatcgcatatgctgatcctcgactttggatgcaggaagaaaacaatgaccaaaaaatctcagcaataagtgaaaagcctctatctcctcatccaatcagaatcacgaagacagtggatcgcaaggatccagccgtgaacatcatgttagaaaggccctgtaatggcaattccctggatgaaagtgtgggaacagaggaaggatcagagaaaagagaggcccctcttctctccctagccgaagattctcaacagaaagaaggccgagctcccctctttgtcccaccgggtatgcagcacagcatcggtgactactgtagtcgttttgagcagtaccttcggatcatatctcatgaggctgtaggctccttcaacccgtggctgatagctgaaagcttttcagaagagctggtagatgaagctctgggtgctgtggctgctgaacttcaggatatgtgcgaagattatgcagaagctgtgttcacctcagaattcttagaggctgctacataaaggctctctgaggcgaggccatttgtgtcacactggagaagggatggcaccaccctttgttttggcccacaggaaattttcatcctcagctgt

SEQ ID NO: 145853 - DNA, 815 bp, Homo sapiens
  Payload ID: 8920
  Gene Symbol: KIAA0753
  Gene Name: KIAA0753
  ENST ID: ENST00000573033
  CDS Start-End: 600-815
cccttggcacctagaagcagccaggagggaagtactgaccatttaaaagtggcagatctccgggccccatttctgcagccttcattctgcaactccagccacccacctgtgccaacgtcaagccagttgggattgccttgctcatgtgcctcctcccatctgcttttttcatgtgtgctacagccttagaaataaggactcttagacagctgtctttatgttcccaagaagtatctgtctttaagcaaatctagtctgcaaattttggatttattcaaaagcttaaattagggttttttttaaaaaaaccttgaatttcccaattgatttactgtaggattttttgagagaacaaattccccagagatttaaaactagtcagttcacagaaaatcagcttaactcaacaaatgctaaattgtgtactatgctcagagcactttgtaatgggaaatagaagagcaagacaaggcccttcccctcaagtcgccttgtctggctgggaagatgagacatgtacatgtgaaataggaatggttttagggaagactgttgccggatgacaaggctgtcactattgttctgtactacctgacattatgggaccaggccagccagcttcaacctgtgttcatctagcacctaggacccaacttgatgggaggagcgaccccaaagtacttcagacccagaaccagctgcagtttaataggaatgttcctacacattcaagcaacttggcgatccgatattcttgcccacatgccattagaattgaaaaactgaagcactcatacaatgaatcataccattgt

SEQ ID NO: 145854 - DNA, 590 bp, Homo sapiens
  Payload ID: 8920
  Gene Symbol: KIAA0753
  Gene Name: KIAA0753
  ENST ID: ENST00000571642
  CDS Start-End: 329-590
agtagccgcgcctcaccctaggccaggtttacttagagtcattgagagttatatgccttcgggccacctgacagagtgaagcatactgctttctgactagtattaagacttgttaatgtagactgcttgtccaaaaaccaccctgctggaacatgctagtttaccatggcaaagctctgttttgggaataacgccttgctggagacctttgagatttgaaatttggaatggaaagggctcaagagattattattaaaatagaatggttttagggaagactgttgccggatgacaaggctgtcactattgttctgtactacctgacattatgggaccaggccagccagcttcaacctgtgttcatctagcacctaggacccaacttgatgggaggagcgaccccaaagtacttcagacccagaaccagctgcagtttaataggaatgttcctacacattcaagcaacttggcgatccgatattcttgcccacatgccattagaattgaaaaactgaagcactcatacaatgaatcataccattgtaaagatgcagattgtagagttggtcctgacctgggcagttctgttt

SEQ ID NO: 145855 - DNA, 851 bp, Homo sapiens
  Payload ID: 8920
  Gene Symbol: KIAA0753
  Gene Name: KIAA0753
  ENST ID: ENST00000572235
  CDS Start-End: 1-210
cttactgtgccaaattcgccacccacccatgatccgggacttcagcctcatcccaggataggtgaccacaaaaacataagtgaacagaaaagcctgctagaagtccagcgactccagaaagaactgagcagttgtatccacaaaattgaagaggtaactaaaaaagttcttattctacactgctgccgtagagattgctctaaaacatgaatcttaccatgtcagacctctgcttaaaagactttagtggctctctgtaacttagaggatgaaagctaaactcttcagcgtggcatgtaagacttcacgatccggcccgcctacatttccagagtcacctccaccttcactccttcatgctaaattcctattacactggggacgaagggatggaaggtgaacactgcctattcactatcttgaactggaaaccagtaactgttttttgggtgcatgaatgaagagcctttttttcattttcaagtgacttgaattaataatggttatatttggacaagaggagatatatcgatgcatccttttctacaaaaaagatcaatggaaagtcatgggcaatgtctaagctggcggctgcccatcgaggagccattcgggccttacagatgtttgtcactcagtttactgaccgaggggagcatccacttcctgctcggtgtaaggaactgggcagccttattcgccagctttcactttgttctgtcaagctggatgcagacccttctgttcctgatgtggttatagatattctgcaacaaattgaggctttggaatctctcctggaaaagaaactgtcaccaaaaaaggtgaaaaaatgtttcagtgaaattcgg

SEQ ID NO: 145856 - DNA, 3263 bp, Homo sapiens
  Payload ID: 8920
  Gene Symbol: KIAA0753
  Gene Name: KIAA0753
  Uniprot ID: Q2KHM9
  ENST ID: ENST00000572370
  CDS Start-End: 899-2905
aggcggccggaagcgcggccttgttgggggcccccgttgcccgcctcccagtagccgcgcctcaccctaggccagaaccagctgcagtttaataggaatgttcctacacattcaagcaacttggcgatccgatattcttgcccacatgccattagaattgaaaaactgaagcactcatacaatgaatcataccattgtaaagatgcagattgtagagttggtcctgacctgggcagttctgtttcattttccgtcatatcccaagagagacttagctatgctgtccacctagccagaagagatgtgaaacgaagacaatttgaaaaacatataaaagaacatcatctcagaagtcagcctcaaagctctcagaagtgtggacatactaagtataaaatacccgaccacagggtggaaaggaaggaatcaaagagtcaagcagcctgtcagtgtagccaccagccatccaaagtagaaatctccagctctggtgccaaagtatacctttactcatctcatccaggccagtcagatcttactgtgccaaattcgccacccacccatgatccgggacttcagcctcatcccaggataggtgaccacaaaaacataagtgaacagaaaagcctgctagaagtccagcgactccagaaagaactgagcagttgtatccacaaaattgaagaggtaactaaaaaagatagactagaagaagctttggatccagatgaagaacgtcgaatccgtatcaggagacaggagcaagctgctcgctctgcccgaatgctctacgtcctccagcagcagtgacttgaattaataatggttatatttggacaagaggagatatatcgatgcatccttttctacaaaaaagatcaatggaaagtcatgggcaatgtctaagctggcggctgcccatcgaggagccattcgggccttacagatgtttgtcactcagtttactgaccgaggggagcatccacttcctgctcggtgtaaggaactgggcagccttattcgccagctttcactttgttctgtcaagctggatgcagacccttctgttcctgatgtggttatagatattctgcaacaaattgaggctttggaatctctcctggaaaagaaactgtcaccaaaaaaggtgaaaaaatgtttcagtgaaattcggagcagatttcctatcggtagccaaaaggccttggagagatggccaagtacatcaccaaagggtgagaggaggcccctcacagcaaaggacacattcccacaggaaacaagtcgaccttctgtagcaaagcagcttcttgccgataagtatcagcccgatacggagcttccggagacccagaggttgcagagtgagcttgatgtattagatgcggatatagttctggaagaaggaccatttattctagaccaaagtgcaagcttcaaagacgaggtgttagccgtggcaaaaacaaaagcagggaaaaagaagcctgtgactgagaatgtgccgtttaggaagaaagatactctggcgccagcaagacagcaaggactccgcaaagctgaaagaggtagacaaagccaacctcacagtaaaagcagagtgcagcagacaacagtttcatccagattaaaaatgaaccggcagcctgtgaaagaccgcaaggcaccatggatacccccaaaccccacatccccaccagcgtctcctaaatgtgctgcatggctaaaggtgaaaactagccccagagatgccacaaaagagcctctccagcaagaagatcctcaagaggaaagtcacctgacaggtgctgttgagcatgaagcagccaggctcgcttggcttgatgctgaaacttccaaaagattgaaggaactagaagagttaaaagccaaggaaattgacagcatgcaaaaacagaggcttgattggcttgatgctgaaacttctagaagaacaaaggaactgaatgagctcaaagctgaagaaatgtatagactccaacaattgagtgtttctgccacccacttagcagacaaggtagaggaggcagttctggatcgtttgaagcctctcttggtcaaggcccagagagtcaattctactacagaagcaaatattcatttgaaagatggctcgtcagtaaacacagcgaaagcccagcctgcacaggaggttgcagctgttgattttgaatccaacaacattcgtcagcttgatgattttttggaagattgtgccagtgagctctgggctgtgactcatgctaagatcttggggtctgaaaccttagccaccgttgaggacagcaaggatagcccagatctggagatcatgatgcgccgaatggaagagatggaaaaataccaggagtctgttcgtcaaagatataataaaatcgcatatgctgatcctcgactttggatgcaggaagaaaacaatgaccaaaaaatctcagcaataagtgaaaagcctctatctcctcatccaatcagaatcacgaagacagtggatcgcaaggatccagccgtgaacatcatgttagaaaggccctgtaatggcaattccctggatgaaagtgtgggaacagaggaaggatcagagaaaagagaggcccctcttctctccctagccgaagattctcaacagaaagaaggccgagctcccctctttgtcccaccgggtatgcagcacagcatcggtgactactgtagtcgttttgagcagtaccttcggatcatatctcatgaggctgtaggctccttcaacccgtggctgatagctgaaagcttttcagaagagctggtagatgaagctctgggtgctgtggctgctgaacttcaggatatgtgcgaagattatgcagaagctgtgttcacctcagaattcttagaggctgctacataaaggctctctgaggcgaggccatttgtgtcacactggagaagggatggcaccaccctttgttttggcccacaggaaattttcatcctcagctgtccatccaggcccagaaggtgctgcccactgaaaggaaggcagtgccggggaggtcatcctcactttgcattttcttttgtcatggcaatggttctggaaatgtatgatgcaatgtatcacacttatcagtgcccaggcaacacaacttgattatggcaatattttcagaatgtgtacttttcctattgaaataccatgttcattcctctggctcagtttggtgatgaaaatgttttgaaagataatcgatacgtatatttcacac

SEQ ID NO: 145857 - DNA, 508 bp, Homo sapiens
  Payload ID: 8920
  Gene Symbol: KIAA0753
  Gene Name: KIAA0753
  ENST ID: ENST00000576281
  CDS Start-End: 1-390
cgactttggatgcaggaagaaaacaatgaccaaaaaatctcagcaataagtgaaaagcctctatctcctcatccaatcagaatcacgaagacagtggatcgcaaggatccagccgtgaacatcatgttagaaaggccctgtaatggcaattccctggatgaaagtgtgggaacagaggaaggatcagagaaaagagaggcccctcttctctccctagccgaagattctcaacagaaagaaggccgagctcccctctttgtcccaccgggtatgcagcacagcatcggtgactactgtagtcgttttgagcagtaccttcggatcatatctcatgaggctgtaggctccttcaacccgtggctgatagctgaaaggcaaagtgaaatgtgatttacagaaaccactgagaatacttttatatgtgatatgactatagtggattatttgccaccccttccccccgagaaaaaaattagtgacaataaaagctaacatttattgagcacct

SEQ ID NO: 145858 - DNA, 3403 bp, Homo sapiens
  Payload ID: 8920
  Gene Symbol: KIAA0753
  Gene Name: KIAA0753
  ENST ID: ENST00000570790
  CDS Start-End: 71-817
aggaatggttttagggaagactgttgccggatgacaaggctgtcactattgttctgtactacctgacattatgggaccaggccagccagcttcaacctgtgttcatctagcacctaggacccaacttgatgggaggagcgaccccaaagtacttcagacccagaaccagctgcagtttaataggaatgttcctacacattcaagcaacttggcgatccgatattcttgcccacatgccattagaattgaaaaactgaagcactcatacaatgaatcataccattgtaaagatgcagattgtagagttggtcctgacctgggcagttctgtttcattttccgtcatatcccaagagagacttagctatgctgtccacctagccagaagagatgtgaaacgaagacaatttgaaaaacatataaaagaacatcatctcagaagtcagcctcaaagctctcagaagtgtggacatactaagtataaaatacccgaccacagggtggaaaggaaggaatcaaagagtcaagcagcctgtcagtgtagccaccagccatccaaagtagaaatctccagctctggtgccaaagtatacctttactcatctcatccaggccagtcagatcttactgtgccaaattcgccacccacccatgatccgggacttcagcctcatcccaggataggtgaccacaaaaacataagtgaacagaaaagcctgctagaagtccagcgactccagaaagaactgagcagttgtatccacaaaattgaagaggtaactaaaaaaggtaaaagaaatccaggaagaattggataaattgagtccacataaaattaaacacactaagaagtcatgggcaatgtctaagctggcggctgcccatcgaggagccattcgggccttacagatgtttgtcactcagtttactgaccgaggggagcatccacttcctgctcggtgtaaggaactgggcagccttattcgccagctttcactttgttctgtcaagctggatgcagacccttctgttcctgatgtggttatagatattctgcaacaaattgaggctttggaatctctcctggaaaagaaactgtcaccaaaaaaggtgaaaaaatgtttcagtgaaattcggagcagatttcctatcggtagccaaaaggccttggagagatggccaagtacatcaccaaagggtgagaggaggcccctcacagcaaaggacacattcccacaggaaacaagtcgaccttctgtagcaaagcagcttcttgccgataagtatcagcccgatacggagcttccggagacccagaggttgcagagtgagcttgatgtattagatgcggatatagttctggaagaaggaccatttattctagaccaaagtgcaagcttcaaagacgaggtgttagccgtggcaaaaacaaaagcagggaaaaagaagcctgtgactgagaatgtgccgtttaggaagaaagatactctggcgccagcaagacagcaaggactccgcaaagctgaaagaggtagacaaagccaacctcacagtaaaagcagagtgcagcagacaacagtttcatccagattaaaaatgaaccggcagcctgtgaaagaccgcaaggcaccatggatacccccaaaccccacatccccaccagcgtctcctaaatgtgctgcatggctaaaggtgaaaactagccccagagatgccacaaaagagcctctccagcaagaagatcctcaagaggaaagtcacctgacaggtgctgttgagcatgaagcagccaggctcgcttggcttgatgctgaaacttccaaaagattgaaggaactagaagagttaaaagccaaggaaattgacagcatgcaaaaacagaggcttgattggcttgatgctgaaacttctagaagaacaaaggaactgaatgagctcaaagctgaagaaatgtatagactccaacaattgagtgtttctgccacccacttagcagacaaggtagaggaggcagttctggatcgtttgaagcctctcttggtcaaggcccagagagtcaattctactacagaagcaaatattcatttgaaagatggctcgtcagtaaacacagcgaaagcccagcctgcacaggaggttgcagctgttgattttgaatccaacaacattcgtcagcttgatgattttttggaagattgtgccagtgagctctgggctgtgactcatgctaagatcttggggtctgaaaccttagccaccgttgaggacagcaaggatagcccagatctggagatcatgatgcgccgaatggaagagatggaaaaataccaggagtctgttcgtcaaagatataataaaatcgcatatgctgatcctcgactttggatgcaggaagaaaacaatgaccaaaaaatctcagcaataagtgaaaagcctctatctcctcatccaatcagaatcacgaagacagtggatcgcaaggatccagccgtgaacatcatgttagaaaggccctgtaatggcaattccctggatgaaagtgtgggaacagaggaaggatcagagaaaagagaggcccctcttctctccctagccgaagattctcaacagaaagaaggccgagctcccctctttgtcccaccgggtatgcagcacagcatcggtgactactgtagtcgttttgagcagtaccttcggatcatatctcatgaggctgtaggctccttcaacccgtggctgatagctgaaagcttttcagaagagctggtagatgaagctctgggtgctgtggctgctgaacttcaggatatgtgcgaagattatgcagaagctgtgttcacctcagaattcttagaggctgctacataaaggctctctgaggcgaggccatttgtgtcacactggagaagggatggcaccaccctttgttttggcccacaggaaattttcatcctcagctgtccatccaggcccagaaggtgctgcccactgaaaggaaggcagtgccggggaggtcatcctcactttgcattttcttttgtcatggcaatggttctggaaatgtatgatgcaatgtatcacacttatcagtgcccaggcaacacaacttgattatggcaatattttcagaatgtgtacttttcctattgaaataccatgttcattcctctggctcagtttggtgatgaaaatgttttgaaagataatcgatacgtatatttcacacaaggattcaggttgctgttgaacccttgctggcattgataccaacacaagtgcggctactagctggtcccatcacggggcccctgttttgcatctttggcgatttcctgtcaggacctctggccctactaggctgtagactcagggagagcacagtctggctgtgctgccaaacctct

SEQ ID NO: 145859 - DNA, 2262 bp, Homo sapiens
  Payload ID: 8921
  Gene Symbol: KIAA0825
  Gene Name: KIAA0825
  Uniprot ID: Q8IV33
  ENST ID: ENST00000329378
  CDS Start-End: 251-1225
ctccggagccgtcgccagggtggtaatacctggtgcagagcttgagtctggccagcgggtcaggctcttgctagatcagcaccggaggtggaagactggtacattttacatactttgggaaaaaaaaacgttgctgaagttactagaaaagagacagttcttctgctgacaactcttcaggaaataattttctacctccttaggattcgaagaccagttcattcttagtgtcttctgaaataaaattagaatggattgggatgatgaatattctcataattcttttgacctacattgtttgttaaactcatttcctggagacttggagtttgagcagatcttcagtgacattgatgaaaagattgaacaaaatgctgcaagcataaaacattgcattaaagagatacagtccgaaattaacaaacaatgtccaggtgtgcagctgcaaacaacaactgactgctttgaatggctaactaactataattacagtacatctgaatcatctttcatttctcatggagacttgataaaatttttcaaaacactgcaagatttgttgaagaatgaacaaaatcaagaagaaatgacattggatttactttgggacctctcctgccacagcagcgtttcattcccatcaaccctaagtggaacatctttccatttcctctctaggacgtctcttcattctgttgaagataattcctctatggatgtcaagtctatgtgggatgatataagactgcatcttcgacgcttcttagtgagcaaattacaaagccataatgaaataaacaattcacagcaaaaaattttattgaaaaagcagtgcttacaacaactcttgtttctttatccagaatcagaagttataatcaaataccaaaacatacagaataaactgttggctaatcttctgtggaactgctttccttcttacaacagagattcaaatttagatgtaatagctcatggatatcaaagtacaatgcttaagttatactcagtaataaaagaggattttaacacactatgtgaaattttagctccatcttcaatggtgaaattcattaaagaaacttacctggatactgttacagaagaaatggcaaaatttcttgaaaatttttgtgagctgcagttcagagaaaatgctgttcgtgtggttaaaacaagcaagagctccagcaagcatagaggagcagtgcatgctttgggttagtgacatttaaaatttttgtttggtttaacttaagtcttttaatatgtttaattttctaagatgttttctatttggttaaatctcactgcaaacatgaaaattagaaaatgaatgtaatgaaattttgcagtatacatttctcatgcatttttttctataattgtagttataaaagtattttctttcttattaaattgttaaagatattggaaatataagccaaaaatactttaaataagagtttaatttctcttgattgcatatgacaaacagtatttgtgaaactgtgtgtatacacacatatatataaatgagtatatatgcttatacacatataagctcctttatctgtttattaaatatacgcatatatataagcacatatactcagttatatatatgtacatttagttatatacataacagaaaagtatgatttttaatccattgtatcttccaaagctaaagcattattaggtaaaaagaatttttgaaaatttgttgaaatttgcagtaaaattggatatttaaaagttgtaatattttagtcagtcaattctaataatgagcaactatgaaatactataattataaaattctgtattgtagttgattaggaaggtataacattttactatagctatttttaaagtttctctactattttttctataaggatgtatacaaataaaagatgatttgaaaatttctattttattcataagataaaggaaaaaaggaaagaagttattgtgatataataaacttttcttattgtggttgtactttcctaccagtggagaaaaatcagggtaaaaataggattatttctaaaattatcattagttatgcttttatataaaatctgaggtgtatttctgaataagttcataaactatatggcttaagtatttgaaaattattatttggtgaattatggatctttgaatttatgatcatctttttaaaattcctatagctcactatacttgtgcgtatcttcattaataaaatttcagttgaccaaattaatgtga

SEQ ID NO: 145860 - DNA, 3968 bp, Homo sapiens
  Payload ID: 8921
  Gene Symbol: KIAA0825
  Gene Name: KIAA0825
  ENST ID: ENST00000427991
  CDS Start-End: 258-3968
agtgacgctccggagccgtcgccagggtggtaatacctggtgcagagcttgagtctggccagcgggtcaggctcttgctagatcagcaccggaggtggaagactggtacattttacatactttgggaaaaaaaaacgttgctgaagttactagaaaagagacagttcttctgctgacaactcttcaggaaataattttctacctccttaggattcgaagaccagttcattcttagtgtcttctgaaataaaattagaatggattgggatgatgaatattctcataattcttttgacctacattgtttgttaaactcatttcctggagacttggagtttgagcagatcttcagtgacattgatgaaaagattgaacaaaatgctgcaagcataaaacattgcattaaagagatacagtccgaaattaacaaacaatgtccaggtgtgcagctgcaaacaacaactgactgctttgaatggctaactaactataattacagtacatctgaatcatctttcatttctcatggagacttgataaaatttttcaaaacactgcaagatttgttgaagaatgaacaaaatcaagaagaaatgacattggatttactttgggacctctcctgccacagcagcgtttcattcccatcaaccctaagtggaacatctttccatttcctctctaggacgtctcttcattctgttgaagataattcctctatggatgtcaagtctatgtgggatgatataagactgcatcttcgacgcttcttagtgagcaaattacaaagccataatgaaataaacaattcacagcaaaaaattttattgaaaaagcagtgcttacaacaactcttgtttctttatccagaatcagaagttataatcaaataccaaaacatacagaataaactgttggctaatcttctgtggaactgctttccttcttacaacagagattcaaatttagatgtaatagctcatggatatcaaagtacaatgcttaagttatactcagtaataaaagaggattttaacacactatgtgaaattttagctccatcttcaatggtgaaattcattaaagaaacttacctggatactgttacagaagaaatggcaaaatttcttgaaaatttttgtgagctgcagttcagagaaaatgctgttcgtgtggttaaaacaagcaagagctccagcaagcatagaggagcagtgcatgctttggttactactgaatgcccacagaaaggaagaaacttctctctccctttagacaaagtcgaattcttatcgcagctcataaaatcctttatgaaactggaaaaaggtgttcaagaattgtttgacgaaatacttttatcactcaagataaccagggatacttcaggaattttggagaaatccgatagagaggttgtaatggaaaaacctagagcaaacgaaaccaatattccttccgagcaatcactaccaggaaaagaggctaccttactagattttggctggagaagtgcatttaaagaagtgtctcttcccatggcgcactgcgtagtaactgcaattgaaggtttttccacaaaaattctccaacaggaacagaatgaaaggtcttcagctgtgagctatgctatgaaccttgtaaatgtccagcaagtttggcaagacagccatatgtttcctgaggaggaacaaccaaagaaaattggaaaattttgttctgacatcatggaaaaacttgacacaatgcttccactggctctggcatgcagagatgattcttttcaggaaattagagcaaacttggtggaggcctgttgtaaagtggcaacagctgtcctgcagagactgcaagagagagccaaggaggttccttccaaagcacccctgaaaaacttgcacacatacctctccacagcggtgtatgtcttccagcatttcaagcgatatgataatttgatgaaggaaatgactaaaaaacccatattcctggtgcttgtccaacgatatcaggaattcatcaacactctacagtttcaggttacgaactactgcgtcagagtttgtgctacaagcattttacaggatgctgagagccaccactgggatgactacaaagctttttatgagggggaaagatgttccttctcgatccagatgtggcattatttctgctggtctcttcattacgatctctggaccattctgcctcctaagttagcccaggagattctagtggaagtgctggagaaatctttgagtctactggcctccagatacgctcgggcccaccccagccgtaaaagaactccacagttaagacttgatgtcacaacaattttgatatgcactgagaacatgttatggtcagtttgtacatctgtacagaaacttttgaatcctcatcagcatacagatgataaaatttttaaaattcacactcattgtaataatctgtttacaacattagtcattttgacttcaccattaacagaattatataagacttttcagcatggcctggatgagtctgcttcagattccttaaaatcattttttaagcaaccattatattgggtttcttgcatatcacatttctacccttctttactcaggactccatcagctggaggactgaaagccgagggtcagttgaaactgctcttatcccagccacgttgtaactggaacttgcttctggaaaccctactgcatcatgatggacttttactgagaatcttgctgaagagctcaaaacaagtttccgacacagaaaataacctgaaccaaggacccagcttgatggaagccatctttaaaatattgtaccattgcagtttttctccacaaacatttgcaaacgtttttgtgagctacatggaagaagagcaattatgggactttttatataacatcccagtctcaacgtgcgtggagtacgagctagaggtcatccgatgcttgagactggcactgaccgatgccatcaaggacactgtacagcagatagtatctgtaatgagttctaggagaaactgtgagacaaacctaaacaagcacattgttcctgattgtttgcttgagagcatgccaaaggaatggaattatagtccaaaagaaactaacaggaaagaatcatgcaaaagcttcacaaggcttactgctcaggcagtatctattgtaatcagcaagttacctacggtgattgcatgtttgcctcccccagttaaatacttcttttttctgtctgagagaaaaatgtcaaaaaaatttgttgaattgaagaaagctggcctgcttgtctggaacttgattgtaattatatgtcggatatttgaggacggaaacactgtggaacttttaacaggtgcctctcttgacagatggagtaaagaaaaattgggtttaatttgtatgtgtttgaaaagcatcatgggagaccagacaagtatccataatcaaatgatccaaaaggtcatacagagcattgagcagcagaagcccaactggattgaacgtcaattgttgaaagcaaggaaactgagcactgaatgtgcatttatgacaatagagaaaagcacggccttacaagaaggagatgttgctcttgaactgactgagcagaaaataaacacgatggtcctggatctctgccacaaaccaggtggcagggagtacctgaggcaaatttatcacatcatgcagctcaatgaggaatatttaaaagaacagctgttttctatgaatagttcagaggaaaagccattacccatccgacctttaaagacgaccttgaggagtatagaagatcagccttctgcctttaaccctttccatgtgtataaggcgtttagtgaaaacatgctagatcaggtatccatcacaaaatggaactggaattgggcaaagttgctgccaaattatctgagactggataagatgaccttcagtgtgctgctcaaaaacagg

SEQ ID NO: 145861 - DNA, 4942 bp, Homo sapiens
  Payload ID: 8921
  Gene Symbol: KIAA0825
  Gene Name: KIAA0825
  ENST ID: ENST00000513200
  CDS Start-End: 74-3901
tacctggtgcagagcttgagtctggccagcgggtcaggctcttgctagatcagcaccggaggtggaagactgaatggattgggatgatgaatattctcataattcttttgacctacattgtttgttaaactcatttcctggagacttggagtttgagcagatcttcagtgacattgatgaaaagattgaacaaaatgctgcaagcataaaacattgcattaaagagatacagtccgaaattaacaaacaatgtccaggtgtgcagctgcaaacaacaactgactgctttgaatggctaactaactataattacagtacatctgaatcatctttcatttctcatggagacttgataaaatttttcaaaacactgcaagatttgttgaagaatgaacaaaatcaagaagaaatgacattggatttactttgggacctctcctgccacagcagcgtttcattcccatcaaccctaagtggaacatctttccatttcctctctaggacgtctcttcattctgttgaagataattcctctatggatgtcaagtctatgtgggatgatataagactgcatcttcgacgcttcttagtgagcaaattacaaagccataatgaaataaacaattcacagcaaaaaattttattgaaaaagcagtgcttacaacaactcttgtttctttatccagaatcagaagttataatcaaataccaaaacatacagaataaactgttggctaatcttctgtggaactgctttccttcttacaacagagattcaaatttagatgtaatagctcatggatatcaaagtacaatgcttaagttatactcagtaataaaagaggattttaacacactatgtgaaattttagctccatcttcaatggtgaaattcattaaagaaacttacctggatactgttacagaagaaatggcaaaatttcttgaaaatttttgtgagctgcagttcagagaaaatgctgttcgtgtggttaaaacaagcaagagctccagcaagcatagaggagcagtgcatgctttggttactactgaatgcccacagaaaggaagaaacttctctctccctttagacaaagtcgaattcttatcgcagctcataaaatcctttatgaaactggaaaaaggtgttcaagaattgtttgacgaaatacttttatcactcaagataaccagggatacttcaggaattttggagaaatccgatagagaggttgtaatggaaaaacctagagcaaacgaaaccaatattccttccgagcaatcactaccaggaaaagaggctaccttactagattttggctggagaagtgcatttaaagaagtgtctcttcccatggcgcactgcgtagtaactgcaattgaaggtttttccacaaaaattctccaacaggaacagaatgaaaggtcttcagctgtgagctatgctatgaaccttgtaaatgtccagcaagtttggcaagacagccatatgtttcctgaggaggaacaaccaaagaaaattggaaaattttgttctgacatcatggaaaaacttgacacaatgcttccactggctctggcatgcagagatgattcttttcaggaaattagagcaaacttggtggaggcctgttgtaaagtggcaacagctgtcctgcagagactgcaagagagagccaaggaggttccttccaaagcacccctgaaaaacttgcacacatacctctccacagcggtgtatgtcttccagcatttcaagcgatatgataatttgatgaaggaaatgactaaaaaacccatattcctggtgcttgtccaacgatatcaggaattcatcaacactctacagtttcaggttacgaactactgcgtcagagtttgtgctacaagcattttacaggatgctgagagccaccactgggatgactacaaagctttttatgagggggaaagatgttccttctcgatccagatgtggcattatttctgctggtctcttcattacgatctctggaccattctgcctcctaagttagcccaggagattctagtggaagtgctggagaaatctttgagtctactggcctccagatacgctcgggcccaccccagccgtaaaagaactccacagttaagacttgatgtcacaacaattttgatatgcactgagaacatgttatggtcagtttgtacatctgtacagaaacttttgaatcctcatcagcatacagatgataaaatttttaaaattcacactcattgtaataatctgtttacaacattagtcattttgacttcaccattaacagaattatataagacttttcagcatggcctggatgagtctgcttcagattccttaaaatcattttttaagcaaccattatattgggtttcttgcatatcacatttctacccttctttactcaggactccatcagctggaggactgaaagccgagggtcagttgaaactgctcttatcccagccacgttgtaactggaacttgcttctggaaaccctactgcatcatgatggacttttactgagaatcttgctgaagagctcaaaacaagtttccgacacagaaaataacctgaaccaaggacccagcttgatggaagccatctttaaaatattgtaccattgcagtttttctccacaaacatttgcaaacgtttttgtgagctacatggaagaagagcaattatgggactttttatataacatcccagtctcaacgtgcgtggagtacgagctagaggtcatccgatgcttgagactggcactgaccgatgccatcaaggacactgtacagcagatagtatctgtaatgagttctaggagaaactgtgagacaaacctaaacaagcacattgttcctgattgtttgcttgagagcatgccaaaggaatggaattatagtccaaaagaaactaacaggaaagaatcatgcaaaagcttcacaaggcttactgctcaggcagtatctattgtaatcagcaagttacctacggtgattgcatgtttgcctcccccagttaaatacttcttttttctgtctgagagaaaaatgtcaaaaaaatttgttgaattgaagaaagctggcctgcttgtctggaacttgattgtaattatatgtcggatatttgaggacggaaacactgtggaacttttaacaggtgcctctcttgacagatggagtaaagaaaaattgggtttaatttgtatgtgtttgaaaagcatcatgggagaccagacaagtatccataatcaaatgatccaaaaggtcatacagagcattgagcagcagaagcccaactggattgaacgtcaattgttgaaagcaaggaaactgagcactgaatgtgcatttatgacaatagagaaaagcacggccttacaagaaggagatgttgctcttgaactgactgagcagaaaataaacacgatggtcctggatctctgccacaaaccaggtggcagggagtacctgaggcaaatttatcacatcatgcagctcaatgaggaatatttaaaagaacagctgttttctatgaatagttcagaggaaaagccattacccatccgacctttaaagacgaccttgaggagtatagaagatcagccttctgcctttaaccctttccatgtgtataaggcgtttagtgaaaacatgctagatcagtcagccatcacaaaatggaactggaattgggcaaagttgctgccaaattatctgagactggataagatgaccttcagtgtgctgctcaaaaacaggtgggaaatgaagaaggatgaaacactagaagaggaagaaaaagcaatactggagcacttaaaacaaatttgcaccccacagaactcttctgcctcagataacatagaggaacagtaatctgcagaaaacagcaacagctttattttaggaaacaatcccatgtaatggagtaggattttttaccatagtcagaatgaacctcatatgtgctgtgaagcatgaaaccaatgactgagtaatctctgtactgaaaaggaatacagcacataaaggataaggtgctacatatttttttattttaaaaataatttcaaatgtttttctttccccaatctttctctttatatgatataactgctgccatctcgtgttccctttgaattatttttttctcctttcagtcttgaagtatctatgacaacaggaagaaatgttcagaaattttttaaaggattttttaaatacaacatttggatgttaagttgagtggagtcacatagccccaggaggtcatctgaaatttttaatttaattttgttgtagctgtagcccaagtcccaattttaattgcctttactatccacaattgtgtcaactttcctcattcaatttatctaattatagtcaaaaaaaagcattctcctgaactataactttagtcacacctctgcttgtagtggttttcagtcttcctcctaaaccagaatcaaatttctactcatacatattcaggtcctataccaaatggctccatgttcagacaattgcttgccatcctcttggttcaagtcacatgcttgccatgttttcccaatcagaatccatctttcttccaaaattaggctcaaaactaattccagcaatctttaccccaaagctcattagctcatataatgtgttactttaaaattttttcattgtattgatacacacacacaaaataagaaaacagaacatgctctagtaccctctctgccaaggacaattatagatatttattatttccttcctatcactgcctgatattagattataaagacattgaagatattatgatataatatgaagtctccctttataactccctgtatgcctactacagtgttatttcatcaagtggacagttaacgaacacaattgattaaatagctgccaatg

SEQ ID NO: 145862 - DNA, 4153 bp, Homo sapiens
  Payload ID: 8922
  Gene Symbol: KIAA0895
  Gene Name: KIAA0895
  Uniprot ID: Q8NCT3
  ENST ID: ENST00000297063
  CDS Start-End: 52-1614
tcgcccagaggttgacagaggaaggtgggtgggggcctagagcggtgggtcatggctggctgcacccgcaaactcactcacctccgtaaacggatccatcgccccaggcgtcggactacgagacgatggaaacggtggttcaaattcaggaagagaaaaggagagaaaaggccaagacctaatcataaggcagtggcaagaagagctaaactcaagttctctacctcagaaaagcttcactggcctgagcaagaacttgctaagaagtctattctaaatgcagaagattcattgatcattgacaacaaaagaagcatttcacatttgtcctcgggagtgctaaaagacattttcacaactggaaccagtagttacaatgtcctactacagagcaaggaggaaaaaaagtatcattcacaaaaacagtcttcctccacctactccaaaagatgtagaaaacccagcaaatctcctaacacttctcgtagcaaagatcctcgcaggatgaaagccctggtgcctgtgacaagcagtggtacttggtactgcctggagaggcggcctgctgtttttgtcactagttcagtgtcaagtcctgtaaagtttacacatgatatctctgttacagggaatggcatagtactgccacctaaacccaaaagcaaggtcaagtggtgccatttctccactcttccaaagccaaagcctcagctgtctagaagctttgaaaagggagatgacttttctgggaagaaattttgtatattgactgctataaaacccaccaacttagagaaagaaaaactgagattcttcaaatctgactatacctacaatcctcagtttgagtatgccaatcctgctctgccaagcgtattagctaagcatagccacgcatctgaccgatttcttaagcagattgtagttcatctcactgaggacctgctttcccgagcgtcaatgacagtagtaaatggatgtccgactctgactatcaatgtgtccactgcacgtgagcattggctggagggaatgctgaggcatgaaataggtacacattattttcgaggtattaacaacctccagcagccatggaacagttggactggacgtaaaaaacatgagctaaagccaaataatcccacagaggaaggactagcaagcattcacagtgttctgtttagaaaagacccttttttatggagggctgccctcctctactacactgtttatcaagccagccaaatgtctttttgtgaactctttaaagatattggcaggtttgtcaaggaccccaatacaagatgggattattgtgtacgggccaagaggggatggactgatacttcccaaccagggtgttttagtaaagaccaggtatacttggatggaattcttcaaatcctccgatacagagataccatagacttccatctgctgactgctctcgggaaggtttcttatgaagatgtggatcgcttaaaaggattggcagttaccgaaaacatgagggtccctcatttcctgcaggaccatggccgatatatggaacacttagagaagatcatggaagtgaatgaactgactgacagggaactgaaagatcttatatagtaattagcgttctggcaaacatagctaagctatgcctccatgtatattaccagttaggtgcagttagcaccagaagatttataaaagaagaaagactacttgtgttttctgaagaagggtcttcagtattcagcggaatttttaggttaagtacagatcttaaactatttccctaaaatgtttctataggttgcagggggaagttattcctattttctgaatctcgacagagtcagatgaaaatactactgctgagcatttttgaagactcttggtcaaattgcatgataaatttctgcctgagcagtaagcactggcctagtgcttctgcctaaatatggaggtcagctccaactggagactggctgaattccattgctgttcagactccaaagttatattttatttgataaataatggtaattattctcctttgaaaaattagttttgtgttgctccaaaaagctagctatatatctcagctttcttatttcttttatatgttgagggattttaaagggagaggaaaagcaatttgaaaatttttcattaagtgttttattttaacattattgtttcaccttatcagcttataggaactaaattagagaatcacctctttttgtccggttatctcttaactatgttttcatttgctgaaacatattgtacccttttaaattttttacagagttttaacgtcttttccactgcatcctttataaaaataagtacaaattccagagaggttttcctacacaaatacaaaataattggggaagggctactcaccttttttatgaaacagaatatgtaacaagcagaggacaaatagactgacctggttaaacgtaggttctggatgttgatgggtagcacctgcagtaaacttgaccatgctctgaaaaaagaaatttctgggtattgatggtttataaagccagctttgtgctattggttcagtatattttatcaaatctttgacttcatcaacccagtaatgacatagtttaaattttaaaatgagagttctgttttgctgtatttctcctgctagcctagctttgtattttatcatcagcttcagtatatacttgtatatatatacctggattcaaatggttcttcatacaacttaatgatcagaaagaatgctgctgtaaacaccccactcaagattgctgctggaatttctacccaaagctgtctgagagtttatctttacctcagtgcaggcttaaataatggtgctaatactggtagatatatactgtgaagcctggttcacattcatgctagaaaatgattttgggaaatcttttataggagaggttacatgatttttctctttcacatatctagaaggacttgcctcaaagaagaatgttgcagcaaacaggatatactctagctggtgcccaaaggttcttgcaaaaccatgaatcttgcttttagcagtaaagggccagacactttggagcattgaaaggccttagcccctgctccccaactacgtgccatgctgggtagtgtgtatcctgtacatctgtgtgccaggctggggcagactgtgccaatgctcaccgaacactagaatctgctcttacacctctagcatgtatctcgttgtagcagagttgtgcactttctcagcattgtgtagtgttttctaattgcatctaaaaacttatcaaaagtgattgtgaaaacagtgtcttagaagtataaacagaaatggcaatatttatgtcctgtgattcaagcccaaaggttataaattcaactttcacagggaatagcactgctaatcttactttatgatttaaatataaaggaaaatcacagcagccttaatttcctgttggtcggatcatttgcagcagttctagttcctgacttttaaaatggatgaaattttctctttgtctgatttggaaaaggaactgcttttttgccttactgctttggtataaggatgaaaaacatgagcactctgcagacaaaatgaccttaaatcacattgattaagatattttaaaagttagcagtgaaccaaaagtagtttcagattagcagaaataaagagctttaagttttaaaagttgagattgaatatttaatgaaagtttattaattctttttccaggaatagcagtaaggtcagtttttttccctaaaataaaaagttttaataaacagaaaattatagcaacagtacttaggagaatagttgaagattgtattaattttaattataatagttatttgtcataggctattgatgattagaatttcattagttttgtccactataattttaaaaatagttgtgtcaaatacaaattctggtaaactgttaggttttaacaccagacagtattcaaaggaaattaatgtttgcaaacataaatccatagtcttcatttctttatattgtcacctttgtaaaagtgtttaaaatttgtattgtttgttttgtatatctttgggcatcttgtgtctagctataataaaaagaaacggtgccaaggttctcaga

SEQ ID NO: 145863 - DNA, 4241 bp, Homo sapiens
  Payload ID: 8922
  Gene Symbol: KIAA0895
  Gene Name: KIAA0895
  Uniprot ID: Q8NCT3
  ENST ID: ENST00000317020
  CDS Start-End: 302-1711
agtttcctagcaaccggcggagcggctacgtcacggtggcaggttctaagcgctgctgggcaccgtaaggccgccgtgtgtaccttccagtagctacgggctggtggaagcgctgctcacagtcagtgtcggtacgtcttcgtccgcccttaccctccttatcctgctccaggtagcggagagccgcctcccgccgcgcccccgccaccgaggcccgggtcagaggctagaggccgcccgcccctgcgcggccctttcccctgagcccgcggagcccgccgccccgggcctcggggcgacgatgctggagtccattcgcgtgacggaaaagcttcactggcctgagcaagaacttgctaagaagtctattctaaatgcagaagattcattgatcattgacaacaaaagaagcatttcacatttgtcctcgggagtgctaaaagacattttcacaactggaaccagtagttacaatgtcctactacagagcaaggaggaaaaaaagtatcattcacaaaaacagtcttcctccacctactccaaaagatgtagaaaacccagcaaatctcctaacacttctcgtagcaaagatcctcgcaggatgaaagccctggtgcctgtgacaagcagtggtacttggtactgcctggagaggcggcctgctgtttttgtcactagttcagtgtcaagtcctgtaaagtttacacatgatatctctgttacagggaatggcatagtactgccacctaaacccaaaagcaaggtcaagtggtgccatttctccactcttccaaagccaaagcctcagctgtctagaagctttgaaaagggagatgacttttctgggaagaaattttgtatattgactgctataaaacccaccaacttagagaaagaaaaactgagattcttcaaatctgactatacctacaatcctcagtttgagtatgccaatcctgctctgccaagcgtattagctaagcatagccacgcatctgaccgatttcttaagcagattgtagttcatctcactgaggacctgctttcccgagcgtcaatgacagtagtaaatggatgtccgactctgactatcaatgtgtccactgcacgtgagcattggctggagggaatgctgaggcatgaaataggtacacattattttcgaggtattaacaacctccagcagccatggaacagttggactggacgtaaaaaacatgagctaaagccaaataatcccacagaggaaggactagcaagcattcacagtgttctgtttagaaaagacccttttttatggagggctgccctcctctactacactgtttatcaagccagccaaatgtctttttgtgaactctttaaagatattggcaggtttgtcaaggaccccaatacaagatgggattattgtgtacgggccaagaggggatggactgatacttcccaaccagggtgttttagtaaagaccaggtatacttggatggaattcttcaaatcctccgatacagagataccatagacttccatctgctgactgctctcgggaaggtttcttatgaagatgtggatcgcttaaaaggattggcagttaccgaaaacatgagggtccctcatttcctgcaggaccatggccgatatatggaacacttagagaagatcatggaagtgaatgaactgactgacagggaactgaaagatcttatatagtaattagcgttctggcaaacatagctaagctatgcctccatgtatattaccagttaggtgcagttagcaccagaagatttataaaagaagaaagactacttgtgttttctgaagaagggtcttcagtattcagcggaatttttaggttaagtacagatcttaaactatttccctaaaatgtttctataggttgcagggggaagttattcctattttctgaatctcgacagagtcagatgaaaatactactgctgagcatttttgaagactcttggtcaaattgcatgataaatttctgcctgagcagtaagcactggcctagtgcttctgcctaaatatggaggtcagctccaactggagactggctgaattccattgctgttcagactccaaagttatattttatttgataaataatggtaattattctcctttgaaaaattagttttgtgttgctccaaaaagctagctatatatctcagctttcttatttcttttatatgttgagggattttaaagggagaggaaaagcaatttgaaaatttttcattaagtgttttattttaacattattgtttcaccttatcagcttataggaactaaattagagaatcacctctttttgtccggttatctcttaactatgttttcatttgctgaaacatattgtacccttttaaattttttacagagttttaacgtcttttccactgcatcctttataaaaataagtacaaattccagagaggttttcctacacaaatacaaaataattggggaagggctactcaccttttttatgaaacagaatatgtaacaagcagaggacaaatagactgacctggttaaacgtaggttctggatgttgatgggtagcacctgcagtaaacttgaccatgctctgaaaaaagaaatttctgggtattgatggtttataaagccagctttgtgctattggttcagtatattttatcaaatctttgacttcatcaacccagtaatgacatagtttaaattttaaaatgagagttctgttttgctgtatttctcctgctagcctagctttgtattttatcatcagcttcagtatatacttgtatatatatacctggattcaaatggttcttcatacaacttaatgatcagaaagaatgctgctgtaaacaccccactcaagattgctgctggaatttctacccaaagctgtctgagagtttatctttacctcagtgcaggcttaaataatggtgctaatactggtagatatatactgtgaagcctggttcacattcatgctagaaaatgattttgggaaatcttttataggagaggttacatgatttttctctttcacatatctagaaggacttgcctcaaagaagaatgttgcagcaaacaggatatactctagctggtgcccaaaggttcttgcaaaaccatgaatcttgcttttagcagtaaagggccagacactttggagcattgaaaggccttagcccctgctccccaactacgtgccatgctgggtagtgtgtatcctgtacatctgtgtgccaggctggggcagactgtgccaatgctcaccgaacactagaatctgctcttacacctctagcatgtatctcgttgtagcagagttgtgcactttctcagcattgtgtagtgttttctaattgcatctaaaaacttatcaaaagtgattgtgaaaacagtgtcttagaagtataaacagaaatggcaatatttatgtcctgtgattcaagcccaaaggttataaattcaactttcacagggaatagcactgctaatcttactttatgatttaaatataaaggaaaatcacagcagccttaatttcctgttggtcggatcatttgcagcagttctagttcctgacttttaaaatggatgaaattttctctttgtctgatttggaaaaggaactgcttttttgccttactgctttggtataaggatgaaaaacatgagcactctgcagacaaaatgaccttaaatcacattgattaagatattttaaaagttagcagtgaaccaaaagtagtttcagattagcagaaataaagagctttaagttttaaaagttgagattgaatatttaatgaaagtttattaattctttttccaggaatagcagtaaggtcagtttttttccctaaaataaaaagttttaataaacagaaaattatagcaacagtacttaggagaatagttgaagattgtattaattttaattataatagttatttgtcataggctattgatgattagaatttcattagttttgtccactataattttaaaaatagttgtgtcaaatacaaattctggtaaactgttaggttttaacaccagacagtattcaaaggaaattaatgtttgcaaacataaatccatagtcttcatttctttatattgtcacctttgtaaaagtgtttaaaatttgtattgtttgttttgtatatctttgggcatcttgtgtctagctataataaaaagaaacggtgccaag

SEQ ID NO: 145864 - DNA, 4132 bp, Homo sapiens
  Payload ID: 8922
  Gene Symbol: KIAA0895
  Gene Name: KIAA0895
  Uniprot ID: Q8NCT3
  ENST ID: ENST00000338533
  CDS Start-End: 72-1595
gagtgccgggaagggctggccgcggcgggggtgcggggcggaccggggtcccgccgcccggggctcaggtaatggtagccaccggctgggcgcgccgctcgggactccaccctgcgccccgaccccttcggggcgcgcaggaggcgctcgcgaaaaacctgtggagggaagagagaaatcggccccttatcctttcgtcacttattatcaaaaagcttcactggcctgagcaagaacttgctaagaagtctattctaaatgcagaagattcattgatcattgacaacaaaagaagcatttcacatttgtcctcgggagtgctaaaagacattttcacaactggaaccagtagttacaatgtcctactacagagcaaggaggaaaaaaagtatcattcacaaaaacagtcttcctccacctactccaaaagatgtagaaaacccagcaaatctcctaacacttctcgtagcaaagatcctcgcaggatgaaagccctggtgcctgtgacaagcagtggtacttggtactgcctggagaggcggcctgctgtttttgtcactagttcagtgtcaagtcctgtaaagtttacacatgatatctctgttacagggaatggcatagtactgccacctaaacccaaaagcaaggtcaagtggtgccatttctccactcttccaaagccaaagcctcagctgtctagaagctttgaaaagggagatgacttttctgggaagaaattttgtatattgactgctataaaacccaccaacttagagaaagaaaaactgagattcttcaaatctgactatacctacaatcctcagtttgagtatgccaatcctgctctgccaagcgtattagctaagcatagccacgcatctgaccgatttcttaagcagattgtagttcatctcactgaggacctgctttcccgagcgtcaatgacagtagtaaatggatgtccgactctgactatcaatgtgtccactgcacgtgagcattggctggagggaatgctgaggcatgaaataggtacacattattttcgaggtattaacaacctccagcagccatggaacagttggactggacgtaaaaaacatgagctaaagccaaataatcccacagaggaaggactagcaagcattcacagtgttctgtttagaaaagacccttttttatggagggctgccctcctctactacactgtttatcaagccagccaaatgtctttttgtgaactctttaaagatattggcaggtttgtcaaggaccccaatacaagatgggattattgtgtacgggccaagaggggatggactgatacttcccaaccagggtgttttagtaaagaccaggtatacttggatggaattcttcaaatcctccgatacagagataccatagacttccatctgctgactgctctcgggaaggtttcttatgaagatgtggatcgcttaaaaggattggcagttaccgaaaacatgagggtccctcatttcctgcaggaccatggccgatatatggaacacttagagaagatcatggaagtgaatgaactgactgacagggaactgaaagatcttatatagtaattagcgttctggcaaacatagctaagctatgcctccatgtatattaccagttaggtgcagttagcaccagaagatttataaaagaagaaagactacttgtgttttctgaagaagggtcttcagtattcagcggaatttttaggttaagtacagatcttaaactatttccctaaaatgtttctataggttgcagggggaagttattcctattttctgaatctcgacagagtcagatgaaaatactactgctgagcatttttgaagactcttggtcaaattgcatgataaatttctgcctgagcagtaagcactggcctagtgcttctgcctaaatatggaggtcagctccaactggagactggctgaattccattgctgttcagactccaaagttatattttatttgataaataatggtaattattctcctttgaaaaattagttttgtgttgctccaaaaagctagctatatatctcagctttcttatttcttttatatgttgagggattttaaagggagaggaaaagcaatttgaaaatttttcattaagtgttttattttaacattattgtttcaccttatcagcttataggaactaaattagagaatcacctctttttgtccggttatctcttaactatgttttcatttgctgaaacatattgtacccttttaaattttttacagagttttaacgtcttttccactgcatcctttataaaaataagtacaaattccagagaggttttcctacacaaatacaaaataattggggaagggctactcaccttttttatgaaacagaatatgtaacaagcagaggacaaatagactgacctggttaaacgtaggttctggatgttgatgggtagcacctgcagtaaacttgaccatgctctgaaaaaagaaatttctgggtattgatggtttataaagccagctttgtgctattggttcagtatattttatcaaatctttgacttcatcaacccagtaatgacatagtttaaattttaaaatgagagttctgttttgctgtatttctcctgctagcctagctttgtattttatcatcagcttcagtatatacttgtatatatatacctggattcaaatggttcttcatacaacttaatgatcagaaagaatgctgctgtaaacaccccactcaagattgctgctggaatttctacccaaagctgtctgagagtttatctttacctcagtgcaggcttaaataatggtgctaatactggtagatatatactgtgaagcctggttcacattcatgctagaaaatgattttgggaaatcttttataggagaggttacatgatttttctctttcacatatctagaaggacttgcctcaaagaagaatgttgcagcaaacaggatatactctagctggtgcccaaaggttcttgcaaaaccatgaatcttgcttttagcagtaaagggccagacactttggagcattgaaaggccttagcccctgctccccaactacgtgccatgctgggtagtgtgtatcctgtacatctgtgtgccaggctggggcagactgtgccaatgctcaccgaacactagaatctgctcttacacctctagcatgtatctcgttgtagcagagttgtgcactttctcagcattgtgtagtgttttctaattgcatctaaaaacttatcaaaagtgattgtgaaaacagtgtcttagaagtataaacagaaatggcaatatttatgtcctgtgattcaagcccaaaggttataaattcaactttcacagggaatagcactgctaatcttactttatgatttaaatataaaggaaaatcacagcagccttaatttcctgttggtcggatcatttgcagcagttctagttcctgacttttaaaatggatgaaattttctctttgtctgatttggaaaaggaactgcttttttgccttactgctttggtataaggatgaaaaacatgagcactctgcagacaaaatgaccttaaatcacattgattaagatattttaaaagttagcagtgaaccaaaagtagtttcagattagcagaaataaagagctttaagttttaaaagttgagattgaatatttaatgaaagtttattaattctttttccaggaatagcagtaaggtcagtttttttccctaaaataaaaagttttaataaacagaaaattatagcaacagtacttaggagaatagttgaagattgtattaattttaattataatagttatttgtcataggctattgatgattagaatttcattagttttgtccactataattttaaaaatagttgtgtcaaatacaaattctggtaaactgttaggttttaacaccagacagtattcaaaggaaattaatgtttgcaaacataaatccatagtcttcatttctttatattgtcacctttgtaaaagtgtttaaaatttgtattgtttgttttgtatatctttgggcatcttgtgtctagctataataaaaagaaacggtgccaaggttctca

SEQ ID NO: 145865 - DNA, 1952 bp, Homo sapiens
  Payload ID: 8922
  Gene Symbol: KIAA0895
  Gene Name: KIAA0895
  Uniprot ID: Q8NCT3
  ENST ID: ENST00000436884
  CDS Start-End: 435-1688
aagcgcagcgcgcgcggaccccgggggcagtttcctagcaaccggcggagcggctacgtcacggtggcaggttctaagcgctgctgggcaccgtaaggccgccgtgtgtaccttccagtagctacgggctggtggaagcgctgctcacagtcagtgtcgaaaagcttcactggcctgagcaagaacttgctaagaagtctattctaaatgcagaagattcattgatcattgacaacaaaagaagcatttcacatttgtcctcgggagtgctaaaagacattttcacaactggaaccagtagttacaatgtcctactacagagcaaggaggaaaaaaagtatcattcacaaaaacagtcttcctccacctactccaaaagatgtagaaaacccagcaaatctcctaacacttctcgtagcaaagatcctcgcaggatgaaagccctggtgcctgtgacaagcagtggtacttggtactgcctggagaggcggcctgctgtttttgtcactagttcagtgtcaagtcctgtaaagtttacacatgatatctctgttacagggaatggcatagtactgccacctaaacccaaaagcaaggtcaagtggtgccatttctccactcttccaaagccaaagcctcagctgtctagaagctttgaaaagggagatgacttttctgggaagaaattttgtatattgactgctataaaacccaccaacttagagaaagaaaaactgagattcttcaaatctgactatacctacaatcctcagtttgagtatgccaatcctgctctgccaagcgtattagctaagcatagccacgcatctgaccgatttcttaagcagtctatcaatattatggaactgactttacagaaatatggaagttatgaaaaatttgaacaagccactggtggtagcttgctctctaaaactcgaatctggagtcacgttaggaagtacatgatgaaggaaggctgcctaggggagattgtagttcatctcactgaggacctgctttcccgagcgtcaatgacagtagtaaatggatgtccgactctgactatcaatgtgtccactgcacgtgagcattggctggagggaatgctgaggcatgaaataggtacacattattttcgaggtattaacaacctccagcagccatggaacagttggactggacgtaaaaaacatgagctaaagccaaataatcccacagaggaaggactagcaagcattcacagtgttctgtttagaaaagacccttttttatggagggctgccctcctctactacactgtttatcaagccagccaaatgtctttttgtgaactctttaaagatattggcaggtttgtcaaggaccccaatacaagatgggattattgtgtacgggccaagaggggatggactgatacttcccaaccagggtgttttagtaaagaccaggtatacttggatggaattcttcaaatcctccgatacagagataccatagacttccatctgctgactgctctcgggaaggtttcttatgaagatgtggatcgcttaaaaggattggcagttaccgaaaacatgagggtccctcatttcctgcaggaccatggccgatatatggaacacttagagaagatcatggaagtgaatgaactgactgacagggaactgaaagatcttatatagtaattagcgttctggcaaacatagctaagctatgcctccatgtatattaccagttaggtgcagttagcaccagaagatttataaaagaagaaagactacttgtgttttctgaagaagggtcttcagtattcagcggaatttttaggttaagtacagatcttaaactatttccctaaaatgtttctataggttgcagggggaagttattcctattttctgaatctcgacagagtcagatgaaaatactactgctgagcatttttg

SEQ ID NO: 145866 - DNA, 956 bp, Homo sapiens
  Payload ID: 8922
  Gene Symbol: KIAA0895
  Gene Name: KIAA0895
  ENST ID: ENST00000453212
  CDS Start-End: 74-901
ccgccgtgtgtaccttccagtagctacgggctggtggaagcgctgctcacagtcagtgtcgtctatcaatattatggaactgactttacagaaatatggaagttatgaaaaatttgaacaagccactggtggtagcttgctctctaaaactcgaatctggagtcacgttaggaagtacatgatgaaggaaggctgcctaggggagattgtagttcatctcactgaggacctgctttcccgagcgtcaatgacagtagtaaatggatgtccgactctgactatcaatgtgtccactgcacgtgagcattggctggagggaatgctgaggcatgaaataggtacacattattttcgaggtattaacaacctccagcagccatggaacagttggactggacgtaaaaaacatgagctaaagccaaataatcccacagaggaaggactagcaagcattcacagtgttctgtttagaaaagacccttttttatggagggctgccctcctctactacactgtttatcaagccagccaaatgtctttttgtgaactctttaaagatattggcaggtttgtcaaggaccccaatacaagatgggattattgtgtacgggccaagaggggatggactgatacttcccaaccagggtgttttagtaaagaccaggtatacttggatggaattcttcaaatcctccgatacagagataccatagacttccatctgctgactgctctcgggaaggtttcttatgaagatgtggatcgcttaaaaggattggcagttaccgaaaacatgagggtccctcatttcctgcaggaccatggccgatatatggaacacttagagaagatcatggaagtgaatgaactgactgacagggaactgaaagatcttatatagtaattagcgttctggcaaacatagctaagctatgcctccatgtatattaccagtt

SEQ ID NO: 145867 - DNA, 437 bp, Homo sapiens
  Payload ID: 8922
  Gene Symbol: KIAA0895
  Gene Name: KIAA0895
  ENST ID: ENST00000429651
  CDS Start-End: 13-437
gagcggtgggtcatggctggctgcacccgcaaactcactcacctccgtaaacggatccatcgccccaggcgtcggactacgagacgatggaaacggtggttcaaattcaggaagagaaaaggagagaaaaggccaagacctaatcataaggcagtggcaagaagagctaaactcaagttctctacctcagggaatggcatagtactgccacctaaacccaaaagcaaggtcaagtggtgccatttctccactcttccaaagccaaagcctcagctgtctagaagctttgaaaagggagatgacttttctgggaagaaattttgtatattgactgctataaaacccaccaacttagagaaagaaaaactgagattcttcaaatctgactatacctacaatcctcagtttgagtatgccaatcctgctctgccaagcgt

SEQ ID NO: 145868 - DNA, 2441 bp, Homo sapiens
  Payload ID: 8922
  Gene Symbol: KIAA0895
  Gene Name: KIAA0895
  Uniprot ID: Q8NCT3
  ENST ID: ENST00000440378
  CDS Start-End: 262-1815
aggttctaagcgctgctgggcaccgtaaggccgccgtgtgtaccttccagtagctacgggctggtggaagcgctgctcacagtcagtgtcggtacgtcttcgtccgcccttaccctccttatcctgctccaggtagcggagagccgcctcccgccgcgcccccgccaccgaggcccgggtcagaggctagaggccgcccgcccctgcgcggccctttcccctgagcccgcggagcccgccgccccgggcctcggggcgacgatgctggagtccattcgcgtgacggaaaagcttcactggcctgagcaagaacttgctaagaagtctattctaaatgcagaagattcattgatcattgacaacaaaagaagcatttcacatttgtcctcgggagtgctaaaagacattttcacaactggaaccagtagttacaatgtcctactacagagcaaggaggaaaaaaagtatcattcacaaaaacagtcttcctccacctactccaaaagatgtagaaaacccagcaaatctcctaacacttctcgtagcaaagatcctcgcaggatgaaagccctggtgcctgtgacaagcagtggtacttggtactgcctggagaggcggcctgctgtttttgtcactagttcagtgtcaagtcctgtaaagtttacacatgatatctctgttacagggaatggcatagtactgccacctaaacccaaaagcaaggtcaagtggtgccatttctccactcttccaaagccaaagcctcagctgtctagaagctttgaaaagggagatgacttttctgggaagaaattttgtatattgactgctataaaacccaccaacttagagaaagaaaaactgagattcttcaaatctgactatacctacaatcctcagtttgagtatgccaatcctgctctgccaagcgtattagctaagcatagccacgcatctgaccgatttcttaagcagtctatcaatattatggaactgactttacagaaatatggaagttatgaaaaatttgaacaagccactggtggtagcttgctctctaaaactcgaatctggagtcacgttaggaagtacatgatgaaggaaggctgcctaggggagattgtagttcatctcactgaggacctgctttcccgagcgtcaatgacagtagtaaatggatgtccgactctgactatcaatgtgtccactgcacgtgagcattggctggagggaatgctgaggcatgaaataggtacacattattttcgaggtattaacaacctccagcagccatggaacagttggactggacgtaaaaaacatgagctaaagccaaataatcccacagaggaaggactagcaagcattcacagtgttctgtttagaaaagacccttttttatggagggctgccctcctctactacactgtttatcaagccagccaaatgtctttttgtgaactctttaaagatattggcaggtttgtcaaggaccccaatacaagatgggattattgtgtacgggccaagaggggatggactgatacttcccaaccagggtgttttagtaaagaccaggtatacttggatggaattcttcaaatcctccgatacagagataccatagacttccatctgctgactgctctcgggaaggtttcttatgaagatgtggatcgcttaaaaggattggcagttaccgaaaacatgagggtccctcatttcctgcaggaccatggccgatatatggaacacttagagaagatcatggaagtgaatgaactgactgacagggaactgaaagatcttatatagtaattagcgttctggcaaacatagctaagctatgcctccatgtatattaccagttaggtgcagttagcaccagaagatttataaaagaagaaagactacttgtgttttctgaagaagggtcttcagtattcagcggaatttttaggttaagtacagatcttaaactatttccctaaaatgtttctataggttgcagggggaagttattcctattttctgaatctcgacagagtcagatgaaaatactactgctgagcatttttgaagactcttggtcaaattgcatgataaatttctgcctgagcagtaagcactggcctagtgcttctgcctaaatatggaggtcagctccaactggagactggctgaattccattgctgttcagactccaaagttatattttatttgataaataatggtaattattctcctttgaaaaattagttttgtgttgctccaaaaagctagctatatatctcagctttcttatttcttttatatgttgagggattttaaagggagaggaaaagcaatttgaaaatttttcattaagtgttttattttaacattattgtttcaccttatcagcttataggaactaaattagagaatcacctctttttgt

SEQ ID NO: 145869 - DNA, 603 bp, Homo sapiens
  Payload ID: 8922
  Gene Symbol: KIAA0895
  Gene Name: KIAA0895
  ENST ID: ENST00000431396
  CDS Start-End: 312-603
acgtcacggtggcaggttctaagcgctgctgggcaccgtaaggccgccgtgtgtaccttccagtagctacgggctggtggaagcgctgctcacagtcagtgtcggtacgtcttcgtccgcccttaccctccttatcctgctccaggtagcggagagccgcctcccgccgcgcccccgccaccgaggcccgggtcagaggctagaggccgcccgcccctgcgcggccctttcccctgagcccgcggagcccgccgccccgggcctcggggcgacgatgctggagtccattcgcgtgacggtctatcaatattatggaactgactttacagaaatatggaagttatgaaaaatttgaacaagccactggtggtagcttgctctctaaaactcgaatctggagtcacgttaggaagtacatgatgaaggaaggctgcctaggggagattgtagttcatctcactgaggacctgctttcccgagcgtcaatgacagtagtaaatggatgtccgactctgactatcaatgtgtccactgcacgtgagcattggctggagggaatgctgaggcatgaaataggtacacattattttcgaggtattaaca

SEQ ID NO: 145870 - DNA, 2865 bp, Homo sapiens
  Payload ID: 8922
  Gene Symbol: KIAA0895
  Gene Name: KIAA0895
  Uniprot ID: Q8NCT3
  ENST ID: ENST00000415803
  CDS Start-End: 332-1246
ggccgccgtgtgtaccttccagtagctacgggctggtggaagcgctgctcacagtcagtgtcggtacgtcttcgtccgcccttaccctccttatcctgctccaggtagcggagagccgcctcccgccgcgcccccgccaccgaggcccgggtcagaggctagaggccgcccgcccctgcgcggccctttcccctgagcccgcggagcccgccgccccgggcctcggggcgacgatgctggagtccattcgcgtgacgggtgagtgccgggaagggctggccgcggcgggggtgcggggcggaccggggtcccgccgcccggggctcaggtaatggtagccaccggctgggcgcgccgctcgggactccaccctgcgccccgaccccttcggggcgcgcaggaggcgctcgcgaaaaacctgtggagggaagagagaaatcggccccttatcctttcgtcacttattatcaaaaagcttcactggcctgagcaagaacttgctaagaagtctattctaaatgcagaagattcattgatcattgacaacaaaagaagcatttcacatttgtcctcgggagtgctaaaagacattttcacaactggaaccagtagttacaatgtcctactacagagcaaggaggaaaaaaagtatcattcacaaaaacagtcttcctccacctactccaaaagatgtagaaaacccagcaaatctcctaacacttctcgtagcaaagatcctcgcaggatgaaagccctggtgcctgtgacaagcagtggtacttggtactgcctggagaggcggcctgctgtttttgtcactagttcagtgtcaagtcctgtaaagtttacacatgatatctctgttacagggaatggcatagtactgccacctaaacccaaaagcaaggtcaagtggtgccatttctccactcttccaaagccaaagcctcagctgtctagaagctttgaaaagggagatgacttttctgggaagaaattttgtatattgactgctataaaacccaccaacttagagaaagaaaaactgagattcttcaaatctgactatacctacaatcctcagtttgagtatgccaatcctgctctgccaagcgtattagctaagcatagccacgcatctgaccgatttcttaagcaggtaaaatgccatttcaatagtggtagttcatttttatgtactaaaacaattatctgtgatcttataagcaaaaacaaagacatttaaaaatattcaaattatttctatgttatggttaattcccactcaggacatgtaaatgtgcgacaagacgagtattacctgtatataaactccattgcattcatcaaaatttataatctgttatataggctctttgtgacaggaagcaattatattaggaagacagcttcagattctggttctaagctttcatgtgggagttacaaacttgtggccaatttagccgcctacagacaagtgttgggtagcccacactacgtttttgttttctaattgatttctttgttgttttttgtttttttctgagacagattcttgctctttgcccaggttggagtgtagtggcacgatcttggctcactgcaacctctgccttctgggttcaagtgattcttgtgtctcagcctcccgagtagctgggactacaggcacccgccaccatacccagctaatttttgtaattttagtgaagatggggtttcaccattttggccaggctggtcttgaactcctgatctccagtgatttgcccgccttggcctcccaaagtgttgaggttgcaggtgtgagccaccatgcctggcctctaattgattttttaatgtcttagatggagcatgcaatccctggttcttcctattgtgttaaattcctggcttgcttaggctccggtaagtagtttgggaaccgaagcttgattcttgtccatgaacttgttaatgcttcactgaaattgttaatcatcatcaaataaatatttaagcacttattcaaagataaaaataatgggattttcaaaattatcttcaagtttagcaaattatgatgtgaacgttatgaataatacttttaaattgctcactttaagcccttagcagttttgtgttttacagggctataatacatttcagaacctcatttaagcatttgagaagaaattagctaatgtttatctgcagggcatagttttgagatcataaaggccgacaatatttggtcaaattaactttgttcaggtttttataatatattagcttcaacttggcattgtcagtgactgaaaatctgtttgtaggataggtaaaactgcatggttctctcgcctgtggtgcatgtcctattttagcatttttgctgataatagttatttggtcttgcggccagcagatattttgctgtttattatagataacatggaatctggccagtcttttgaagccattatgtaaaacttaattatgtaaagccattatgtaaagattaaaataattttaatcatggtatttactttcctttgttagggtctctttgcttctgcttctgtattctttaatgggtatttgctttttaaaaaatgtgctgagattgtgctaaaaattgtgattcaaattgataacttactaatataaagtggcacttctggatgggagaaggcagcattaacatagtgattacataatccactcttaggctgtactacttccacattgtaaaatggagtaaagaaaatacctactttaggagattattttgataattaaatgagagaatgcttagtgcatatattgcagttatcatcgtgcttggcacctacaaagcactaataaagaggttagctgtta

SEQ ID NO: 145871 - DNA, 3550 bp, Homo sapiens
  Payload ID: 8923
  Gene Symbol: KIAA0895L
  Gene Name: KIAA0895-like
  Uniprot ID: Q68EN5
  ENST ID: ENST00000290881
  CDS Start-End: 928-2343
tggcctcgggggcgcgccgccgcggagactgacgcgaagccccacgctttcgtaagagcgtgcgcgcgcccgaggacgtacgtcatcggcgacggctcccgccggctgggcgtccggtggccggtgtagcagagcgggagcggcgggcggcgagcagaggagctaacaggtgggggcacggcacgcggacggacccccccaaaggccgggaggaggcgcgcgacgcgacctttcctgatctcccggagaagcctccactccattgtctcctggccccaccctccattgggcacgcccttcaccttatcccccaccacttattggctgcaggtcacgcccctcctctatttctggttccccattggctcttcaccttgtcctctccggggcttctctccgcacaggccacaccctctcatttgtcactagaccccgccttaatagtggggggctcctcccccatccatccttcattcattatgcacccagtgctgggtgcttggtacacgggggtgaatcagaccccattcctgccttcggggagttcaggggattgtgggaggacacggacctagactccaacagtgacagctctgagtaaagaagtcgccgaagcagtgggacactagacgcggggaaggcttcctggaggaagtgaggcctaaactgagccttgaagaatggttaagagtttgctccaggaatatattgcaaaggcattcttggcggaaggacccgagacgtgaaaaaaacaggcgtattctggtaatttcgaggagatggagaagtaacagcatgtgtttatcctgatggaaagagtccagtagagaggaagagattgatgatgtaggagagaggagaaatgctggaaaggtcgacagtgtggggagttggagtgacccggctggatgtgacccccaggacagaatggtgctggactcaggggctcaggcgtatgatcaggcaccccccagcccgcctaccagtcccccatccctgcgccataggctgaagccctcagaccgagatgggccaccactgtacccctggtctcagtccctggccttgcccctggctctggcagtccccccagcgctgcagccccagcctgagcagcagccgttctcacagatgctcctgggccaccgtggccacatgcgtcgcagtgagagcacctactctgtaaatagtactggccggcgggggcgtggcaccctgggacggcctccacctggacggggacggaacccaggtgggggcaccctgcggcctgcagcctccctgcctcacattgctaagactcaaagggatgcaggccatattgccagcaagagcccctgcatgttggtggccctgcggccaaccaacatggaccgtgagcgagacaagttcttccagtcccattacacctacaatccacagtttgagtaccaggagcccatgcccacggctgtgctggaaaagtactgcgaggcctctggacagttcatccatcaggcagttggcatcattgaggctgttctggagaagtttggaacctatgaacactttgaggctgccactggggggcagctgctcaccaagtgccagatatggtcgattgtgcgcaaatacatgcagaaggagggctgcgctggggaggttgtggtgcagctgagtgaggacctgctgtcccaggcagtgatgatggtggagaacagccggcccacattggcgatcaacctgaccggagcccgccagtactggttggagggcatgctgcggcatgagataggcacccactacctgcggggcgtgaacaacgcgcgccagccgtggcacaacgcggagggccggctgcggtacgggctgcggccggcgaaccccacggaggagggcctggccagcctgcacagcgtgctgttccgcaagcagccgttcctgtggcgcgctgcactgctctactacaccatccaccgcgccgcgcgcatgtccttccgtcagctcttccaggacctggagcgctacgtgcaggacgccgatgtgcgctgggagtactgcgtgcgcgccaagcgcggccagaccgacacctcgctgccaggttgtttcagcaaggaccaggtgtacctggacggcatcgtgcgcattctgcgacatcgccagaccatcgatttcccgttgctgacctcactgggcaaggtgtcctatgaggatgtggaccacctgcggccccatggggtgctggataatacccgggtgccccacttcatgcaggacttggcacgctaccggcagcagctggagcacatcatggccaccaaccggctggatgaggcggagctgggtcgcctgctacccgactgatgtccgttgagggctgcagtcagaggccctggacagaagctccagataggcccctagaacatgaagcagtttgctctgtgcgtccacggcctaggtgtttcttgggggtgttgggagggcaggagcattccttgaggaggagtggcaacatcaaagtgtttgtgtcccttgccagcctccctggggtctggggacctgcagcagcatgtctggcaaactgagtcgccctcctgcctccagctctctgttgagcagagggaaggcatgggggcaggaagagagctgagcattgatggggatgggggtggtttgggaatagaaacttgttcttgcatgagatggctttggttgtcccagtactccagtctctcccttcccttacctggccccttggtgctccttcagcatttgtgctgtctacctctcactgggtcctggtgggggtcgggctcccttctcctggggtgattgatggcctgagcctggggtcctggtagtagagacccagctggcctggggtctgctttccgacattttgcctctctcactggtcatgtatttattccatatttatatggtctacttcctgtggctgggagcagcagctcctgaaggttccgtgggggtgcggggggttggacaggacactccttcttggaaggcaccaattttcccagccccactcccattacacacacacacacacacacacacacacacacacacacacacacacacacacacacacacacacactgattcaggccttgagagtcaagcccaagagctcccttggccctgttccccactccctccactggcctctgctgttcctgtctttgctcacaccctcacagctgctctctggcagaggttggcatagcctaggagcagctgcaattgcacctgagggacaggccctagagtttggtggcccaagtcctgaacccctcttagaccaggtgaggtgcagaggtggttgctgcttccagtttcccttcagacttagctgtgtgaaccccactcctatcctttggccttagttttcccatctgtaaaactcagaaacgcagttggaaagtccttattcatttagtaagcgaatatattataatatgtatagagcgccttttgtgtaagtcactggtcagaatcctcactgagctcccagtccagagagaagccagacaattaaaacagtaatgac

SEQ ID NO: 145872 - DNA, 2233 bp, Homo sapiens
  Payload ID: 8923
  Gene Symbol: KIAA0895L
  Gene Name: KIAA0895-like
  Uniprot ID: Q68EN5
  ENST ID: ENST00000563902
  CDS Start-End: 737-2152
cgccggctgggcgtccggtggccggtgtagcagagcgggagcggcgggcggcgagcagaggagctaacaggtgggggcacggcacgcggacggacccccccaaaggccgggaggaggcgcgcgacgcgacctttcctgatctcccggagaagcctccactccattgtctcctggccccaccctccattgggcacgcccttcaccttatcccccaccacttattggctgcaggtcacgcccctcctctatttctggttccccattggctcttcaccttgtcctctccggggcttctctccgcacaggccacaccctctcatttgtcactagaccccgccttaatagtggggggctcctcccccatccatccttcattcattatgcacccagtgctgggtgcttggtacacgggggtgaatcagaccccattcctgccttcggggagttcaggggattgtgggaggacacggacctagactccaacagtgacagctctgagtaaagaagtcgccgaagcagtgggacactagacgcggggaaggcttcctggaggaagtgaggcctaaactgagccttgaagaatggttaagagtttgctccaggaatatattgcaaaggcattcttggcggaaggacccgagacgtgaaaaaaacaggcgtattctggtaatttcgaggagaggtcgacagtgtggggagttggagtgacccggctggatgtgacccccaggacagaatggtgctggactcaggggctcaggcgtatgatcaggcaccccccagcccgcctaccagtcccccatccctgcgccataggctgaagccctcagaccgagatgggccaccactgtacccctggtctcagtccctggccttgcccctggctctggcagtccccccagcgctgcagccccagcctgagcagcagccgttctcacagatgctcctgggccaccgtggccacatgcgtcgcagtgagagcacctactctgtaaatagtactggccggcgggggcgtggcaccctgggacggcctccacctggacggggacggaacccaggtgggggcaccctgcggcctgcagcctccctgcctcacattgctaagactcaaagggatgcaggccatattgccagcaagagcccctgcatgttggtggccctgcggccaaccaacatggaccgtgagcgagacaagttcttccagtcccattacacctacaatccacagtttgagtaccaggagcccatgcccacggctgtgctggaaaagtactgcgaggcctctggacagttcatccatcaggcagttggcatcattgaggctgttctggagaagtttggaacctatgaacactttgaggctgccactggggggcagctgctcaccaagtgccagatatggtcgattgtgcgcaaatacatgcagaaggagggctgcgctggggaggttgtggtgcagctgagtgaggacctgctgtcccaggcagtgatgatggtggagaacagccggcccacattggcgatcaacctgaccggagcccgccagtactggttggagggcatgctgcggcatgagataggcacccactacctgcggggcgtgaacaacgcgcgccagccgtggcacaacgcggagggccggctgcggtacgggctgcggccggcgaaccccacggaggagggcctggccagcctgcacagcgtgctgttccgcaagcagccgttcctgtggcgcgctgcactgctctactacaccatccaccgcgccgcgcgcatgtccttccgtcagctcttccaggacctggagcgctacgtgcaggacgccgatgtgcgctgggagtactgcgtgcgcgccaagcgcggccagaccgacacctcgctgccaggttgtttcagcaaggaccaggtgtacctggacggcatcgtgcgcattctgcgacatcgccagaccatcgatttcccgttgctgacctcactgggcaaggtgtcctatgaggatgtggaccacctgcggccccatggggtgctggataatacccgggtgccccacttcatgcaggacttggcacgctaccggcagcagctggagcacatcatggccaccaaccggctggatgaggcggagctgggtcgcctgctacccgactgatgtccgttgagggctgcagtcagaggccctggacagaagctccagataggcccctagaacatgaagcagtttgctctgtgc

SEQ ID NO: 145873 - DNA, 3500 bp, Homo sapiens
  Payload ID: 8923
  Gene Symbol: KIAA0895L
  Gene Name: KIAA0895-like
  Uniprot ID: Q68EN5
  ENST ID: ENST00000561621
  CDS Start-End: 888-2114
gcgacggctcccgccggctgggcgtccggtggccggtgtagcagagcgggagcggcgggcggcgagcagaggagctaacaggtgggggcacggcacgcggacggacccccccaaaggccgggaggaggcgcgcgacgcgacctttcctgatctcccggagaagcctccactccattgtctcctggccccaccctccattgggcacgcccttcaccttatcccccaccacttattggctgcaggtcacgcccctcctctatttctggttccccattggctcttcaccttgtcctctccggggcttctctccgcacaggccacaccctctcatttgtcactagaccccgccttaatagtggggggctcctcccccatccatccttcattcattatgcacccagtgctgggtgcttggtacacgggggtgaatcagaccccattcctgccttcggggagttcaggggattgtgggaggacacggacctagactccaacagtgacagctctgagtaaagaagtcgccgaagcagtgggacactagacgcggggaaggcttcctggaggaagtgaggcctaaactgagccttgaagaatggttaagagtttgctccaggaatatattgcaaaggcattcttggcggaaggacccgagacgtgaaaaaaacaggcgtattctggtaatttcgaggagatggagaagtaacagcatgtgtttatcctgatggaaagagtccagtagagaggaagagattgatgatgtaggagagaggagaaatgctggaagtgagtcactgagcaggcaagggagctcagcagctggagcctctccagaggtcgacagtgtggggagttggagtgacccggctggatgtgacccccaggacagaatggtgctggactcaggggctcaggcgtatgatcaggcaccccccagcccgcctaccagtcccccatccctgcgccataggctgaagccctcagaccgagatgggccaccactgtacccctggtctcagtccctggccttgcccctggctctggcagtccccccagcgctgcagccccagcctgagcagcagccgttctcacagatgctcctgggccaccgtggccacatgcgtcgcagtgagagcacctactctgtaaatagtactggccggcgggggcgtggcaccctgggacggcctccacctggacggggacggaacccaggtgggggcaccctgcggcctgcagcctccctgcctcacattgctaagactcaaagggatgcaggccatattgccagcaagagcccctgcatgttggtggccctgcggccaaccaacatggaccgtgagcgagacaagttcttccagtcccattacacctacaatccacagtttgagtaccaggagcccatgcccacggctgtgctggaaaagtactgcgaggcctctggacagttcatccatcaggcagttggcatcattgaggctgttctggagaagtttggaacctatgaacactttgaggctgccactggggggcagctgctcaccaagtgccagatatggtcgattgtgcgcaaatacatgcagaaggagggctgcgctggggaggttgtggtgcagctgagtgaggacctgctgtcccaggcagtgatgatggtggagaacagccggcccacattggcgatcaacctgaccggagcccgccagtactggttggagggcatgctgcggcatgagataggcacccactacctgcggggcgtgaacaacgcgcgccagccgtggcacaacgcggagggccggctgcggtacgggctgcggccggcgaaccccacggaggagggcctggccagcctgcacagcgtgctgttccgcaagcagccgttcctgtggcgcgctgcactgctctactacaccatccaccgcgccgcgcgcatgtccttccgtcagctcttccaggacctggagcgctacgtgcaggacgccgatgtgcgctgggagtactgcgtgcgcgccaagcgcggccagaccgacacctcgctgccagcaaggaccaggtgtacctggacggcatcgtgcgcattctgcgacatcgccagaccatcgatttcccgttgctgacctcactgggcaaggtgtcctatgaggatgtggaccacctgcggccccatggggtgctggataatacccgggtgccccacttcatgcaggacttggcacgctaccggcagcagctggagcacatcatggccaccaaccggctggatgaggcggagctgggtcgcctgctacccgactgatgtccgttgagggctgcagtcagaggccctggacagaagctccagataggcccctagaacatgaagcagtttgctctgtgcgtccacggcctaggtgtttcttgggggtgttgggagggcaggagcattccttgaggaggagtggcaacatcaaagtgtttgtgtcccttgccagcctccctggggtctggggacctgcagcagcatgtctggcaaactgagtcgccctcctgcctccagctctctgttgagcagagggaaggcatgggggcaggaagagagctgagcattgatggggatgggggtggtttgggaatagaaacttgttcttgcatgagatggctttggttgtcccagtactccagtctctcccttcccttacctggccccttggtgctccttcagcatttgtgctgtctacctctcactgggtcctggtgggggtcgggctcccttctcctggggtgattgatggcctgagcctggggtcctggtagtagagacccagctggcctggggtctgctttccgacattttgcctctctcactggtcatgtatttattccatatttatatggtctacttcctgtggctgggagcagcagctcctgaaggttccgtgggggtgcggggggttggacaggacactccttcttggaaggcaccaattttcccagccccactcccattacacacacacacacacacacacacacacacacacacacacacacacacacacacacacacacacactgattcaggccttgagagtcaagcccaagagctcccttggccctgttccccactccctccactggcctctgctgttcctgtctttgctcacaccctcacagctgctctctggcagaggttggcatagcctaggagcagctgcaattgcacctgagggacaggccctagagtttggtggcccaagtcctgaacccctcttagaccaggtgaggtgcagaggtggttgctgcttccagtttcccttcagacttagctgtgtgaaccccactcctatcctttggccttagttttcccatctgtaaaactcagaaacgcagttggaaagtccttattcatttagtaagcgaatatattataatatgtatagagcgccttttgtgtaagtcactggtcagaatcctcactgagctcccagtccagagagaagccagacaattaaaacagtaatgac

SEQ ID NO: 145874 - DNA, 1977 bp, Homo sapiens
  Payload ID: 8923
  Gene Symbol: KIAA0895L
  Gene Name: KIAA0895-like
  ENST ID: ENST00000568563
  CDS Start-End: 1-616
ctctggacagttcatccatcaggcagttggcatcattgaggctgttctggagaagtttggaacctatgaacactttgaggctgccactggggggcagctgctcaccaagtgccagatatggtcgattgtgcgcaaatacatgcagaaggagggctgcgctggggaggttgtggtgcagctgagtgaggacctgctgtcccaggcagtgatgatggtggagaacagccggcccacattggcgatcaacctgaccggagcccgccagtactggttggagggcatgctgcggcatgagataggcacccactacctgcggggcgtgaacaacgcgcgccagccgtggcacaacgcggagggccggctgcggtacgggctgcggccggcgaaccccacggaggagggcctggccagcctgcacagcgtgctgttccgcaagcagccgttcctgtggcgcgctgcactgctctactacaccatccaccgcgccgcgcgcatgtccttccgtcagctcttccaggacctggagcgctacgtgcaggacgccgatgtgcgctgggagtactgcgtgcgcgccaagcgcggccagaccgacacctcgctgccaggtgtcctatgaggatgtggaccacctgcggccccatggggtgctggataatacccgggtgccccacttcatgcaggacttggcacgctaccggcagcagctggagcacatcatggccaccaaccggctggatgaggcggagctgggtcgcctgctacccgactgatgtccgttgagggctgcagtcagaggccctggacagaagctccagataggcccctagaacatgaagcagtttgctctgtgcgtccacggcctaggtgtttcttgggggtgttgggagggcaggagcattccttgaggaggagtggcaacatcaaagtgtttgtgtcccttgccagcctccctggggtctggggacctgcagcagcatgtctggcaaactgagtcgccctcctgcctccagctctctgttgagcagagggaaggcatgggggcaggaagagagctgagcattgatggggatgggggtggtttgggaatagaaacttgttcttgcatgagatggctttggttgtcccagtactccagtctctcccttcccttacctggccccttggtgctccttcagcatttgtgctgtctacctctcactgggtcctggtgggggtcgggctcccttctcctggggtgattgatggcctgagcctggggtcctggtagtagagacccagctggcctggggtctgctttccgacattttgcctctctcactggtcatgtatttattccatatttatatggtctacttcctgtggctgggagcagcagctcctgaaggttccgtgggggtgcggggggttggacaggacactccttcttggaaggcaccaattttcccagccccactcccattacacacacacacacacacacacacacacacacacacacacacacacacacacacacacacacacactgattcaggccttgagagtcaagcccaagagctcccttggccctgttccccactccctccactggcctctgctgttcctgtctttgctcacaccctcacagctgctctctggcagaggttggcatagcctaggagcagctgcaattgcacctgagggacaggccctagagtttggtggcccaagtcctgaacccctcttagaccaggtgaggtgcagaggtggttgctgcttccagtttcccttcagacttagctgtgtgaaccccactcctatcctttggccttagttttcccatctgtaaaactcagaaacgcagttggaaagtccttattcatttagtaagcgaatatattataatatgtatagagcgccttttgtgtaagtcactggtcagaatcctcactgagctcccagtccagagagaagccagacaattaaaacagtaatgac

SEQ ID NO: 145875 - DNA, 1155 bp, Homo sapiens
  Payload ID: 8924
  Gene Symbol: KIAA0907
  Gene Name: KIAA0907
  Uniprot ID: Q7Z7F0
  ENST ID: ENST00000368319
  CDS Start-End: 1-1155
atgtccgcggggagcgcgacacatcctggagctggcgggcgccgcagcaaatgggaccaaccagctccagccccacttctcttcctcccgccagcggccccaggtggggaggtcaccagcagtgggggaagtcctgggggcaccacagctgctccttcaggagccttggatgctgctgctgctgtggctgccaagattaatgccatgctcatggcaaaagggaagctgaaaccaactcagaatgcttctgagaagcttcaggctcctggcaaaggcctaactagcaataaaagcaaggatgacctggtggtagctgaagtagaaattaatgatgtgcctctcacatgtaggaacttgctgactcgaggacagactcaagacgagatcagccgacttagtggggctgcagtatcaactcgagggaggttcatgacaactgaggaaaaagccaaagtgggaccaggggatcgtccattatatcttcatgttcagggccagacacgggaattagtggacagagctgtaaaccggatcaaagaaattatcaccaatggagtggtaaaagctgccacaggaacaagtccaacttttaatggtgcaacagtaactgtctatcaccagccagcacccatcgctcagttgtctccagctgttagccagaagcctcccttccagtcagggatgcattatgttcaagataaattatttgtgggtctagaacatgctgtacccacttttaatgtcaaggagaaggtggaaggtccaggctgctcctatttgcagcacattcagattgaaacaggtgccaaagtcttcctgcggggcaaaggttcaggctgcattgagccagcatctggccgagaagcttttgaacctatgtatatttacatcagtcaccccaaaccagaaggcctggctgctgccaagaagctttgtgagaatcttttgcaaacagttcatgctgaatactctagatttgtgaatcagattaatactgctgtacctttaccagcagccagttcaacctccctacggagtaccaagcatagtgccaccagctgtttcattagcacctggagtcttgccggcattacctactggagtcccacctgtgccaacacaatacccgataacacaagtgcagcctccagctag

SEQ ID NO: 145876 - DNA, 4499 bp, Homo sapiens
  Payload ID: 8924
  Gene Symbol: KIAA0907
  Gene Name: KIAA0907
  Uniprot ID: Q7Z7F0
  ENST ID: ENST00000368320
  CDS Start-End: 27-1721
cgggtggttgagtagaagcggtcgccatgtccgcggggagcgcgacacatcctggagctggcgggcgccgcagcaaatgggaccaaccagctccagccccacttctcttcctcccgccagcggccccaggtggggaggtcaccagcagtgggggaagtcctgggggcaccacagctgctccttcaggagccttggatgctgctgctgctgtggctgccaagattaatgccatgctcatggcaaaagggaagctgaaaccaactcagaatgcttctgagaagcttcaggctcctggcaaaggcctaactagcaataaaagcaaggatgacctggtggtagctgaagtagaaattaatgatgtgcctctcacatgtaggaacttgctgactcgaggacagactcaagacgagatcagccgacttagtggggctgcagtatcaactcgagggaggttcatgacaactgaggaaaaagccaaagtgggaccaggggatcgtccattatatcttcatgttcagggccagacacgggaattagtggacagagctgtaaaccggatcaaagaaattatcaccaatggagtggtaaaagctgccacaggaacaagtccaacttttaatggtgcaacagtaactgtctatcaccagccagcacccatcgctcagttgtctccagctgttagccagaagcctcccttccagtcagggatgcattatgttcaagataaattatttgtgggtctagaacatgctgtacccacttttaatgtcaaggagaaggtggaaggtccaggctgctcctatttgcagcacattcagattgaaacaggtgccaaagtcttcctgcggggcaaaggttcaggctgcattgagccagcatctggccgagaagcttttgaacctatgtatatttacatcagtcaccccaaaccagaaggcctggctgctgccaagaagctttgtgagaatcttttgcaaacagttcatgctgaatactctagatttgtgaatcagattaatactgctgtacctttaccaggctatacacaaccctctgctataagtagtgtccctcctcaaccaccatattatccatccaatggctatcagtctggttaccctgttgttccccctcctcagcagccagttcaacctccctacggagtaccaagcatagtgccaccagctgtttcattagcacctggagtcttgccggcattacctactggagtcccacctgtgccaacacaatacccgataacacaagtgcagcctccagctagcactggacagagtccgatgggtggtccttttattcctgctgctcctgtcaaaactgccttgcctgctggcccccagccccagccccagccccagcccccactcccaagtcagccccaggcacagaagagacgattcacagaggagctaccagatgaacgggaatctggactgcttggataccagcatggacccattcatatgactaatttaggtacaggcttctccagtcagaatgagattgaaggtgcaggatcgaagccagcaagttcctcaggcaaagagagagagagggacaggcagttgatgcctccaccagcctttccagtgactggaataaaaacagagtccgatgaaaggaatgggtctgggaccttaacagggagccatggtgagtgtgatatagctgggggaacaggggagtggctaagactggtctaaagctattagttttctcagccgggcgcagtggctcacgcctgtaatcccagcactttgggaggccgaggtgggcagatcacctaaggtcaggagttcaagaccagcttggccaacatagtgaaatcccatctctactaaaaatacaaaaactagcgggcatggtggtgggcgcctgtaattccagctactcagggggttgaggcaggagaatcgcttcaacctgggaggcagaggttgcagtgagccaagatcagaccactgccctccagcctgggcaatagagcaagactccatctcataaataaataaatacataaataaagctattaattttctaacctgatgttcattcaggtgtttaatccaacctctataatctgttggccagtgaaaatacttttgggctgggcacggtggctcacgcctgtaatcccagcactttgggaggccaaggtgggcggataacctgaggtcaggagtttgagaccagcgtggctaacatggtgaaaccccgtctctactaaaaatagaaaaattaagctgggcatggtggtgcatgcctgtaattccagcggcttggaaggctgaggcaggagaatcacttgaacttgggaggtggaggttgcagtgagccaagatcacaccactgcattccagcctgggcactagagtgagactctgtctcaaaaaaaaagaaagagaaagagaaaatagtttctaaaaaattgtatacagacaaccttttatttccaacaaacgtgtgccgagagagagagagagaaaatagttttaaaaaaattgtatacagacaaccttttgtttccaaccaacgtgtatctagaaaagagttagtcgacttattttatacatagcatcagtgaatagtaatgagtggtaggtcatttcaaaatcctgttgcctatattatgtgaataccaggaggtcatctgatacggacttaataaaggttgattttgctttatattgggagctgagccacacctccccttataactctattggtcagtaatggtcagtttgtggctgttaggaaaatgttgccttttagcattccagaactctaaatcctgtagaggtacatgggatattttattctttgcctgtactcataaaaatgaacagaagaaaatacgtttttttcttttcttaacttcttttcttttaactctttaaaaggtgaaatatcagccctcaagagactcacttgctaactttcctttttttctttttttttctttttttgtgtttcttttttctttctctgttttcttacatggttctggtggattcacatttgctgatgctggtgctgtttttcgtgtgatcttcaacgtttttgggtgaccattgaccctgtgacctcaaaatggtgtccaactaaccacttaaaattaacatcttttttttaattaacgaatttatggtatttttttttttcccttggcggggatggggttggggttgttttttctctattctagattatccagccaagaagatgaaaactacagagaagggatttggcttggtggcttatgctgcagattcatctgatgaagaggaggaacatggaggtcataaaaatgcaagtagttttccacagggctggagtttgggataccaatatccttcatcacaaccacgagctaaacaacagatgccattctggatggctccctaggaaacagtggaacagagttttgaccctcagtgactcttcttagcaataatgcatgcatttgatttaacaagactctggggcctgtgctgggaaccatctggacctttgcagaagttagagattcagtgcccccctttcttaaaggggttccttaacaaccacaaaaatccttatttctgcagtggcatagaatctgttaaaatttaattagaatcacaaatttatctcagaagctttttaacagttggtgaaatgtgcttgtccaacaaagcatcctaacagggtcgttcccatacacatttgacctggtcagccttttccaggtgaatagccccagttctgacataaagaaagttttatttgtattttactactgtttggtcaattttgatatataactggttacaaacagagccttactatttattagtggggaaatgattttaagaccgtccttttcagtatttaattctgacagatctgcatccctgttttgttttggattatttctgttttggaaaatgctgtctcatttaaaactgttggatatagctggatcctggataggaaaatgaaattattttttcattgtgttttttaattggggtgatccaaagctggcaccttcaggcacattggtctcatagccattactgtttttattgcccttctaagatcctgtcttcagctgggtcagagaaaacttcttgactaaaactggtcagaactcatcacagaaatgaaatacagtggtctctctctcccagaactggttgcagctaaaacagagagatctgactgctggctataggattttggacttaatgactgaaattgcaaattgtcctttttcttggcattacagattttgccaaaataactttttgtatcaaatattgatgtgtgaaagtgaaggagctagtctgctgaaccaggaatagtttgagatattgaactgtcatttttgcacatttgaatactttgcaggctggctttgtataaacttatcctctggtttcctatatgttgtaaatatttagaccataatttcattataaataaatctataaatattc

SEQ ID NO: 145877 - DNA, 2947 bp, Homo sapiens
  Payload ID: 8924
  Gene Symbol: KIAA0907
  Gene Name: KIAA0907
  Uniprot ID: Q7Z7F0
  ENST ID: ENST00000368321
  CDS Start-End: 25-1869
ggtggttgagtagaagcggtcgccatgtccgcggggagcgcgacacatcctggagctggcgggcgccgcagcaaatgggaccaaccagctccagccccacttctcttcctcccgccagcggccccaggtggggaggtcaccagcagtgggggaagtcctgggggcaccacagctgctccttcaggagccttggatgctgctgctgctgtggctgccaagattaatgccatgctcatggcaaaagggaagctgaaaccaactcagaatgcttctgagaagcttcaggctcctggcaaaggcctaactagcaataaaagcaaggatgacctggtggtagctgaagtagaaattaatgatgtgcctctcacatgtaggaacttgctgactcgaggacagactcaagacgagatcagccgacttagtggggctgcagtatcaactcgagggaggttcatgacaactgaggaaaaagccaaagtgggaccaggggatcgtccattatatcttcatgttcagggccagacacgggaattagtggacagagctgtaaaccggatcaaagaaattatcaccaatggagtggtaaaagctgccacaggaacaagtccaacttttaatggtgcaacagtaactgtctatcaccagccagcacccatcgctcagttgtctccagctgttagccagaagcctcccttccagtcagggatgcattatgttcaagataaattatttgtgggtctagaacatgctgtacccacttttaatgtcaaggagaaggtggaaggtccaggctgctcctatttgcagcacattcagattgaaacaggtgccaaagtcttcctgcggggcaaaggttcaggctgcattgagccagcatctggccgagaagcttttgaacctatgtatatttacatcagtcaccccaaaccagaaggcctggctgctgccaagaagctttgtgagaatcttttgcaaacagttcatgctgaatactctagatttgtgaatcagattaatactgctgtacctttaccaggctatacacaaccctctgctataagtagtgtccctcctcaaccaccatattatccatccaatggctatcagtctggttaccctgttgttccccctcctcagcagccagttcaacctccctacggagtaccaagcatagtgccaccagctgtttcattagcacctggagtcttgccggcattacctactggagtcccacctgtgccaacacaatacccgataacacaagtgcagcctccagctagcactggacagagtccgatgggtggtccttttattcctgctgctcctgtcaaaactgccttgcctgctggcccccagccccagccccagccccagcccccactcccaagtcagccccaggcacagaagagacgattcacagaggagctaccagatgaacgggaatctggactgcttggataccagcatggacccattcatatgactaatttaggtacaggcttctccagtcagaatgagattgaaggtgcaggatcgaagccagcaagttcctcaggcaaagagagagagagggacaggcagttgatgcctccaccagcctttccagtgactggaataaaaacagagtccgatgaaaggaatgggtctgggaccttaacagggagccatgattatccagccaagaagatgaaaactacagagaagggatttggcttggtggcttatgctgcagattcatctgatgaagaggaggaacatggaggtcataaaaatgcaagtagttttccacagggctggagtttgggataccaatatccttcatcacaaccacgagctaaacaacagatgccattctggatggctccctaggaaacagtggaacagagttttgaccctcagtgactcttcttagcaataatgcatgcatttgatttaacaagactctggggcctgtgctgggaaccatctggacctttgcagaagttagagattcagtgcccccctttcttaaaggggttccttaacaaccacaaaaatccttatttctgcagtggcatagaatctgttaaaatttaattagaatcacaaatttatctcagaagctttttaacagttggtgaaatgtgcttgtccaacaaagcatcctaacagggtcgttcccatacacatttgacctggtcagccttttccaggtgaatagccccagttctgacataaagaaagttttatttgtattttactactgtttggtcaattttgatatataactggttacaaacagagccttactatttattagtggggaaatgattttaagaccgtccttttcagtatttaattctgacagatctgcatccctgttttgttttggattatttctgttttggaaaatgctgtctcatttaaaactgttggatatagctggatcctggataggaaaatgaaattattttttcattgtgttttttaattggggtgatccaaagctggcaccttcaggcacattggtctcatagccattactgtttttattgcccttctaagatcctgtcttcagctgggtcagagaaaacttcttgactaaaactggtcagaactcatcacagaaatgaaatacagtggtctctctctcccagaactggttgcagctaaaacagagagatctgactgctggctataggattttggacttaatgactgaaattgcaaattgtcctttttcttggcattacagattttgccaaaataactttttgtatcaaatattgatgtgtgaaagtgaaggagctagtctgctgaaccaggaatagtttgagatattgaactgtcatttttgcacatttgaatactttgcaggctggctttgtataaacttatcctctggtttcctatatgttgtaaatatttagaccataatttcattataaataaatctataaatattctg

SEQ ID NO: 145878 - DNA, 4299 bp, Homo sapiens
  Payload ID: 8925
  Gene Symbol: KIAA0922
  Gene Name: KIAA0922
  ENST ID: ENST00000240487
  CDS Start-End: 1-4164
ccagttccctgcagggtaattccagcaatggggaaaacttccttcagaattattttcttacctactgaagaaggaagcattgaaagttccttatttattaatacctcttcgtatggagtcctttcctatcatgtatctggaattggcactcgtagaatctctacagaagggtctgcaaagcagctaccaaatgcttattttctgcttccaaaggtccagagcattcagctgtctcaaatgcaggcagaaaccactaatactagcctcttgcaggtgcaactggaatgcagtttacataataaagtgtgtcagcaattaaagggttgttatctggaatctgatgatgttttgcgtctacaaatgagcataatggtaacaatggaaaacttttcaaaagaatttgaagaaaacacacaacatttgttagatcatctctctattgtttacgtagctacagatgaatctgagacctcagatgattcagcagtaaatatgtatatattacattcaggaaacagccttatatggatacaggatatacgccatttctcacagagagatgctctgtctctgcagtttgaaccagtactactacctacttctacaacaaactttacaaaaattgcttcttttacctgcaaagcagctacatcatgtgacagtggaattatagaagatgtgaagaaaacaacacacactccaacactaaaagcatgcctcttctcttctgtggctcaggggtattttagaatggactcttctgcaacccagtttcacatagagactcatgagaacacatcaggactttggtcaatatggtaccgcaaccattttgaccgtagtgttgtattaaatgatgtgtttctttccaaggagaccaagcacatgttaaagattctgaatttcactggccctttatttctacctccaggctgttggaatatattttctttgaaacttgctgttaaagacattgccataaatctattcaccaatgtatttttgactacaaacataggtgccatttttgcaatacctctacagatttattcagcaccaaccaaggaagggagtctgggttttgaagtgatagcacattgtggcatgcattatttcatgggaaaatcaaaagcaggaaatcctaattggaatgggagcctttctctggatcaatctacctggaatgtggattctgaacttgcaaataaattgtatgaaagatggaagaaatataaaaatggtgacgtctgcaagtttggcactgatatgcagatgattaatttcacaactggtgaattccagctcaccgaagcttgcccttacctgggtacgcattctgaggaatccaggtttggcatcctccacttacatctgcagcctttggaaatgaaaagggttggcgtagttttcacacctgctgactatggaaaagttacctcactcatactaatccggaataacttgactgttattgacatgattggcgtggaaggatttggagcaagagagttattaaaagtgggtggaagacttcctggtgcaggaggctcactccgatttaaggtgcccgagtccacgctgatggactgccgtagacaactgaaagacagtaagcaaattttatctattacaaagaactttaaagttgagaatattggacctcttcctataactgtttcgtctctgaaaattaatgggtataactgccaaggttatggattcgaggtgctggattgtcatcagttttccctggacccaaacacatcccgcgatatcagcattgtgttcactccagactttacctcctcctgggtaattcgggacctaagtcttgtaaccgcagcggacctagaatttcgcttcactctcaatgtgactctccctcatcacctgttgcccttgtgtgcagacgtggttccaggacccagctgggaggagtcattttggaggctcacggtcttctttgtcagtttgtccctgttgggtgtgattttaatagccttccaacaagcacagtacattctcatggaattcatgaaaacaagacagaggcaaaatgctagctcctcttcacagcaaaacaatggtcctatggatgtaatcagcccccattcttacaaaagcaattgcaagaactttctcgatacatatggcccctctgataaaggcagggggaagaactgccttccagtgaacactccccaaagcaggatccagaatgctgcaaagaggagcccagccacctatggtcattctcagaagaagcacaaatgctcagtgtattacagtaaacacaaaaccagcacagctgcggccagcagcaccagcacgactactgaggaaaaacagacttcacccctgggcagctcactgcctgctgctaaagaggacatttgcactgatgccatgcgtgagaactggatcagcctcagatatgcaagtggcataaatgtcaacctgcagaagaatttaacccttcccaaaaacttactgaataaagaagaaaacacactgaaaaacacaattgttttcagtaatccttcttcagaatgtagtatgaaggagggaatacagacatgtatgtttcctaaggaaactgacattaaaacttcagagaacacagccgagttcaaggaacgggagctctgtccactgaagacctccaagaaactacctgaaaaccatttaccaagaaactcacctcagtaccaccagccagacttgccagaaatttccaggaaaaataatgggaataaccagcaagtacctgtcaagaatgaagtagatcattgtgaaaatttgaagaaggtggacacaaagccttcttcagaaaagaagattcacaaaacatctagagaagacatgttttctgagaaacaggacatacctttcgtagagcaagaagatccttataggaagaaaaagcttcaggagaaaagagaaggaaatttacaaaatttaaattggagtaaaagtcgaacatgtagaaagaacaagaaaaggggtgttgctccagtctcaaggcctcctgaacagagtgatctaaagcttgtgtgcagtgactttgagaggtctgagctgagcagtgacatcaatgtaagaagctggtgtatacaggaaagcactagggaggtttgtaaagcagatgccgaaattgcaagcagtttacctgctgcccagagagaggcagaaggttactaccagaagcctgagaagaaatgtgtggacaagttctgctccgattccagctctgactgtgggagctcctctggcagcgtgcgtgccagccggggcagctgggggagctggagcagcaccagcagctccgacggggataagaagcccatggtggacgcccagcacttcctgccggccggagacagtgtttcacaaaatgattttccttctgaagctcccatctccttgaatctttctcataacatctgcaatcccatgaccgtgaatagtctcccacaatacgcagagccttcctgtcccagccttcctgccgggcccacaggtgttgaagaagataaaggtctttactcacctggagacctgtggcccactccgccagtgtgtgtgacaagcagcttaaactgcaccctggagaacggcgtgccttgtgtgattcaggagtcggccccggttcataatagtttcattgattggagtgcaacatgcgaaggccagttttccagcgcatactgtccattggaattgaacgattacaatgcctttccagaagaaaacatgaactatgccaatggcttcccctgtcctgcagatgttcagacagactttattgatcacaactctcagtctacctggaacaccccacccaacatgcctgctgcctggggacatgccagtttcatcagctctccgccctacctcacaagcacccgaagcttgtctccaatgtctggactttttggttccatctgggccccgcaaagcgatgtgtatgaaaattgctgccccatcaaccccaccacggaacattcgacccacatggaaaaccaagcggtcgtgtgcaaggaatactacccggggttcaacccgtttcgcgcctatatgaacctggacatatggactaccacagcgaataggaatgcaaatttcccactgtctagagactcgagttactgtgggaatgtgtgaaaataattggatttttaaacaatgtgaataaagaggcttgtgttttgattactagtgtaaactggttattgagatagattatgacattggtggatattttggcacttttatatgaaaataaattttttaatgaaa

SEQ ID NO: 145879 - DNA, 5017 bp, Homo sapiens
  Payload ID: 8925
  Gene Symbol: KIAA0922
  Gene Name: KIAA0922
  Uniprot ID: A2VDJ0
  ENST ID: ENST00000409663
  CDS Start-End: 53-4882
agcgagctagcggcgagcgcggcgagcaacggagaggagcgcgagcagcagcatggcggggctccgacgcccgcagcccggctgctactgccgcaccgcggcggccgtgaacctcctgctgggcgtcttccaggtcctgctgccctgctgtcgcccgggaggggctcagggacaagcgattgagccgttgccgaacgtggtggagctgtggcaggcagaagaaggggaactcctgctgcccactcagggtgattctgaagagggtctggaggagccttctcaagaacagagcttctcggacaaactatttagtggaaaaggcttacattttcagccatcagttttagattttggaatacagttcctgggacatcctgtagcaaagattctccatgcttacaaccctagtagggacagcgaggttgtggtgaattcagtgtttgcagctgctggacatttccatgtaccgccagttccctgcagggtaattccagcaatggggaaaacttccttcagaattattttcttacctactgaagaaggaagcattgaaagttccttatttattaatacctcttcgtatggagtcctttcctatcatgtatctggaattggcactcgtagaatctctacagaagggtctgcaaagcagctaccaaatgcttattttctgcttccaaaggtccagagcattcagctgtctcaaatgcaggcagaaaccactaatactagcctcttgcaggtgcaactggaatgcagtttacataataaagtgtgtcagcaattaaagggttgttatctggaatctgatgatgttttgcgtctacaaatgagcataatggtaacaatggaaaacttttcaaaagaatttgaagaaaacacacaacatttgttagatcatctctctattgtttacgtagctacagatgaatctgagacctcagatgattcagcagtaaatatgtatatattacattcaggaaacagccttatatggatacaggatatacgccatttctcacagagagatgctctgtctctgcagtttgaaccagtactactacctacttctacaacaaactttacaaaaattgcttcttttacctgcaaagctacatcatgtgacagtggaattatagaagatgtgaagaaaacaacacacactccaacactaaaagcatgcctcttctcttctgtggctcaggggtattttagaatggactcttctgcaacccagtttcacatagagactcatgagaacacatcaggactttggtcaatatggtaccgcaaccattttgaccgtagtgttgtattaaatgatgtgtttctttccaaggagaccaagcacatgttaaagattctgaatttcactggccctttatttctacctccaggctgttggaatatattttctttgaaacttgctgttaaagacattgccataaatctattcaccaatgtatttttgactacaaacataggtgccatttttgcaatacctctacagatttattcagcaccaaccaaggaagggagtctgggttttgaagtgatagcacattgtggcatgcattatttcatgggaaaatcaaaagcaggaaatcctaattggaatgggagcctttctctggatcaatctacctggaatgtggattctgaacttgcaaataaattgtatgaaagatggaagaaatataaaaatggtgacgtctgcaagaggaatgttttgggaacaactcgatttgctcacttgaagaaatccaaggagtcagagtcctttgttttctttttgcctcgtttgatcgcagagcctggcctcatgttaaacttcagcgcaactgcccttaggagcaggatgatcaagtactttgtggtgcagaacccgtcctcttggccggtctccttgcagctcctgcctctctccttgtaccctaaacccgaagccctagtgcacctgctccacagatggtttggcactgatatgcagatgattaatttcacaactggtgaattccagctcaccgaagcttgcccttacctgggtacgcattctgaggaatccaggtttggcatcctccacttacatctgcagcctttggaaatgaaaagggttggcgtagttttcacacctgctgactatggaaaagttacctcactcatactaatccggaataacttgactgttattgacatgattggcgtggaaggatttggagcaagagagttattaaaagtgggtggaagacttcctggtgcaggaggctcactccgatttaaggtgcccgagtccacgctgatggactgccgtagacaactgaaagacagtaagcaaattttatctattacaaagaactttaaagttgagaatattggacctcttcctataactgtttcgtctctgaaaattaatgggtataactgccaaggttatggattcgaggtgctggattgtcatcagttttccctggacccaaacacatcccgcgatatcagcattgtgttcactccagactttacctcctcctgggtaattcgggacctaagtcttgtaaccgcagcggacctagaatttcgcttcactctcaatgtgactctccctcatcacctgttgcccttgtgtgcagacgtggttccaggacccagctgggaggagtcattttggaggctcacggtcttctttgtcagtttgtccctgttgggtgtgattttaatagccttccaacaagcacagtacattctcatggaattcatgaaaacaagacagaggcaaaatgctagctcctcttcacagcaaaacaatggtcctatggatgtaatcagcccccattcttacaaaagcaattgcaagaactttctcgatacatatggcccctctgataaaggcagggggaagaactgccttccagtgaacactccccaaagcaggatccagaatgctgcaaagaggagcccagccacctatggtcattctcagaagaagcacaaatgctcagtgtattacagtaaacacaaaaccagcacagctgcggccagcagcaccagcacgactactgaggaaaaacagacttcacccctgggcagctcactgcctgctgctaaagaggacatttgcactgatgccatgcgtgagaactggatcagcctcagatatgcaagtggcataaatgtcaacctgcagaagaatttaacccttcccaaaaacttactgaataaagaagaaaacacactgaaaaacacaattgttttcagtaatccttcttcagaatgtagtatgaaggagggaatacagacatgtatgtttcctaaggaaactgacattaaaacttcagagaacacagccgagttcaaggaacgggagctctgtccactgaagacctccaagaaactacctgaaaaccatttaccaagaaactcacctcagtaccaccagccagacttgccagaaatttccaggaaaaataatgggaataaccagcaagtacctgtcaagaatgaagtagatcattgtgaaaatttgaagaaggtggacacaaagccttcttcagaaaagaagattcacaaaacatctagagaagacatgttttctgagaaacaggacatacctttcgtagagcaagaagatccttataggaagaaaaagcttcaggagaaaagagaaggaaatttacaaaatttaaattggagtaaaagtcgaacatgtagaaagaacaagaaaaggggtgttgctccagtctcaaggcctcctgaacagagtgatctaaagcttgtgtgcagtgactttgagaggtctgagctgagcagtgacatcaatgtaagaagctggtgtatacaggaaagcactagggaggtttgtaaagcagatgccgaaattgcaagcagtttacctgctgcccagagagaggcagaaggttactaccagaagcctgagaagaaatgtgtggacaagttctgctccgattccagctctgactgtgggagctcctctggcagcgtgcgtgccagccggggcagctgggggagctggagcagcaccagcagctccgacggggataagaagcccatggtggacgcccagcacttcctgccggccggagacagtgtttcacaaaatgattttccttctgaagctcccatctccttgaatctttctcataacatctgcaatcccatgaccgtgaatagtctcccacaatacgcagagccttcctgtcccagccttcctgccgggcccacaggtgttgaagaagataaaggtctttactcacctggagacctgtggcccactccgccagtgtgtgtgacaagcagcttaaactgcaccctggagaacggcgtgccttgtgtgattcaggagtcggccccggttcataatagtttcattgattggagtgcaacatgcgaaggccagttttccagcgcatactgtccattggaattgaacgattacaatgcctttccagaagaaaacatgaactatgccaatggcttcccctgtcctgcagatgttcagacagactttattgatcacaactctcagtctacctggaacaccccacccaacatgcctgctgcctggggacatgccagtttcatcagctctccgccctacctcacaagcacccgaagcttgtctccaatgtctggactttttggttccatctgggccccgcaaagcgatgtgtatgaaaattgctgccccatcaaccccaccacggaacattcgacccacatggaaaaccaagcggtcgtgtgcaaggaatactacccggggttcaacccgtttcgcgcctatatgaacctggacatatggactaccacagcgaataggaatgcaaatttcccactgtctagagactcgagttactgtgggaatgtgtgaaaataattggatttttaaacaatgtgaataaagaggcttgtgttttgattactagtgtaaactggttattgagatagattatgacattggtggatattttggcacttttatatgaaaataaattttttaatgaaa

SEQ ID NO: 145880 - DNA, 5017 bp, Homo sapiens
  Payload ID: 8925
  Gene Symbol: KIAA0922
  Gene Name: KIAA0922
  Uniprot ID: A2VDJ0
  ENST ID: ENST00000409959
  CDS Start-End: 50-4882
gagctagcggcgagcgcggcgagcaacggagaggagcgcgagcagcagcatggcggggctccgacgcccgcagcccggctgctactgccgcaccgcggcggccgtgaacctcctgctgggcgtcttccaggtcctgctgccctgctgtcgcccgggaggggctcagggacaagcgattgagccgttgccgaacgtggtggagctgtggcaggcagaagaaggggaactcctgctgcccactcagggtgattctgaagagggtctggaggagccttctcaagaacagagcttctcggacaaactatttagtggaaaaggcttacattttcagccatcagttttagattttggaatacagttcctgggacatcctgtagcaaagattctccatgcttacaaccctagtagggacagcgaggttgtggtgaattcagtgtttgcagctgctggacatttccatgtaccgccagttccctgcagggtaattccagcaatggggaaaacttccttcagaattattttcttacctactgaagaaggaagcattgaaagttccttatttattaatacctcttcgtatggagtcctttcctatcatgtatctggaattggcactcgtagaatctctacagaagggtctgcaaagcagctaccaaatgcttattttctgcttccaaaggtccagagcattcagctgtctcaaatgcaggcagaaaccactaatactagcctcttgcaggtgcaactggaatgcagtttacataataaagtgtgtcagcaattaaagggttgttatctggaatctgatgatgttttgcgtctacaaatgagcataatggtaacaatggaaaacttttcaaaagaatttgaagaaaacacacaacatttgttagatcatctctctattgtttacgtagctacagatgaatctgagacctcagatgattcagcagtaaatatgtatatattacattcaggaaacagccttatatggatacaggatatacgccatttctcacagagagatgctctgtctctgcagtttgaaccagtactactacctacttctacaacaaactttacaaaaattgcttcttttacctgcaaagcagctacatcatgtgacagtggaattatagaagatgtgaagaaaacaacacacactccaacactaaaagcatgcctcttctcttctgtggctcaggggtattttagaatggactcttctgcaacccagtttcacatagagactcatgagaacacatcaggactttggtcaatatggtaccgcaaccattttgaccgtagtgttgtattaaatgatgtgtttctttccaaggagaccaagcacatgttaaagattctgaatttcactggccctttatttctacctccaggctgttggaatatattttctttgaaacttgctgttaaagacattgccataaatctattcaccaatgtatttttgactacaaacataggtgccatttttgcaatacctctacagatttattcagcaccaaccaaggaagggagtctgggttttgaagtgatagcacattgtggcatgcattatttcatgggaaaatcaaaagcaggaaatcctaattggaatgggagcctttctctggatcaatctacctggaatgtggattctgaacttgcaaataaattgtatgaaagatggaagaaatataaaaatggtgacgtctgcaagaggaatgttttgggaacaactcgatttgctcacttgaagaaatccaaggagtcagagtcctttgttttctttttgcctcgtttgatcgcagagcctggcctcatgttaaacttcagcgcaactgcccttaggagcaggatgatcaagtactttgtggtgcagaacccgtcctcttggccggtctccttgcagctcctgcctctctccttgtaccctaaacccgaagccctagtgcacctgctccacagatggtttggcactgatatgcagatgattaatttcacaactggtgaattccagctcaccgaagcttgcccttacctgggtacgcattctgaggaatccaggtttggcatcctccacttacatctgcagcctttggaaatgaaaagggttggcgtagttttcacacctgctgactatggaaaagttacctcactcatactaatccggaataacttgactgttattgacatgattggcgtggaaggatttggagcaagagagttattaaaagtgggtggaagacttcctggtgcaggaggctcactccgatttaaggtgcccgagtccacgctgatggactgccgtagacaactgaaagacagtaagcaaattttatctattacaaagaactttaaagttgagaatattggacctcttcctataactgtttcgtctctgaaaattaatgggtataactgccaaggttatggattcgaggtgctggattgtcatcagttttccctggacccaaacacatcccgcgatatcagcattgtgttcactccagactttacctcctcctgggtaattcgggacctaagtcttgtaaccgcagcggacctagaatttcgcttcactctcaatgtgactctccctcatcacctgttgcccttgtgtgcagacgtggttccaggacccagctgggaggagtcattttggaggctcacggtcttctttgtcagtttgtccctgttgggtgtgattttaatagccttccaacaagcacagtacattctcatggaattcatgaaaacaagacagaggcaaaatgctagctcctcttcacagcaaaacaatggtcctatggatgtaatcagcccccattcttacaaaagcaattgcaagaactttctcgatacatatggcccctctgataaaggcagggggaagaactgccttccagtgaacactccccaaagcaggatccagaatgctgcaaagaggagcccagccacctatggtcattctcagaagaagcacaaatgctcagtgtattacagtaaacacaaaaccagcacagctgcggccagcagcaccagcacgactactgaggaaaaacagacttcacccctgggcagctcactgcctgctgctaaagaggacatttgcactgatgccatgcgtgagaactggatcagcctcagatatgcaagtggcataaatgtcaacctgcagaagaatttaacccttcccaaaaacttactgaataaagaagaaaacacactgaaaaacacaattgttttcagtaatccttcttcagaatgtagtatgaaggagggaatacagacatgtatgtttcctaaggaaactgacattaaaacttcagagaacacagccgagttcaaggaacgggagctctgtccactgaagacctccaagaaactacctgaaaaccatttaccaagaaactcacctcagtaccaccagccagacttgccagaaatttccaggaaaaataatgggaataaccagcaagtacctgtcaagaatgaagtagatcattgtgaaaatttgaagaaggtggacacaaagccttcttcagaaaagaagattcacaaaacatctagagaagacatgttttctgagaaacaggacatacctttcgtagagcaagaagatccttataggaagaaaaagcttcaggagaaaagagaaggaaatttacaaaatttaaattggagtaaaagtcgaacatgtagaaagaacaagaaaaggggtgttgctccagtctcaaggcctcctgaacagagtgatctaaagcttgtgtgcagtgactttgagaggtctgagctgagcagtgacatcaatgtaagaagctggtgtatacaggaaagcactagggaggtttgtaaagcagatgccgaaattgcaagcagtttacctgctgcccagagagaggcagaaggttactaccagaagcctgagaagaaatgtgtggacaagttctgctccgattccagctctgactgtgggagctcctctggcagcgtgcgtgccagccggggcagctgggggagctggagcagcaccagcagctccgacggggataagaagcccatggtggacgcccagcacttcctgccggccggagacagtgtttcacaaaatgattttccttctgaagctcccatctccttgaatctttctcataacatctgcaatcccatgaccgtgaatagtctcccacaatacgcagagccttcctgtcccagccttcctgccgggcccacaggtgttgaagaagataaaggtctttactcacctggagacctgtggcccactccgccagtgtgtgtgacaagcagcttaaactgcaccctggagaacggcgtgccttgtgtgattcaggagtcggccccggttcataatagtttcattgattggagtgcaacatgcgaaggccagttttccagcgcatactgtccattggaattgaacgattacaatgcctttccagaagaaaacatgaactatgccaatggcttcccctgtcctgcagatgttcagacagactttattgatcacaactctcagtctacctggaacaccccacccaacatgcctgctgcctggggacatgccagtttcatcagctctccgccctacctcacaagcacccgaagcttgtctccaatgtctggactttttggttccatctgggccccgcaaagcgatgtgtatgaaaattgctgccccatcaaccccaccacggaacattcgacccacatggaaaaccaagcggtcgtgtgcaaggaatactacccggggttcaacccgtttcgcgcctatatgaacctggacatatggactaccacagcgaataggaatgcaaatttcccactgtctagagactcgagttactgtgggaatgtgtgaaaataattggatttttaaacaatgtgaataaagaggcttgtgttttgattactagtgtaaactggttattgagatagattatgacattggtggatattttggcacttttatatgaaaataaattttttaatgaaa

SEQ ID NO: 145881 - DNA, 538 bp, Homo sapiens
  Payload ID: 8925
  Gene Symbol: KIAA0922
  Gene Name: KIAA0922
  ENST ID: ENST00000445960
  CDS Start-End: 51-266
cgagctagcggcgagcgcggcgagcaacggagaggagcgcgagcagcagcatggcggggctccgacgcccgcagcccggctgctactgccgcaccgcggcggccgtgaacctcctgctgggcgtcttccaggtcctgctgccctgctgtcgcccgggaggggctcagggacaagcgattgagccgttgccgaacgtggtggagctgtggcaggcagaagaaggggaactcctgctgcccactcagcttctcggacaaactatttagtggaaaaggcttacattttcagccatcagttttagattttggaatacagttcctgggacatcctgtagcaaagattctccatgcttacaaccctagtagggacagcgaggttgtggtgaattcagtgtttgcagctgctggacatttccatgtaccgccagttccctgcagggtaattccagcaatggggaaaacttccttcagaattattttcttacctactgaagaaggaagcattgaaagttccttatttattaatacctcttcgtatg

SEQ ID NO: 145882 - DNA, 2723 bp, Homo sapiens
  Payload ID: 8926
  Gene Symbol: KIAA0930
  Gene Name: KIAA0930
  Uniprot ID: Q6ICG6
  ENST ID: ENST00000251993
  CDS Start-End: 146-1375
gctcccccccagccaagccttcccggcttccagcccagacaccagccagccagtggcgttcctggctcctcgggattttccttttcctccgaagctgctgattcatccccaggctggagtcaggctcagctgtggggctgggagcatgggctctcaggctgctgctgagtggaggaactgggcctcctgggaggtgtcctccagcctctctggatgctccatggggtgcttcaaggatgaccgcatcgtcttctggacttggatgttctccacctacttcatggagaaatgggctccccggcaggacgacatgcttttctatgtgcgccggaagctggcgtactccggcagcgaaagcggtgcagacgggaggaaggcagctgagcctgaggtggaggtggaggtgtaccggcgggactccaagaagctgccaggcctgggagaccctgacatcgactgggaggagagcgtctgcctgaatctcatcctgcagaagctggactacatggtgacctgtgcggtgtgcacacgtgctgacggcggggacattcacatccataagaagaaatctcagcaagtgttcgcgtcccccagtaaacaccccatggacagcaagggggaggagtccaagatcagctaccccaacatcttcttcatgattgacagcttcgaggaggtgttcagcgacatgaccgtaggggaaggagagatggtctgtgtggagctggtggctagtgacaaaaccaacacgttccagggggtcatctttcagggctccatccgctacgaggcgctcaagaaggtgtatgacaaccgggtgagcgtggccgcccgcatggcacagaagatgtcgtttggcttctacaagtacagcaacatggagtttgtgcgcatgaagggcccccagggcaagggccacgccgagatggcggtcagccgagtgtctacaggtgacacatccccctgtgggactgaagaggactccagcccagcttcgcccatgcacgagcgggtgacctccttcagcacaccccccaccccagaacggaacaaccggcctgccttcttctccccatccctcaagaggaaggtgccccggaaccggatcgctgagatgaagaagtcgcactcggccaacgacagcgaggagttcttccgggaggacgacggtggagccgatctgcacaatgcaaccaacctgcggtctcggtccctgtcgggcacaggacggtccctggtcgggtcctggctgaagctgaacagagcagatggaaacttccttctctatgcacacttaacctacgtcacgttgccgctgcatcggattttaacagacatcctggaagttcggcagaagcccatcctgatgacctagccgcgtgcggagcctgcgcagagccccggccgggcccagccctcggagtgctgccaagtgcctacctgtccaccgccaccggggtctgcgatggcacgccagtgctggagccgcagccaggcgaggccactcgactcccggggccggggccgactccacgaacaccagcccaaactgaagtgcctcttccctcccctgctggcgctgctccgccctgtgccccccgcccatcgccccccacccatctctggagagccctctgcacccaaagaggactagagatgccgagcggccatgagagagagcggaaggagcagctgatgcccagagcggggccagagcggcgggtctatgttcacgtccccccagcagcaggcggaaccacccagccagggcactcagtgcattggactgtccacatgttcttgaggaaagccggtggaagattctggaatgccgtgcggatgaacttcagcacccgagtcagtcccagctcatcctccccagtttaccactttgttctaataggagatgggaacacgagaagtttgatggctttgccctgggctgggaatacctcacccacgcccagttccagaaaggcctccagctgagcagacggccccgatcccgccagaacggccttttgcttccagccaaagaacaccgccaacacgcacacctccaacctgggacatcccacgctgggcctcgcacggaggaacctgcagaatttggattctgagggtagtcgggaggcctcggtagccaggcagaacaggatatctgccaaagggtgtctgatgtggggtggggctggcatcctcccaggaaggttctaggtgggaccccgtcttctgggggcgggggtgtcttttcatcttccctggtttcctagaactcacttcctttgacggcgtgtgttggtcccatctctcagaccagctcactgaggcagaggagttgctcagaggctcacatgggcacccccattggttcgtgtgagcagctgcccagccccaggcctgccctcggcctggtccagcatgaaggcgtttccatctgcaaggatgcacggtaccctccccgagagcaggcctgtcccctacccaactgggaataaactggaagctgggtctctttgttgctatgtttttttgtttgaagttcccaggaatatttgaggggttccggtgatgtgtttagggatcttctctgtgggggaaaaggaagaggagggtcttgttctcccatctgtttattctttgggctctgggaacaggggactactttggggctttctccagacttttgtatgttgttattaaaagcgagctattgcatttca

SEQ ID NO: 145883 - DNA, 8119 bp, Homo sapiens
  Payload ID: 8926
  Gene Symbol: KIAA0930
  Gene Name: KIAA0930
  Uniprot ID: Q6ICG6
  ENST ID: ENST00000336156
  CDS Start-End: 67-1281
ctccccgccgccgccgcccccgagcctgcgggcggcgccgaggccgaggagcgctcgctgcagcacatgctgcgtgccatagcggaggagcgcggccgtcttagcctgcgccgcgaggtctgcggcctcgggtgcttcaaggatgaccgcatcgtcttctggacttggatgttctccacctacttcatggagaaatgggctccccggcaggacgacatgcttttctatgtgcgccggaagctggcgtactccggcagcgaaagcggtgcagacgggaggaaggcagctgagcctgaggtggaggtggaggtgtaccggcgggactccaagaagctgccaggcctgggagaccctgacatcgactgggaggagagcgtctgcctgaatctcatcctgcagaagctggactacatggtgacctgtgcggtgtgcacacgtgctgacggcggggacattcacatccataagaagaaatctcagcaagtgttcgcgtcccccagtaaacaccccatggacagcaagggggaggagtccaagatcagctaccccaacatcttcttcatgattgacagcttcgaggaggtgttcagcgacatgaccgtaggggaaggagagatggtctgtgtggagctggtggctagtgacaaaaccaacacgttccagggggtcatctttcagggctccatccgctacgaggcgctcaagaaggtgtatgacaaccgggtgagcgtggccgcccgcatggcacagaagatgtcgtttggcttctacaagtacagcaacatggagtttgtgcgcatgaagggcccccagggcaagggccacgccgagatggcggtcagccgagtgtctacaggtgacacatccccctgtgggactgaagaggactccagcccagcttcgcccatgcacgagcgggtgacctccttcagcacaccccccaccccagaacggaacaaccggcctgccttcttctccccatccctcaagaggaaggtgccccggaaccggatcgctgagatgaagaagtcgcactcggccaacgacagcgaggagttcttccgggaggacgacggtggagccgatctgcacaatgcaaccaacctgcggtctcggtccctgtcgggcacaggacggtccctggtcgggtcctggctgaagctgaacagagcagatggaaacttccttctctatgcacacttaacctacgtcacgttgccgctgcatcggattttaacagacatcctggaagttcggcagaagcccatcctgatgacctagccgcgtgcggagcctgcgcagagccccggccgggcccagccctcggagtgctgccaagtgcctacctgtccaccgccaccggggtctgcgatggcacgccagtgctggagccgcagccaggcgaggccactcgactcccggggccggggccgactccacgaacaccagcccaaactgaagtgcctcttccctcccctgctggcgctgctccgccctgtgccccccgcccatcgccccccacccatctctggagagccctctgcacccaaagaggactagagatgccgagcggccatgagagagagcggaaggagcagctgatgcccagagcggggccagagcggcgggtctatgttcacgtccccccagcagcaggcggaaccacccagccagggcactcagtgcattggactgtccacatgttcttgaggaaagccggtggaagattctggaatgccgtgcggatgaacttcagcacccgagtcagtcccagctcatcctccccagtttaccactttgttctaataggagatgggaacacgagaagtttgatggctttgccctgggctgggaatacctcacccacgcccagttccagaaaggcctccagctgagcagacggccccgatcccgccagaacggccttttgcttccagccaaagaacaccgccaacacgcacacctccaacctgggacatcccacgctgggcctcgcacggaggaacctgcagaatttggattctgagggtagtcgggaggcctcggtagccaggcagaacaggatatctgccaaagggtgtctgatgtggggtggggctggcatcctcccaggaaggttctaggtgggaccccgtcttctgggggcgggggtgtcttttcatcttccctggtttcctagaactcacttcctttgacggcgtgtgttggtcccatctctcagaccagctcactgaggcagaggagttgctcagaggctcacatgggcacccccattggttcgtgtgagcagctgcccagccccaggcctgccctcggcctggtccagcatgaaggcgtttccatctgcaaggatgcacggtaccctccccgagagcaggcctgtcccctacccaactgggaataaactggaagctgggtctctttgttgctatgtttttttgtttgaagttcccaggaatatttgaggggttccggtgatgtgtttagggatcttctctgtgggggaaaaggaagaggagggtcttgttctcccatctgtttattctttgggctctgggaacaggggactactttggggctttctccagacttttgtatgttgttattaaaagcgagctattgcatttcattctgcctcagtttgcccacctgtgaaatggggctgataccacctacctcactgaagtcccagggttcaagtgtgtggctgggtcagggcgtggtcacccgtcattctgcataggtcgggttggatgttagactcctgggatgccctcctccccctcgccctttgtaataacctaatctgagaccgtgcttggtggggggatgtgaactttctctctcccccagcagtgtctgctcaggcctgacagctcagctctgcacgatttcatgttcctaaacccatgtcttagggcagcacagagccaggtcatgtcatgccccaaagtgtggggacagagcctcagggagccccgagcatggtccagccccatttgagtgctctccggggatgccaaatgctgcttccaagtttgagtccatgtggctaaaatacacccatttcttcaggaactcttcccctggttgttctggggatcttgggagaaacacagccctgacagctcgtccgtgggaagatgaggcagtccaggttgtgaggagcacagcggcccgccctctgttctcagaggtgaggggcgggagaaggttgtctcctctggggccagcatttggccaagctcggaggcttggccagcactgctggatggctcagagcaagctgggctccccgtctgtaagatggcaaaaatgctgcccccctcacagggtgaccatgaggaccagtcacagtgatgtgtgaaagggctcgctggtcacagaaacgtgtacaaatcatgctattttagagatcagccctcaatttgtaaggcatgtgaacagggcacgcggtgggctggtggtttcatagccgacacacagcgcctaccatgtgcagctgcctgtccgaccccatcttacagacgagaaaaccagcacacaggcaccaaggaactgtccggaactaacagcaggggccggcgatgggagtcaaacccaggcacgcggcctggcctgcatgctgagccacatggtgctgtccggacagatggacagacactcggtggagtctgcctttctcaggccctaaatccctctccaaagggtacttgcgatgccggatttaaaacttgctcagagccacttagccacttgagaaccagacagtaaggtgttactcccaggtttgtttttccaaagtaacagatgacatgtggaataaagtaatagagtaacaagtggcagggccagaaccagggtccccaaagtcctggtgttggcacatttgtacttcttgtaagaccatctttaatttttctgggaacacacctgccttttgtgtaatgcggggaagactaatgcatggtgacacctagttttcctcaacaggacacttgatcccaaaacccctttaagaccttaggtttcctcagcggaaaactgtactttaatcccaaaccccctttaagacatattggggctgggcgcagtggctcacgcctgtaatcccagcactttgggaggctgagatgggtggatcacctgagatcaggagttcaagaccagcctgactaacatgctgaaaccccatgtctactaaagatagaaaaattagctggacatggtggcaggcacctgtaatcccagctactcggaaggctgaggaaggagaatcacttgaacctagtaggcagaggttgcagtgagccgagatcacgccattgcattctagcctgggcaacgagagcgaaactctgtctcaaaaaaaaaaaaaaaaaaaaaaaaaaaaaaaaaaaaaaagatacattggtctttaaacccaaaccccctttaaggcatgttggtctcaaggggatttgggattgaagcacagctttctgttgaggaaacctaggtgtcactttttagaacattaaaaagaaagttgtagggtgggcttttccatttaaaggaatgtgatgatcctaggttctgatgagtgataggtggtctccgtttataccctttcttcttttggcacctgtaagttccggtagtggccatcttacattctcatgtcctgctggaagtgcctagttgcctgcaaagccagctaaggcttattatttcaaaagaagattatttaaaacatgagtgacaggtagtcagaagagaacaaaaggacgcaagatactctatagccaagtcagcttggaggcaggatgggttgctgagtgaagtcgccgctcacttttggattcttatggactgtgagttagtcttccctctacacggagtcacaggaagggtataaatgcatgttcctgaggtgccctcccccaaagaatgtacctgcactcaaaccaggatctgtttttgctgttttaatcataaatagactagttagtagaagacttttgaagaacaaagtaaaacttttttttttcattaaaagatgtcccagaggaaaggccctgtgcagccagtatattctaatgactgcctggaccatgtcctaatatggtggttttaagttgttggccaaaatcctttaaagacatacgaaacatctgccaactttttagcgaacttaacaggtttcactgacgttttcctcaatttttgaatttaggtgggatttgctttcatgtcctgtttcaaaaaccaagtgtctcttgacagcccactggttcttcctgtcctcttgctctagtctgtatcagaaagcagaatgactgtacttttgttttacaaacaaccacctgataggacggacactccacgagataaggaaaggcacgtgcccttgagcttgaatggaagcagcctctggagggggcagccactgcccttcgagggagagcagctcttcagcagtggccagagtgccacgtgactctgcagatgacccctgggagccgggtgatgggcacctgctggggcttttgttttttctttttcactggctggcttgatcctcagtggcaaaaggacccctgagccccttctccgagccctggagcactcctcgggacaccgagtggcctcagggctgggttcagagctcctcccgcagggggagcctcagaagtggaggcagctgctgatgggtgagtttacaacttcttatcctgcctaaggcgagtaggcgtttttattccgtttccagtccttgagctcagcagatcaaaataacagtgaccctgcaaccccacagagcccgcgacacgctcgctttcttccccgccctgcccctttagtccccgctctggaaggccaggcagtttaggtgtaaataggtatcttttatggtttccaaatgaattatttgtgtgagagtaattaaatctgtaagaaaacctgttgagattcttcactatgaattatgacttctacaacatgtattttagcaaaaacacgatgctggcctccactggatagctcagtatgctgattgccagtgatagttctgtacgcgttaccaacagcgtctttattaaccctcttccacatccagtggaaatcattgctaggcggtatttgttggttggctgttagctttgctttatgatttcatgtttcttttaaaggttgttttgcatgttgaatattaaattttttttttctgtgtcttcctctaatctttttctgtaatgggaatttcagggtaaatacagatattatagcaaagcaataatttaatgattgaaacttaatttgcccccagtgattcctgaaactttttttggagctttcacacaaactacttttttgaactagagtgtgttggaggcagagaaaaatcaccctgtgtgctggctttgcctgccgtgagccagtgaggagtccgagaagaggtgggcaggtcagtgatgggtttggccagagatgccatatttgcagtattaaatcatttcaagatgcatttcaaggcctggcacggctcacgcctgtaatcccagtgctttgggaggccgaggcgggcagatcacttgaggtcaggagttcgagaccagcctggccaacatatggtgaaacccccatctctactaaaaatacaaaaattaaccgggcgtggtgatgtgcacctgtagtctcagctacttgggaggctgaggcaggagaatcgcttcaacccaggaggcagaggttgcagtgagccaagctcatactactgcgctccagcctgggtgacagagactccatctcaaaaaaaaaaaaaaaaaaaaaaaaaaatgcatttcaagttaagcttttagcctccacaaagtagtgcacaccctttcagttgtactataaaatttcccaggctttttcagagaacctcttaaccctcacagaaatggaaaaaatggaatagaggccaggagccccaagttcaggttttgcaggctccaggtaagctggctgatctaacggaagatgaggtgtttgcagcaggcgtctgtcttgcagctcagcaggtgaggggacctcgagcaggctctcgcattttccggctgatccttccgagtctgctactgcagggccctcgtaggtgggagcagcctcatcgtcgcctttcacactgtgagcttttcctttccacggtcagatggacttagtgagttaccagcgatggatgttaagacctaagacaccgcagaaagttacagagtggaaaatgaggggcagagaaaagagggtctgagaggaacgcaagcattccggaatacagtaagggacatcccatcaatgacacttcttgggaacagccactgccttagaaacaccagaccaagagaattttctgaccacaaccccaaaggcagcccatgaagatggaggttaggaaggaggcggtctagcaggtgaagacttccttgccatccaggtcaacccccttcttgttgaacagtgggaagtccttttaaagcagtcacctgaaaaatgtttaatagaaatttggggagagtctctatcttggaagctgcctgcgggaacctcattcctattcattgcctcctcttggaaggctaatctgctatttcggttcctttagccttagatgagcttttaggaagtactgtcatgccctagcttagaaggaaaaaaggtaactggaaaggaaaacctttgggaatcttacactgggaggagaggggaatgtaactcaatccatataataacacagttcattgtaaatagacatgttgactgtggtaacatgctgtactttgtgcctgattgttaaaatgctaagaacagctggaaaatttacatgaggaagagaaaatacttgtttctggggataaagaaaggatcatgttgtcttttctttccttacagtgtcactgaattgcccctgacttagcctctccatcagccaacaggttagagagttctttcctctgtgtggactggggtctttcctcttggaatctgattttaatgaaacaattaggttgctcattttgaaataaccatggcttttagccaaattttatgctactctgaataaacaattttgcttaaaagattttagccacttccagaa

SEQ ID NO: 145884 - DNA, 2623 bp, Homo sapiens
  Payload ID: 8926
  Gene Symbol: KIAA0930
  Gene Name: KIAA0930
  Uniprot ID: Q6ICG6
  ENST ID: ENST00000391627
  CDS Start-End: 163-1275
catggaggcgggaggaggtggaatgatgactgggcagtggctgggtggcctcaagcccaggcagtggaggaaagggcggggaagctggcagtgctggctcttggctgagatggggcacctttgcggtgcttcaaggatgaccgcatcgtcttctggacttggatgttctccacctacttcatggagaaatgggctccccggcaggacgacatgcttttctatgtgcgccggaagctggcgtactccggcagcgaaagcggtgcagacgggaggaaggcagctgagcctgaggtggaggtggaggtgtaccggcgggactccaagaagctgccaggcctgggagaccctgacatcgactgggaggagagcgtctgcctgaatctcatcctgcagaagctggactacatggtgacctgtgcggtgtgcacacgtgctgacggcggggacattcacatccataagaagaaatctcagcaagtgttcgcgtcccccagtaaacaccccatggacagcaagggggaggagtccaagatcagctaccccaacatcttcttcatgattgacagcttcgaggaggtgttcagcgacatgaccgtaggggaaggagagatggtctgtgtggagctggtggctagtgacaaaaccaacacgttccagggggtcatctttcagggctccatccgctacgaggcgctcaagaaggtgtatgacaaccgggtgagcgtggccgcccgcatggcacagaagatgtcgtttggcttctacaagtacagcaacatggagtttgtgcgcatgaagggcccccagggcaagggccacgccgagatggcggtcagccgagtgtctacaggtgacacatccccctgtgggactgaagaggactccagcccagcttcgcccatgcacgagcgggtgacctccttcagcacaccccccaccccagaacggaacaaccggcctgccttcttctccccatccctcaagaggaaggtgccccggaaccggatcgctgagatgaagaagtcgcactcggccaacgacagcgaggagttcttccgggaggacgacggtggagccgatctgcacaatgcaaccaacctgcggtctcggtccctgtcgggcacaggacggtccctggtcgggtcctggctgaagctgaacagagcagatggaaacttccttctctatgcacacttaacctacgtcacgttgccgctgcatcggattttaacagacatcctggaagttcggcagaagcccatcctgatgacctagccgcgtgcggagcctgcgcagagccccggccgggcccagccctcggagtgctgccaagtgcctacctgtccaccgccaccggggtctgcgatggcacgccagtgctggagccgcagccaggcgaggccactcgactcccggggccggggccgactccacgaacaccagcccaaactgaagtgcctcttccctcccctgctggcgctgctccgccctgtgccccccgcccatcgccccccacccatctctggagagccctctgcacccaaagaggactagagatgccgagcggccatgagagagagcggaaggagcagctgatgcccagagcggggccagagcggcgggtctatgttcacgtccccccagcagcaggcggaaccacccagccagggcactcagtgcattggactgtccacatgttcttgaggaaagccggtggaagattctggaatgccgtgcggatgaacttcagcacccgagtcagtcccagctcatcctccccagtttaccactttgttctaataggagatgggaacacgagaagtttgatggctttgccctgggctgggaatacctcacccacgcccagttccagaaaggcctccagctgagcagacggccccgatcccgccagaacggccttttgcttccagccaaagaacaccgccaacacgcacacctccaacctgggacatcccacgctgggcctcgcacggaggaacctgcagaatttggattctgagggtagtcgggaggcctcggtagccaggcagaacaggatatctgccaaagggtgtctgatgtggggtggggctggcatcctcccaggaaggttctaggtgggaccccgtcttctgggggcgggggtgtcttttcatcttccctggtttcctagaactcacttcctttgacggcgtgtgttggtcccatctctcagaccagctcactgaggcagaggagttgctcagaggctcacatgggcacccccattggttcgtgtgagcagctgcccagccccaggcctgccctcggcctggtccagcatgaaggcgtttccatctgcaaggatgcacggtaccctccccgagagcaggcctgtcccctacccaactgggaataaactggaagctgggtctctttgttgctatgtttttttgtttgaagttcccaggaatatttgaggggttccggtgatgtgtttagggatcttctctgtgggggaaaaggaagaggagggtcttgttctcccatctgtttattctttgggctctgggaacaggggactactttggggctttctccagacttttgtatgttgttattaaaagcgagctattgcatttca

SEQ ID NO: 145885 - DNA, 625 bp, Homo sapiens
  Payload ID: 8926
  Gene Symbol: KIAA0930
  Gene Name: KIAA0930
  ENST ID: ENST00000424508
  CDS Start-End: 170-625
tttcgttcccccgggtcctgtgagcctgggaggtcttgccagtcccgtgggctctcctggccctcacccctggaggctgacaaggctcgctgacccagaccctcaccgatgaagcctccttctcttttcctccctctcactgccctagagcccaggagccaggcagggcatgggagtggggtgcttcaaggatgaccgcatcgtcttctggacttggatgttctccacctacttcatggagaaatgggctccccggcaggacgacatgcttttctatgtgcgccggaagctggcgtactccggcagcgaaagcggtgcagacgggaggaaggcagctgagcctgaggtggaggtggaggtgtaccggcgggactccaagaagctgccaggcctgggagaccctgacatcgactgggaggagagcgtctgcctgaatctcatcctgcagaagctggactacatggtgacctgtgcggtgtgcacacgtgctgacggcggggacattcacatccataagaagaaatctcagcaagtgttcgcgtcccccagtaaacaccccatggacagcaagggggaggagtccaagatcagctaccccaacatcttcttcatgattgacagcttc

SEQ ID NO: 145886 - DNA, 516 bp, Homo sapiens
  Payload ID: 8926
  Gene Symbol: KIAA0930
  Gene Name: KIAA0930
  ENST ID: ENST00000417906
  CDS Start-End: 40-294
gcgggcggcgccgaggccgaggagcgctcgctgcagcacatgctgcgtgccatagcggaggagcgcggccgtcttagcctgcgccgcgaggtctgcggcctcggacctcatgcagcgcctggggcagagcaggcccacagaactggatacgaagcccaaccccacgagcttgccaggtgcccggacttgaaggtctcggtttccttaactgtaaaatggctgttaggtggtcacacatgtggcctggggattgtgaaagcacttcgaggatttcacagcgttgtgcaagtctaagacaggcccatgaataaagttctgcctgccagcagctgaggggtgcttcaaggatgaccgcatcgtcttctggacttggatgttctccacctacttcatggagaaatgggctccccggcaggacgacatgcttttctatgtgcgccggaagctggcgtactccggcagcgaaagcggtgcagacgggaggaaggcagctgagcctgaggtggaggtggaggt

SEQ ID NO: 145887 - DNA, 2218 bp, Homo sapiens
  Payload ID: 8926
  Gene Symbol: KIAA0930
  Gene Name: KIAA0930
  ENST ID: ENST00000423262
  CDS Start-End: 1-870
ggagaccctgacatcgactgggaggagagcgtctgcctgaatctcatcctgcagaagaagaaatctcagcaagtgttcgcgtcccccagtaaacaccccatggacagcaagggggaggagtccaagatcagctaccccaacatcttcttcatgattgacagcttcgaggaggtgttcagcgacatgaccgtaggggaaggagagatggtctgtgtggagctggtggctagtgacaaaaccaacacgttccagggggtcatctttcagggctccatccgctacgaggcgctcaagaaggtgtatgacaaccgggtgagcgtggccgcccgcatggcacagaagatgtcgtttggcttctacaagtacagcaacatggagtttgtgcgcatgaagggcccccagggcaagggccacgccgagatggcggtcagccgagtgtctacaggtgacacatccccctgtgggactgaagaggactccagcccagcttcgcccatgcacgagcgggtgacctccttcagcacaccccccaccccagaacggaacaaccggcctgccttcttctccccatccctcaagaggaaggtgccccggaaccggatcgctgagatgaagaagtcgcactcggccaacgacagcgaggagttcttccgggaggacgacggtggagccgatctgcacaatgcaaccaacctgcggtctcggtccctgtcgggcacaggacggtccctggtcgggtcctggctgaagctgaacagagcagatggaaacttccttctctatgcacacttaacctacgtcacgttgccgctgcatcggattttaacagacatcctggaagttcggcagaagcccatcctgatgacctagccgcgtgcggagcctgcgcagagccccggccgggcccagccctcggagtgctgccaagtgcctacctgtccaccgccaccggggtctgcgatggcacgccagtgctggagccgcagccaggcgaggccactcgactcccggggccggggccgactccacgaacaccagcccaaactgaagtgcctcttccctcccctgctggcgctgctccgccctgtgccccccgcccatcgccccccacccatctctggagagccctctgcacccaaagaggactagagatgccgagcggccatgagagagagcggaaggagcagctgatgcccagagcggggccagagcggcgggtctatgttcacgtccccccagcagcaggcggaaccacccagccagggcactcagtgcattggactgtccacatgttcttgaggaaagccggtggaagattctggaatgccgtgcggatgaacttcagcacccgagtcagtcccagctcatcctccccagtttaccactttgttctaataggagatgggaacacgagaagtttgatggctttgccctgggctgggaatacctcacccacgcccagttccagaaaggcctccagctgagcagacggccccgatcccgccagaacggccttttgcttccagccaaagaacaccgccaacacgcacacctccaacctgggacatcccacgctgggcctcgcacggaggaacctgcagaatttggattctgagggtagtcgggaggcctcggtagccaggcagaacaggatatctgccaaagggtgtctgatgtggggtggggctggcatcctcccaggaaggttctaggtgggaccccgtcttctgggggcgggggtgtcttttcatcttccctggtttcctagaactcacttcctttgacggcgtgtgttggtcccatctctcagaccagctcactgaggcagaggagttgctcagaggctcacatgggcacccccattggttcgtgtgagcagctgcccagccccaggcctgccctcggcctggtccagcatgaaggcgtttccatctgcaaggatgcacggtaccctccccgagagcaggcctgtcccctacccaactgggaataaactggaagctgggtctctttgttgctatgtttttttgtttgaagttcccaggaatatttgaggggttccggtgatgtgtttagggatcttctctgtgggggaaaaggaagaggagggtcttgttctcccatctgtttattctttgggctctgggaacaggggactactttggggctttctccagacttttgtatgttgttattaaaagcgagctattgcatttca

SEQ ID NO: 145888 - DNA, 821 bp, Homo sapiens
  Payload ID: 8926
  Gene Symbol: KIAA0930
  Gene Name: KIAA0930
  ENST ID: ENST00000440039
  CDS Start-End: 1-213
ttctggacttggatgttctccacctacttcatggagaaatgggctccccggcaggacgacatgcttttctatgtgcgccggaagctggcgtactccggcagcgaaagcggtgcagacgggaggaagatcccagctctgcctttggggggtgcaggcctgtgcacctgcaagagggcccagcagtgcccagcccctcggagcccgagtcagtgagagcacccaggaccgggaccagaggcccccagtcagcacagctgcttcaaaattgaaagccaggctgggcgcggtggctcacgcctgtaatccctgcactttgggaggccgaggcagctgagcctgaggtggaggtggaggtgtaccggcgggactccaagaagctgccaggcctgggagaccctgacatcgactgggaggagagcgtctgcctgaatctcatcctgcagaagctggactacatggtgacctgtgcggtgtgcacacgtgctgacggcggggacattcacatccataagaagaaatctcagcaagtgttcgcgtcccccagtaaacaccccatggacagcaagggggaggagtccaagatcagctaccccaacatcttcttcatgattgacagcttcgaggaggtgttcagcgacatgaccgtaggggaaggagagatggtctgtgtggagctggtggctagtgacaaaaccaacacgttccagggggtcatctttcagggctccatccgctacgaggcgctcaagaaggtgtatgacaaccgggtgagcgtggccgcccgcatggcacagaagatgtcgtttggcttctacaagtac

SEQ ID NO: 145889 - DNA, 556 bp, Homo sapiens
  Payload ID: 8926
  Gene Symbol: KIAA0930
  Gene Name: KIAA0930
  ENST ID: ENST00000414854
  CDS Start-End: 147-556
agtgcagaggatgctgcgtgcctgccgcgagccggtgcctaacacctgccgcgtttccttcagtcctgctcccggagaggtgggttctgtcttgacctcattctgcagggtgcttcaaggatgaccgcatcgtcttctggacttggatgttctccacctacttcatggagaaatgggctccccggcaggacgacatgcttttctatgtgcgccggaagctggcgtactccggcagcgaaagcggtgcagacgggaggaaggcagctgagcctgaggtggaggtggaggtgtaccggcgggactccaagaagctgccaggcctgggagaccctgacatcgactgggaggagagcgtctgcctgaatctcatcctgcagaagctggactacatggtgacctgtgcggtgtgcacacgtgctgacggcggggacattcacatccataagaagaaatctcagcaagtgttcgcgtcccccagtaaacaccccatggacagcaagggggaggagtccaagatcagctaccccaacatcttcttcatgattgacagcttcga

SEQ ID NO: 145890 - DNA, 403 bp, Homo sapiens
  Payload ID: 8926
  Gene Symbol: KIAA0930
  Gene Name: KIAA0930
  ENST ID: ENST00000492273
  CDS Start-End: 75-332
gggattttccttttcctccgaagctgctgattcatccccaggctggagtcaggctcagctgtggggctgggagcatgggctctcaggctgctgctgagtggaggaactgggcctcctgggaggtgtcctccagcctctctggatgctccatggggtgcttcaaggatgaccgcatcgtcttctggacttggatgttctccacctacttcatggagaaatgggctccccggcaggacgacatgcttttctatgtgcgccggaagctggcgtactccggcagcgaaagcggtgcagacgggaggaagatgaggaaacggagggctcggagatgaagtgattcgcctaacgtatttcatccactaaatcgcagtgtgggaggagctaataaaatacattttgcatg

SEQ ID NO: 145891 - DNA, 589 bp, Homo sapiens
  Payload ID: 8926
  Gene Symbol: KIAA0930
  Gene Name: KIAA0930
  ENST ID: ENST00000496226
  CDS Start-End: 248-517
agccagccagtggcgttcctggctcctcgggattttccttttcctccgaagctgctgattcatccccaggctggagtcaggctcagctgtggggctgggagcatgggctctcaggctgctgctgagtggaggaactgggcctcctgggaggtgtcctccagcctctctggatgctccatgggtgggggtcgggagtggtgagggaagggtggcgcatctcagagccctcgcaaatttctggccagaaatgtgggggtatgggcgcagcttggccaaggccatgctgcaagggccagggtggccgtccttcctcactcctgtctggcctccctctgcagggtgcttcaaggatgaccgcatcgtcttctggacttggatgttctccacctacttcatggagaaatgggctccccggcaggacgacatgcttttctatgtgcgccggaagctggcgtactccggcagcgaaagcggtgcagacgggaggaagatgaggaaacggagggctcggagatgaagtgattcgcctaacgtatttcatccactaaatcgcagtgtgggaggagctaataaaatacattttgcatgc

SEQ ID NO: 145892 - DNA, 6732 bp, Homo sapiens
  Payload ID: 8927
  Gene Symbol: KIAA1024
  Gene Name: KIAA1024
  Uniprot ID: Q9UPX6
  ENST ID: ENST00000305428
  CDS Start-End: 76-2826
gccctgcgcccggggcgcctcggagaactgacctgaagtttcagtgtagtcagagagctcttcaagtaataaatcatggagaccagtcaggaaacttccctcttcttggtgaagatcttggaggaactggacagcaagcaaaataccgtttcttatcaggacctgtgcaaatctctctgtgcccggttcgacctgtcgcagcttgccaaactgagaagtgtgctcttctacacagcttgtctcgatcccaattttccagccacgctattcaaagacaagatgaaatgcactgtgaataaccagcaatcaaagaaaatcatggtggcagcagatattgtgacgatattcaacctgatccaaatgaatggcggggctgccaaggagaagctgcccacgggccgccagaaggtacgcaagaaggaggcatcctttgaatcatgtaggtcggacacagagatctgcaatgcagctgagtgtgagcccctgaactgtgagctgagtgagaggtctttcagccggggctaccccatcaggcagtcgtccaagtgccggaagatggactgcaaggactgcccacagtttgtccctgcctctgagcctaacttcctgttgggagttagcaaagaggtgaaaaaccgcgccgcttccctggacaggttgcaggccctggctccgtactctgtgaccagccctcagccctgtgagatgcagaggacctacttccccatgaacatcgaaaacgagtccatttcagaccaggactccctgcccatcaatcagagcatcaaggagaccttcatttccaatgaggagccatttgtggtccagtcctgtgtccagaaaaggaatatcttcaaagaggattttcacaatttgatggcagtgtcccccagtttggttggccccatcagcaaagcagagaatgagcacagggaaccccagagtcgaaaggaaccccacaagccacccttcttcaaccacagctttgaaatgccctataacagccagtacctgaatccagtgtattccccggttcctgacaaaaggcgagcaaagcacgaaagcttagatgaccttcaagcctctacatattttgggcccactcccgtgatgggaacccaagaagccaggcgctgtctagggaagcccaacaagcagactccctggccagccaaaagctggagcctaaacacagaggaagttcctgactttgaacggtcctttttcaatagaaatccctccgaggagaagctacactatccaaatgccagtagccagacccccaatttcccagccccagaaaggcgcccaacttaccttgtgccaaaggatcaacagccaattctccccattgcttatgcggcaaaacaaaatgggctcaaatctaaagagatctcatcccctgttgacctggagaagcatgaaccagtcaaaaagtttaaagacaagagcattaactgcaccagtgggcagctcagctcagacaccagtagcgtgggcacccagactgagcacgtgctggagcccaagaaatgcagagacctgtgcacctctggtcagggcaagtacagtgacaggcacaccatgaagcactcagacgatgactcagaaattgtcagcgacgacatcagtgacattttccgatttcttgatgacatgagcatcagtggctccacgggagtgatacagtcgtcctgctacaacagcacaggatccttgtctcagctccataagtcagactgcgacagttcccctgagcacaacttaaccaaaattgccaatggggtccccaacagcaagggagacaagggcaaccggcctgaaaacacccaccactcggaagaagagctgaagaccagtgtgtgcaaactggtgctcaggattggcgaaattgaacggaagctggaatccctgtcgggtgtccgtgatgaaatctcccaggtcttgggcaaactaaataaattggaccagaaaatgcaacagcctgagaaggtgagtgtgcagatagatctgaactccttgacaagcgagggtccgtctgatgacagtgcctctccccggatgttccacgcacacagtggctcccacggacccaaactagagaacaaccctgactggtgctgctctgatgctagcgggagcaacagtgaaagcctgcgggtcaaggccttaaaaaaaagcctcttcaccaggccatcctctaggtccctaacagaggagaacagtgccacagagtccaaaattgccagcatctccaactcgcccagagactggcgcaccatcacttataccaaccgtgtgggcctcaatgaggaggagataaaagacacaggcccaggagataataaagactggcatcggaaatctaaagaggcagacaggcagtacgacattcccccacagcaccgactgcccaagcagcccaaagatggcttcctggtggagcaggtgttcagccctcacccctaccctgcctccctcaaggcccacatgaagagcaaccccctgtacacagacatgcggctgaccgagttggccgaggtgaagcggggccaaccttcttggaccattgaggagtatgcacggaatgcgggcgacaagggcaagctgacagccctggacctgcagacgcaagaatctttaaacccaaataatttagagtactggatggaagacatttatactccaggatacgattcattactaaaacgtaaagaagccgaattcagacgagccaaggtctgcaagatagctgctctgatcgctgctgcggcatgcaccgtcatcctcgttattgtcgtgcccatctgcacaatgaaatcatgagctaagaatgcaaccttacgtacagcttatgactaccaatgtcgtcgtctgtatcttagaatcttgcagcagtgaggcaacaatttgttgaaatggagatgaaatcatggaggcatttctacaaatgttgaatgaaggtggttttcagaaagtatacattctagtgagaaatctacctacctattagctttgactcaattacactctgacgcatttttagaagtgcaatatcttttcctaccaaaagaacatcatggactatcaataaatacaaattgaatattccaagccaaaaaaggaagattaattgggttctttccattttgatgatgtttcatggtggggaataagttatacagaagatatttaatacacgcctctttagaagaaactaagggaaatagcaacataagaagaaaagaggtggcttctcttttccataatgttcttagaccattgctggtgaagtaacagggtgtgtgtccctaaagggtattacttctctgtcgacttttatcaagggctactgacgtttcattcttgcccttttgtcatcaacacgacagagtgtctgcatcactgcagatcttcatggaaacattctggaccttcttccttgcacttggagtgagaaggagctggactaccaagtcaggcgtggaatgaagtatgctcagactgcatgatgggccaaggtattcaggccaggagacctcgtcctcaatccaaagtgtaggggagctgcctgctaacgatgtaaggtcagtatttgaaaatcatggccactccaaaggatctcctgttcttgctttggtgtgtggctccattccttgattttctatctcctggtggtaccagatgctctgcctctcatacatgagttgaagagtttggaacttgtccttgtgccttgaagagtagagacaatggctaaacgttgacattctatctgtaaaccatggttttcacgcaccactaatatctgccattttcaatggctttaaaaagattttgaaagcttgctcaataatgttcaataatataataataataaaggcactgaggtcttctcagttaccccaacacctactccagagttttgaatacttgtcagcagtgcaaaaaatattatctgtttaaccacttatctatatgtctatctatctatctatatgtctatctatctatctaaatacttgatttttatttattgtcttctctgttaaataacttgagagcaaggtttctttcgtgtaaaagaagctgttgtaatttcatccaaatttgatctgtttccacctgctgaatggtgctctgacaataatggaacagaaagaatccttatcagcatctgattccaatgtcttgttacaggtcaaagaaaaaaggattgacagaaactagctaccttatatatattttttgataataaggtgggatataaatagattttggtagcaagtgtaatcactccgtatgatataataaatttctaaaagatttgagagcatctcaatttttaaagcaataggagtctagcatccattctgaaaaatcgcaaataatgcttagcttgctgtgtctgattctgttgttcaccattaaggggtagacagttaattttattatgttaacaagtgagggatgaatgttttcatctgtggtgaacctttatttttagaagtcttcatgttatctatttgtattatcatgtttatgtatggattttcaatttcagtaaccgaaaacttaagccttagtatgaaaaactgaggatttataattgaaaatgaaaaaaatatgttactctctatcatcagaattatagtctttggtgctctgttttcaatggggcatattacataaggttgtttctttcaccccaaagagactactaggttaccactctgggcattgcctttccacctaacccctcaaccagtaagactctacaccatattgtagccccactattctcctctttatcacagatgaagtgccagagcatcagagataggtagctcccaacctcttgctctggatttgcagaagagggggagatgtacttacccaggataagaaaaatctagtcaaatccaccccaaatcttccatttaacaggtaggaccatcgaggctggaccaaaccactttttccactgcccttggtgaatctattcctagtggaccccatttgggcatgtgcctagctaccttgggaaggcatgactataagtcacacctcaggcttggaaatgaaaggattctatagaatattctatactttccatagctggagaggtagtcagaaattcagtcttgctctgagtccacagtagctttaaaattcaactcaacattgttgtcacgtaacggaaacatctagacctggtaataatccaggaaattgcaaaatggaggccaaaagtaaggtgggtttctctggaaaggggtcatcctcagtctgataataccaagtctgacgctgaggttatgaatcattaccatggcttggagctattggatgcttggggtcttgggatagatagaaggtgaggttcacagttggagcttttcttgccattgaccccaagctcaccccagccttccttccctgaccctgagactcaccctatctatctcccctattccctcagtttgcagaatgagcaagatagagtctggctaggagggaaacatctatccatctctctaatctttgcccatcacctcctgttgcaatgagttcccgcaggtgacatacggactggcctctctactgtactgggtgccatctcccaccatactctggcatttttatgtaaaggataatttcttgtacctgagtctaaaattacaacgttatcaaaattcacttcgtttttcctgcattttaaaagtaataaaatattatttgagattattttgaaattaaatatccttaaccaatgattaaattcataatcatttcatcttctttcataatcatttcatcttctaatctgaatttgttttgaacacagccttgcagaaaagcaaaaaatatttccccgctcaaattttgccgacattttataccagtatccccttcattacagtaaactaaatcataacttacatcatccattactagctgatcataaattgttagtattttaaggtatgcaactatgtgattgacatctgtaaggctagtttaatagacgtgctaaatatcactgttctgaatatctgtgccatagttctgatacccttattggaatcaaggcagtgctgtttctgtttacaagttatcaagataagagcagtggcatcacatttgttgttgttgtttttttttttgaaatagaaaaaaacagaagaagctctgccaacaataaaagattttgttaagtggtataaaaatttgtgaatgttgaaattcaacatgcttcatattataaccaacctgcaagaatattgtggtcaattgtgtgaataccaaatcagtatatactgtatactgtactatgaaaatttgtatttaaaggcaaagatacaagtaattgttggtataattggggaaaagggtattcaatatttattaagtaacaatgagaaatgcaacaaacttccttatttatgccttatgaataaaagagtgtggaatgtaaggtgaaattttatgtgcaagatcctgaaggaatgggtattcttgaaggcagggactgtcttttctatgtttgttctgtacagctctcagcacactcttggtgcttgataaatgttatgttatataataccaataactaagcacatttttagatcttttttcaaatggcttgtgtaaaatttggttaatgtacaatggttggtttgaagctatcatgtaaaattggcctctccaaatataatcagaaataaaccg

SEQ ID NO: 145893 - DNA, 5629 bp, Homo sapiens
  Payload ID: 8927
  Gene Symbol: KIAA1024
  Gene Name: KIAA1024
  ENST ID: ENST00000559272
  CDS Start-End: 53-2617
agaactgacctgaagtttcagtgtagtcagagagctcttcaagtaataaatcatggagaccagtcaggaaacttccctcttcttggtgaagatcttggaggaactggacagcaagcaaaataccgtttcttatcaggacctgtgcaaatctctctgtgcccggttcgacctgtcgcagcttgccaaactgagaagtgtgctcttctacacagcttgtctcgatcccaattttccagccacgctattcaaagacaagatgaaatgcactgtgaataaccagcaatcaaagaaaatcatggtggcagcagatattgtgacgatattcaacctgatccaaatgaatggcggggctgccaaggagaagctgcccacgggccgccagaaggtacgcaagaaggaggcatcctttgaatcatgtaggtcggacacagagatctgcaatgcagctgagtgtgagcccctgaactgtgagctgagtgagaggtctttcagccggggctaccccatcaggcagtcgtccaagtgccggaagatggactgcaaggactgcccacagtttgtccctgcctctgagcctaacttcctgttgggagttagcaaagaggtgaaaaaccgcgccgcttccctggacaggttgcaggccctggctccgtactctgtgaccagccctcagccctgtgagatgcagaggacctacttccccatgaacatcgaaaacgagtccatttcagaccaggactccctgcccatcaatcagagcatcaaggagaccttcatttccaatgaggagccatttgtggtccagtcctgtgtccagaaaaggaatatcttcaaagaggattttcacaatttgatggcagtgtcccccagtttggttggccccatcagcaaagcagagaatgagcacagggaaccccagagtcgaaaggaaccccacaagccacccttcttcaaccacagctttgaaatgccctataacagccagtacctgaatccagtgtattccccggttcctgacaaaaggcgagcaaagcacgaaagcttagatgaccttcaagcctctacatattttgggcccactcccgtgatgggaacccaagaagccaggcgctgtctagggaagcccaacaagcagactccctggccagccaaaagctggagcctaaacacagaggaagttcctgactttgaacggtcctttttcaatagaaatccctccgaggagaagctacactatccaaatgccagtagccagacccccaatttcccagccccagaaaggcgcccaacttaccttgtgccaaaggatcaacagccaattctccccattgcttatgcggcaaaacaaaatgggctcaaatctaaagagatctcatcccctgttgacctggagaagcatgaaccagtcaaaaagtttaaagacaagagcattaactgcaccagtgggcagctcagctcagacaccagtagcgtgggcacccagactgagcacgtgctggagcccaagaaatgcagagacctgtgcacctctggtcagggcaagtacagtgacaggcacaccatgaagcactcagacgatgactcagaaattgtcagcgacgacatcagtgacattttccgatttcttgatgacatgagcatcagtggctccacgggagtgatacagtcgtcctgctacaacagcacaggatccttgtctcagctccataagtcagactgcgacagttcccctgagcacaacttaaccaaaattgccaatggggtccccaacagcaagggagacaagggcaaccggcctgaaaacacccaccactcggaagaagagctgaagaccagtgtgtgcaaactggtgctcaggattggcgaaattgaacggaagctggaatccctgtcgggtgtccgtgatgaaatctcccaggtcttgggcaaactaaataaattggaccagaaaatgcaacagcctgagaaggtgagtgtgcagatagatctgaactccttgacaagcgagggtccgtctgatgacagtgcctctccccggatgttccacgcacacagtggctcccacggacccaaactagagaacaaccctgactggtgctgctctgatgctagcgggagcaacagtgaaagcctgcgggtcaaggccttaaaaaaaagcctcttcaccaggccatcctctaggtccctaacagaggagaacagtgccacagagtccaaaattgccagcatctccaactcgcccagagactggcgcaccatcacttataccaaccgtgtgggcctcaatgaggaggagataaaagacacaggcccaggagataataaagactggcatcggaaatctaaagaggcagacaggcagtacgacattcccccacagcaccgactgcccaagcagcccaaagatggcttcctggtggagcaggtgttcagccctcacccctaccctgcctccctcaaggcccacatgaagagcaaccccctgtacacagacatgcggctgaccgagttggccgaggtgaagcggggccaaccttcttggaccattgaggagtatgcacggaatgcgggcgacaagggcaagctgacagccctggacctgcagcacgtgggataagcatatttgtgggagccaagctatggattatgtttccatacggagcagccccagacgcaagaatctttaaacccaaataatttagagtactggatggaagacatttatactccaggatacgattcattactaaaacgtaaagaagccgaattcagacgagccaaggtctgcaagatagctgctctgatcgctgctgcggcatgcaccgtcatcctcgttattgtcgtgcccatctgcacaatgaaatcatgagctaagaatgcaaccttacgtacagcttatgactaccaatgtcgtcgtctgtatcttagaatcttgcagcagtgaggcaacaatttgttgaaatggagatgaaatcatggaggcatttctacaaatgttgaatgaaggtggttttcagaaagtatacattctagtgagaaatctacctacctattagctttgactcaattacactctgacgcatttttagaagtgcaatatcttttcctaccaaaagaacatcatggactatcaataaatacaaattgaatattccaagccaaaaaaggaagattaattgggttctttccattttgatgatgtttcatggtggggaataagttatacagaagatatttaatacacgcctctttagaagaaactaagggaaatagcaacataagaagaaaagaggtggcttctcttttccataatgttcttagaccattgctggtgaagtaacagggtgtgtgtccctaaagggtattacttctctgtcgacttttatcaagggctactgacgtttcattcttgcccttttgtcatcaacacgacagagtgtctgcatcactgcagatcttcatggaaacattctggaccttcttccttgcacttggagtgagaaggagctggactaccaagtcaggcgtggaatgaagtatgctcagactgcatgatgggccaaggtattcaggccaggagacctcgtcctcaatccaaagtgtaggggagctgcctgctaacgatgtaaggtcagtatttgaaaatcatggccactccaaaggatctcctgttcttgctttggtgtgtggctccattccttgattttctatctcctggtggtaccagatgctctgcctctcatacatgagttgaagagtttggaacttgtccttgtgccttgaagagtagagacaatggctaaacgttgacattctatctgtaaaccatggttttcacgcaccactaatatctgccattttcaatggctttaaaaagattttgaaagcttgctcaataatgttcaataatataataataataaaggcactgaggtcttctcagttaccccaacacctactccagagttttgaatacttgtcagcagtgcaaaaaatattatctgtttaaccacttatctatatgtctatctatctatctatatgtctatctatctatctaaatacttgatttttatttattgtcttctctgttaaataacttgagagcaaggtttctttcgtgtaaaagaagctgttgtaatttcatccaaatttgatctgtttccacctgctgaatggtgctctgacaataatggaacagaaagaatccttatcagcatctgattccaatgtcttgttacaggtcaaagaaaaaaggattgacagaaactagctaccttatatatattttttgataataaggtgggatataaatagattttggtagcaagtgtaatcactccgtatgatataataaatttctaaaagatttgagagcatctcaatttttaaagcaataggagtctagcatccattctgaaaaatcgcaaataatgcttagcttgctgtgtctgattctgttgttcaccattaaggggtagacagttaattttattatgttaacaagtgagggatgaatgttttcatctgtggtgaacctttatttttagaagtcttcatgttatctatttgtattatcatgtttatgtatggattttcaatttcagtaaccgaaaacttaagccttagtatgaaaaactgaggatttataattgaaaatgaaaaaaatatgttactctctatcatcagaattatagtctttggtgctctgttttcaatggggcatattacataaggttgtttctttcaccccaaagagactactaggttaccactctgggcattgcctttccacctaacccctcaaccagtaagactctacaccatattgtagccccactattctcctctttatcacagatgaagtgccagagcatcagagataggtagctcccaacctcttgctctggatttgcagaagagggggagatgtacttacccaggataagaaaaatctagtcaaatccaccccaaatcttccatttaacaggtaggaccatcgaggctggaccaaaccactttttccactgcccttggtgaatctattcctagtggaccccatttgggcatgtgcctagctaccttgggaaggcatgactataagtcacacctcaggcttggaaatgaaaggattctatagaatattctatactttccatagctggagaggtagtcagaaattcagtcttgctctgagtccacagtagctttaaaattcaactcaacattgttgtcacgtaacggaaacatctagacctggtaataatccaggaaattgcaaaatggaggccaaaagtaaggtgggtttctctggaaaggggtcatcctcagtctgataataccaagtctgacgctgaggttatgaatcattaccatggcttggagctattggatgcttggggtcttgggatagatagaaggtgaggttcacagttggagcttttcttgccattgaccccaagctcaccccagccttccttccctgaccctgagactcaccctatctatctcccctattccctcagtttgcagaatgagcaagatagagtctggctaggagggaaacatctatccatctctctaatctttgcccatcacctcctgttgcaatgagttcccgcaggtgaca

SEQ ID NO: 145894 - DNA, 2354 bp, Homo sapiens
  Payload ID: 8928
  Gene Symbol: KIAA1024L
  Gene Name: KIAA1024-like
  Uniprot ID: P59773
  ENST ID: ENST00000564719
  CDS Start-End: 113-685
gagagacttggtttcagatgcagtcagagcatcctcaggcacattaataatggaggagtctgacaagagcagctttgcctgtctttgttttccactgtaggtgaagggagacatggatctctctgttttgccaaataacaaccatcctgacaaattcctgcagcttgacgtaaagtctttaacgaggagctcagccctccttcaggccagcctggtgaggtttccgggtggaaattatcctgctgcacaacactggcaaaaccttgtctactcacagagggaaaagaagaatattgctgctcaacgaattaggggatccagtgcagacagccttgtcactgctgatagccccccaccatccatgtcatcagttatgaagaataacccactctatggtgacctaagtttggaggaagctatggaagaaagaaaaaagaacccctcatggaccattgaggaatatgacaaacattccctgcacacaaacctctctggacatctgaaggaaaatcctaatgacctgcggttttggttgggagacatgtacactccaggttttgacactttattgaaaaaggaagagaaacaagagaagcattcaaaattctgtcgtatgggtctgattttacttgtcgttatctccatcttggttaccatagtgactatcattacttttttcacctgaggaaactgcaacaatcagagctactttaaatttcctaaaaatttttctgataaacatttgaaaccccccccaccaaaataacaaaaaaacacatgtacatgcagtgtgaatggattgttgattgtattattaaatgtaattgtcctgaagaatgtgaatgtcaggcgtggtatgctggcttctccactttgttctataaaagctttctaagagtgccaccctgaactttgggaagcaggaattctgaggaccataatcacagaatagtcactatatgcaacccacattaaatatctttatagggagcaaacagtatcaaaaattgtcagcagctttgttttcatgcttaaactatattaaccttgttttaaaaatactgttaactctttaccacctcatcctcctgtgatcaccagaaaagtttgagctgataattttttttttaaccaactgctgggtagctaggataaaaatcttccagttgtgctgccaactgagttagattcattctctgttttattttcctgtatttctgtttaagtcagaaaaaaggaaaaagggaaatatcttattcaaatctattcttatttccccagtaatcatctatgatgccccaatttcatgttgcaattttaatagaattaaacttggataggccatagttacataattaattacatttagatccaatttatccaaattggctgtgacccctggtggcagtcagtgtgcatatattaccaaccatggtctaggttgggggtccctaggaaagcagagggaatactgctaagagaacagagtttgaagcctaactgctacttgctaacagactctggcaagttattctctcagagaaggaatgatattacctgcccaacagggctggccaaaggaccaaatacaaaacaggtatgaacagtatctggctcgaaataagcagttgcttaattaaaggcagttgttattattaatttatgctagctaattgacaacctgagtttaccttccattgtctgcagatacctggggacatggttgtagacacagatggggaatcaagtcaccatcctgcccttccttctagaacatcctttcctaagcccctcattcccactcttttctcatctttaaacaacccagccaaaggctatcttatgcaagaaacaaaagagggactttctcttcttctcatgagcctaaagtcagattttgtcccttgatattgccatatcattttgttgtatttgtcttaaagatgcttgaaataaagtacagtaaaagacagtttgggctgggcgcggtggctcgcgcctgtaatcccagcactttgggaggctgaggtgggtggatcatgaggtcaggagttcgagaccagcctggccaacatagtgaaaccccgtctctattaaaaatacaaaaattagccggggcttggtggcagacacctgtagtctcagctacttgggaggctgaggcaggagaatctctcgaaccctggaggcagaggttgcagtgagccgagattgtgccactgcactctagcctgggtgacagagtgagacttccataaaaaaaaaaaaaaaaaaaaaacaaacaaacaaacaaaaaaaaccccaaaaaaagagacagttttactggacaataaagttgttgtgtagaaaaaaaa

SEQ ID NO: 145895 - DNA, 5812 bp, Homo sapiens
  Payload ID: 8929
  Gene Symbol: KIAA1033
  Gene Name: KIAA1033
  Uniprot ID: Q2M389
  ENST ID: ENST00000332180
  CDS Start-End: 88-3609
aagtcacgtgctgtgacagtagctggggtgaggccgtcgtcgccgcacgggctggttggggctgtgtctgtgggaggcgccggggtgatggcggtggagactctgtccccggactgggagtttgaccgcgttgacgacggctcgcagaaaattcatgccgaagtccaacttaagaattatgggaaatttcttgaggagtatacctctcaactgagaagaattgaggacgctctggatgactcaattggagatgtttgggatttcaatcttgatcctatagcattaaagcttttgccttatgaacagtcctctcttttggaactcataaagactgaaaacaaggtcttaaacaaagtcatcactgtttatgctgcactttgttgtgaaatcaagaaattaaaatatgaggctgaaactaaattttacaatggtctcttgttttatggagaaggagctacagatgccagcatggtggaaggtgattgccaaattcaaatggggagatttatttcattcttacaggaactgtcttgctttgttacgaggtgctatgaagtggtgatgaacgtagtccaccagttggctgccctctatatcagtaacaagattgcacccaaaattatagagacaactggagttcattttcagactatgtatgagcacttgggagaactgctaacagttttgctcaccctggatgaaattattgataatcatatcacactgaaagaccactggactatgtacaaaaggttactgaaatctgtccatcacaatccttcaaaatttggaattcaggaagaaaaattaaagccatttgaaaagttcttgctgaagctagaagggcaattactggatggaatgatattccaggcctgtatagaacaacaatttgattctctcaatggaggagtatctgtgtcaaaaaatagtacttttgctgaggaatttgcacatagtattcggtcaatttttgcaaatgtagaagccaaacttggagaaccttctgaaattgaccagagagacaagtatgttggaatttgtggactctttgtattgcactttcagatttttcgaactattgataaaaagttttataagtctttattggacatttgtaagaaggtaccagccatcactctaactgctaatattatttggtttcctgataattttctgatccagaaaataccagcagctgccaaactgctagacagaaaaagtcttcaagccattaaaatacacagggatacttttctacaacagaaagctcaatcacttaccaaagatgtacagtcttactacgtctttgtgagctcatggatgatgaaaatggaatctattttgtctaaagagcagagaatggataaatttgctgaagatctcaccaatagatgtaatgtttttatacagggcttcttgtatgcatatagtattagtaccattattaaaaccacaatgaatctctacatgtccatgcaaaagccaatgaccaaaacctcagttaaggcattgtgcaggcttgttgaacttctcaaggcaatagagcatatgttctacaggagaagcatggttgtggctgattcagtttcacatataacacagcaccttcaacatcaggctcttcattctatttctgtggccaagaaaagagtgatttctgacaaaaaatacagcgaacagcgtcttgatgtgctctctgctctagttttggctgaaaacactctaaatggaccaagcacaaagcaacggcgacttattgtttctttggcactaagtgttggcacacaaatgaaaacatttaaagatgaagaactctttccacttcaagtagtcatgaaaaaactggatcttattagtgaacttagagaacgagtccaaacacaatgtgactgttgttttttatactggcatcgagctgtcttcccaatttatttagatgatgtatatgaaaatgctgttgatgcagccagattacattacatgttcagtgctttgcgcgactgtgtacctgctatgatgcatgcaaggcatttagagtcctatgagatacttctggattgctatgacaaggaaattatggaaattttaaatgagcatttgctggacaaattatgcaaagaaatagagaaagatctgcgactttctgtgcatactcatttaaagctggatgaccgaaaccctttcaaagttggcatgaaagacctggctctttttttctctctgaatccaattcggtttttcaatcgtttcattgacattcgggcttacgtaactcactacctagacaagactttctacaatctaacaactgtagcccttcatgactgggccacttatagtgagatgagaaacttagctactcagcgttatggactggttatgacagaggcacatcttcccagtcagactttggaacagggccttgatgttttagaaattatgagaaacattcatatatttgtgtcccgatacctctataatctcaacaatcagatttttattgaacgaacaagcaataacaagcatttgaatactattaatattcggcatattgctaattcaattcgaacacatggcacgggaattatgaatacaactgttaatttcacctaccagtttttgaaaaagaagttctatatatttagccaatttatgtatgatgaacacatcaaatccagattgattaaagatattcgatttttcagggaaattaaggaccaaaatgatcataagtatccttttgatagagcagaaaaattcaatcgaggcatcagaaaacttggagtaacacctgagggacagagctaccttgatcaattcaggcaactcatcagccagattggtaatgctatgggctatgtacgaatgataagatctggtggtcttcattgtagcagcaatgccattagatttgttcctgatcttgaagatattgtaaattttgaagaactagtaaaagaagaaggtcttgcagaagaaacattaaaagcagcaaggcatttggattcagtcctcagtgatcacacacgaaattctgccgaaggcacagaatatttcaaaatgcttgtagacgtttttgctccagaatttcgaaggccaaagaatatacatctccgaaatttctatataattgttccccctctgaccctcaactttgtagagcattccattagttgcaaggaaaaattaaataaaaaaaataaaattggagctgcctttactgatgatggctttgccatgggtgtggcttacattctaaagcttttggatcagtatcgggagtttgattcacttcactggttccagtctgttagagagaaatacctgaaggagataagagcagttgctaagcaacagaatgtacagtcagccagtcaagatgaaaaactcttacaaaccatgaatctcactcagaagcgactggatgtctatctacaggaatttgaattgctgtatttctcactgagcagtgcaagaattttcttcagagcagacaagactgcggctgaagaaaaccaagaaaagaaagagaaggaagaagaaactaaaacaagcaatggagacctgtctgacagcactgtgtctgctgatcctgttgtgaaatgatacggatggtattcactgcacatatgatgaaatcatcagaattgttaaaacttttgccagtggaatggataaactattgatgaattgtttcctgggtcacatctctggaaaatagatgttacagttcttaaaggcagtgctttaaagtgaagttcattctgtttccaaaggctctactttcaaaggttaagaatgagattttaaaattggatttttgcctggacttgagggtacaagatgtttctatttgaagtgaagttataaaagggcaaatccagattcataaactatcacctcggatttcttgtaatctacatgtttgtaatttgtatttgcatagatctttgatctatagttatttcaagtcatgggaaattcaatgcatatactatatacagccagtaaatacatgcttaacaaaaggaatgagcctgaagttcataaagaatacatatcaatattcttataaaaggaatatatgaagatggctttgatactagaggtgaggcacaagtgttttatgtactctcagtgtacagtataactgatgatccttctttcattgttaatttcatgtgactcacaagagctgctgatgtctttgatgagacattttataactagtttacattgctttgagaacatttaacctccaacagctgctttaaatttaagatttacttaatactcagaaaattcagataaagccatagagtcctgtttgaagcttcacttctattttggttgaaggcatgatgtatgatgtcagaaaaaaaattgaatgaattatttctacatccaaactcaggtttcttctacattagattgaattgaaattttggtgatggtttgggtagactttttttttatatcaagtataatttaaaacatcagattaaataattacactgttcaggcttttaaaaaaataccactgtgagaataaagcgctagcaagatacatcacttactgattttaaaaatacagaaagattttgagtaaattttgtgcccagcaagctgttagttttatttttgtaaaggtatgtaagttattaaatggttaatcatggccttttaaaaataaaataaagtgatacctttacaatgaagacaaaagtttaaaactttctaatacaaacaccattttgggaaatgcttgatttttttctattgcatttgtctgctaaacatttctttggataaatcctgcaaatacttctaacattattctttgattccagcttttagaatgggtgtacaatgccctgtttgtacttactggttagggtcagggtaacttgccagcccaagataaatactttaattgttaaaagtcagaagagacagaatatgtaggaaatgttttttgtttattatgtaaacatggcttacagaattatgaacagtggatagattaaaggcatttaatatttgtaattcataataactgtagaaatggccctaaagcatgctgcataattaataatttatattttcattattataagtgtttatattaatgatcttgcatttgattatatcaaattcgtcatttcatagcaacagtattgttttctctgtttttcttctctaacttctctgaaatcatctcctattaagggatagaaattgttactagaagagaatcacatgttctgtgttcattatccctacacatgtaaattaattattttatcaatactagatagagttcacatgctgactccctggatacctacagttgagaagaaaatgacagacaattatttttcctttaggtcaaaataatgtcactgctatctggataaattataagttcatatatttgaaataagatcctggaaacgaatttaaatggtgtcaaactgcagagcaacagggcttcagtatattcacatctaataggttaatatgtacatttggatgatgatttttcttgataacattaacattaattttattttttcagacatactgtaatttaaaaattaatgtgagcgtttgttttaagttcacagaaaacttaataattcaaattctcaggaattaaggactcaccataacattgtcagttctaatgaaattttgtaaaagatggcaagtttgttacctcacttgagtggggttttccttttcccccaattctaagagaatataatgtgtatactaaaacattaataaacataattttgaaaatttc

SEQ ID NO: 145896 - DNA, 575 bp, Homo sapiens
  Payload ID: 8929
  Gene Symbol: KIAA1033
  Gene Name: KIAA1033
  ENST ID: ENST00000551224
  CDS Start-End: 228-575
atatttaatatagttatatataagtatgtatgtttatattttaagtgtagaaatatgtaacagttttactttttatgataagaactgaagtaaaatatagcaaaatattttggttcttaggagtggaaaccttgtaatttactactgtatgtaactatattcctattagaatttagagttatttatataaatatctgatttttttgtgtggtttttaaggtaatgctatgggctatgtacgaatgataagatctggtggtcttcattgtagcagcaatgccattagatttgttcctgatcttgaagatattgtaaattttgaagaactagtaaaagaagaaggtcttgcagaagaaacattaaaagcagcaaggcatttggattcagtcctcagtgatcacacacgaaattctgccgaaggcacagaatatttcaaaatgcttgtagacgtttttgctccagaatttcgaaggccaaagaatatacatctccgaaatttctatataattgttccccctctgaccctcaactttgtagagcattccattagttgcaaggaaaaattaaataaaaaa

SEQ ID NO: 145897 - DNA, 5819 bp, Homo sapiens
  Payload ID: 8929
  Gene Symbol: KIAA1033
  Gene Name: KIAA1033
  ENST ID: ENST00000550053
  CDS Start-End: 87-656
agtcacgtgctgtgacagtagctggggtgaggccgtcgtcgccgcacgggctggttggggctgtgtctgtgggaggcgccggggtgatggcggtggagactctgtccccggactgggagtttgaccgcgttgacgacggctcgcagaaaattcatgccgaagtccaacttaagaattatgggaaatttcttgaggagtatacctctcaactgagaagaattgaggacgctctggatgactcaattggagatgtttgggatttcaatcttgatcctatagcattaaagcttttgccttatgaacagtcctctcttttggaactcataaagactgaaaacaaggtcttaaacaaagtcatcactgtttatgctgcactttgttgtgaaatcaagaaattaaaatatgaggctgaaactaaattttacaatggtctcttgttttatggagaaggagctacagatgccagcatggtggaaggtgattgccaaattcaaatggggagatttatttcattcttacaggaactgtcttgctttgttacgaggtgctatgaagtggtgatgaacgtagtccaccagttggctgccctctatatcagtaacaagattgcacccaaaattatagagacaactggagttcattttcaggttttttgacagactatgtatgagcacttgggagaactgctaacagttttgctcaccctggatgaaattattgataatcatatcacactgaaagaccactggactatgtacaaaaggttactgaaatctgtccatcacaatccttcaaaatttggaattcaggaagaaaaattaaagccatttgaaaagttcttgctgaagctagaagggcaattactggatggaatgatattccaggcctgtatagaacaacaatttgattctctcaatggaggagtatctgtgtcaaaaaatagtacttttgctgaggaatttgcacatagtattcggtcaatttttgcaaatgtagaagccaaacttggagaaccttctgaaattgaccagagagacaagtatgttggaatttgtggactctttgtattgcactttcagatttttcgaactattgataaaaagttttataagtctttattggacatttgtaagaaggtaccagccatcactctaactgctaatattatttggtttcctgataattttctgatccagaaaataccagcagctgccaaactgctagacagaaaaagtcttcaagccattaaaatacacagggatacttttctacaacagaaagctcaatcacttaccaaagatgtacagtcttactacgtctttgtgagctcatggatgatgaaaatggaatctattttgtctaaagagcagagaatggataaatttgctgaagatctcaccaatagatgtaatgtttttatacagggcttcttgtatgcatatagtattagtaccattattaaaaccacaatgaatctctacatgtccatgcaaaagccaatgaccaaaacctcagttaaggcattgtgcaggcttgttgaacttctcaaggcaatagagcatatgttctacaggagaagcatggttgtggctgattcagtttcacatataacacagcaccttcaacatcaggctcttcattctatttctgtggccaagaaaagagtgatttctgacaaaaaatacagcgaacagcgtcttgatgtgctctctgctctagttttggctgaaaacactctaaatggaccaagcacaaagcaacggcgacttattgtttctttggcactaagtgttggcacacaaatgaaaacatttaaagatgaagaactctttccacttcaagtagtcatgaaaaaactggatcttattagtgaacttagagaacgagtccaaacacaatgtgactgttgttttttatactggcatcgagctgtcttcccaatttatttagatgatgtatatgaaaatgctgttgatgcagccagattacattacatgttcagtgctttgcgcgactgtgtacctgctatgatgcatgcaaggcatttagagtcctatgagatacttctggattgctatgacaaggaaattatggaaattttaaatgagcatttgctggacaaattatgcaaagaaatagagaaagatctgcgactttctgtgcatactcatttaaagctggatgaccgaaaccctttcaaagttggcatgaaagacctggctctttttttctctctgaatccaattcggtttttcaatcgtttcattgacattcgggcttacgtaactcactacctagacaagactttctacaatctaacaactgtagcccttcatgactgggccacttatagtgagatgagaaacttagctactcagcgttatggactggttatgacagaggcacatcttcccagtcagactttggaacagggccttgatgttttagaaattatgagaaacattcatatatttgtgtcccgatacctctataatctcaacaatcagatttttattgaacgaacaagcaataacaagcatttgaatactattaatattcggcatattgctaattcaattcgaacacatggcacgggaattatgaatacaactgttaatttcacctaccagtttttgaaaaagaagttctatatatttagccaatttatgtatgatgaacacatcaaatccagattgattaaagatattcgatttttcagggaaattaaggaccaaaatgatcataagtatccttttgatagagcagaaaaattcaatcgaggcatcagaaaacttggagtaacacctgagggacagagctaccttgatcaattcaggcaactcatcagccagattggtaatgctatgggctatgtacgaatgataagatctggtggtcttcattgtagcagcaatgccattagatttgttcctgatcttgaagatattgtaaattttgaagaactagtaaaagaagaaggtcttgcagaagaaacattaaaagcagcaaggcatttggattcagtcctcagtgatcacacacgaaattctgccgaaggcacagaatatttcaaaatgcttgtagacgtttttgctccagaatttcgaaggccaaagaatatacatctccgaaatttctatataattgttccccctctgaccctcaactttgtagagcattccattagttgcaaggaaaaattaaataaaaaaaataaaattggagctgcctttactgatgatggctttgccatgggtgtggcttacattctaaagcttttggatcagtatcgggagtttgattcacttcactggttccagtctgttagagagaaatacctgaaggagataagagcagttgctaagcaacagaatgtacagtcagccagtcaagatgaaaaactcttacaaaccatgaatctcactcagaagcgactggatgtctatctacaggaatttgaattgctgtatttctcactgagcagtgcaagaattttcttcagagcagacaagactgcggctgaagaaaaccaagaaaagaaagagaaggaagaagaaactaaaacaagcaatggagacctgtctgacagcactgtgtctgctgatcctgttgtgaaatgatacggatggtattcactgcacatatgatgaaatcatcagaattgttaaaacttttgccagtggaatggataaactattgatgaattgtttcctgggtcacatctctggaaaatagatgttacagttcttaaaggcagtgctttaaagtgaagttcattctgtttccaaaggctctactttcaaaggttaagaatgagattttaaaattggatttttgcctggacttgagggtacaagatgtttctatttgaagtgaagttataaaagggcaaatccagattcataaactatcacctcggatttcttgtaatctacatgtttgtaatttgtatttgcatagatctttgatctatagttatttcaagtcatgggaaattcaatgcatatactatatacagccagtaaatacatgcttaacaaaaggaatgagcctgaagttcataaagaatacatatcaatattcttataaaaggaatatatgaagatggctttgatactagaggtgaggcacaagtgttttatgtactctcagtgtacagtataactgatgatccttctttcattgttaatttcatgtgactcacaagagctgctgatgtctttgatgagacattttataactagtttacattgctttgagaacatttaacctccaacagctgctttaaatttaagatttacttaatactcagaaaattcagataaagccatagagtcctgtttgaagcttcacttctattttggttgaaggcatgatgtatgatgtcagaaaaaaaattgaatgaattatttctacatccaaactcaggtttcttctacattagattgaattgaaattttggtgatggtttgggtagactttttttttatatcaagtataatttaaaacatcagattaaataattacactgttcaggcttttaaaaaaataccactgtgagaataaagcgctagcaagatacatcacttactgattttaaaaatacagaaagattttgagtaaattttgtgcccagcaagctgttagttttatttttgtaaaggtatgtaagttattaaatggttaatcatggccttttaaaaataaaataaagtgatacctttacaatgaagacaaaagtttaaaactttctaatacaaacaccattttgggaaatgcttgatttttttctattgcatttgtctgctaaacatttctttggataaatcctgcaaatacttctaacattattctttgattccagcttttagaatgggtgtacaatgccctgtttgtacttactggttagggtcagggtaacttgccagcccaagataaatactttaattgttaaaagtcagaagagacagaatatgtaggaaatgttttttgtttattatgtaaacatggcttacagaattatgaacagtggatagattaaaggcatttaatatttgtaattcataataactgtagaaatggccctaaagcatgctgcataattaataatttatattttcattattataagtgtttatattaatgatcttgcatttgattatatcaaattcgtcatttcatagcaacagtattgttttctctgtttttcttctctaacttctctgaaatcatctcctattaagggatagaaattgttactagaagagaatcacatgttctgtgttcattatccctacacatgtaaattaattattttatcaatactagatagagttcacatgctgactccctggatacctacagttgagaagaaaatgacagacaattatttttcctttaggtcaaaataatgtcactgctatctggataaattataagttcatatatttgaaataagatcctggaaacgaatttaaatggtgtcaaactgcagagcaacagggcttcagtatattcacatctaataggttaatatgtacatttggatgatgatttttcttgataacattaacattaattttattttttcagacatactgtaatttaaaaattaatgtgagcgtttgttttaagttcacagaaaacttaataattcaaattctcaggaattaaggactcaccataacattgtcagttctaatgaaattttgtaaaagatggcaagtttgttacctcacttgagtggggttttccttttcccccaattctaagagaatataatgtgtatactaaaacattaataaacataattttgaaaa

SEQ ID NO: 145898 - DNA, 359 bp, Homo sapiens
  Payload ID: 8929
  Gene Symbol: KIAA1033
  Gene Name: KIAA1033
  ENST ID: ENST00000552203
  CDS Start-End: 214-359
ccttttgatagagcagaaaaattcaatcgaggcatcagaaaacttggagtaacacctgagggacagagctaccttgatcaattcaggcaactcatcagccagattggacatgttggctctagggatggagcagtgaagaagacaaaggctgtactcatggatcttgaactctaggtgggggaagatgcagacagaaaaatacatagtaatgctatgggctatgtacgaatgataagatctggtggtcttcattgtagcagcaatgccattagatttgttcctgatcttgaagatattgtaaattttgaagaactagtaaaagaagaaggtcttgcagaagaaacattaaaagcagcaag

SEQ ID NO: 145899 - DNA, 576 bp, Homo sapiens
  Payload ID: 8929
  Gene Symbol: KIAA1033
  Gene Name: KIAA1033
  ENST ID: ENST00000548195
  CDS Start-End: 452-576
agagctgtaggaactcctacggtggcgacagagagggaaacaggcttgttggaagaagcgcctggtcagcgttatcctcgaggatcatgccttcctgttaattccccaccccatcaattctacctttttagaaattcatgccgaagtccaacttaagaattatgggaaatttcttgaggagtatacctctcaactgagaagaattgaggacgctctggatgactcaattggagatgtttgggatttcaatcttgatcctatagcattaaagcttttgccttatgaacagtcctctcttttggaactcataaagactgaaaacaaggtcttaaacaaagtcatcactgtttatgctgcactttgttgtgaaatcaagaaattaaaatatgaggctgaaactaaattttacaatggtctcttgttttatggagaaggagctacagatgccagcatggtggaaggtgattgccaaattcaaatggggagatttatttcattcttacaggaactgtcttgctttgttacgaggtgctatgaagtggtgatgaacgtagtccaccagttggctgccctcta

SEQ ID NO: 145900 - DNA, 719 bp, Homo sapiens
  Payload ID: 8929
  Gene Symbol: KIAA1033
  Gene Name: KIAA1033
  ENST ID: ENST00000547404
  CDS Start-End: 257-445
ggaggcgccggggtgatggcggtggagactctgtccccggactgggagtttgaccgcgttgacgacggctcgcagacttttgccttatgaacagtcctctcttttggaactcataaagactgaaaacaaggtcttaaacaaagtcatcactgtttatgctgcactttgttgtgaaatcaagaaattaaaatatgaggctgaaactaaattttacaatggtctcttgttttatggagaaggagctacagatgccagcatggtggaaggtgattgccaaattcaaatggggagatttatttcattcttacaggaactgtcttgctttgttacgaggtgctatgaagtggtgatgaacgtagtccaccagttggctgccctctatatcagtaacaagattgcacccaaaattatagagacaactggagttcattttcaggttttttgacagactatgtatgagcacttgggagaactgctaacagttttgctcaccctggatgaaattattgataatcatatcacactgaaagaccactggactatgtacaaaaggttactgaaatctgtccatcacaatccttcaaaatttggaattcaggaagaaaaattaaagccatttgaaaagttcttgctgaagctagaagggcaattactggatggaatgatattccaggcctgtatagaacaacaatttgattctctcaatggaggagtatctg

SEQ ID NO: 145901 - DNA, 5807 bp, Homo sapiens
  Payload ID: 8929
  Gene Symbol: KIAA1033
  Gene Name: KIAA1033
  ENST ID: ENST00000620430
  CDS Start-End: 88-3612
aagtcacgtgctgtgacagtagctggggtgaggccgtcgtcgccgcacgggctggttggggctgtgtctgtgggaggcgccggggtgatggcggtggagactctgtccccggactgggagtttgaccgcgttgacgacggctcgcagaaaattcatgccgaagtccaacttaagaattatgggaaatttcttgaggagtatacctctcaactgagaagaattgaggacgctctggatgactcaattggagatgtttgggatttcaatcttgatcctatagcattaaagcttttgccttatgaacagtcctctcttttggaactcataaagactgaaaacaaggtcttaaacaaagtcatcactgtttatgctgcactttgttgtgaaatcaagaaattaaaatatgaggctgaaactaaattttacaatggtctcttgttttatggagaaggagctacagatgccagcatggtggaaggtgattgccaaattcaaatggggagatttatttcattcttacaggaactgtcttgctttgttacgaggtgctatgaagtggtgatgaacgtagtccaccagttggctgccctctatatcagtaacaagattgcacccaaaattatagagacaactggagttcattttcagactatgtatgagcacttgggagaactgctaacagttttgctcaccctggatgaaattattgataatcatatcacactgaaagaccactggactatgtacaaaaggttactgaaatctgtccatcacaatccttcaaaatttggaattcaggaagaaaaattaaagccatttgaaaagttcttgctgaagctagaagggcaattactggatggaatgatattccaggcctgtatagaacaacaatttgattctctcaatggaggagtatctgtgtcaaaaaatagtacttttgctgaggaatttgcacatagtattcggtcaatttttgcaaatgtagaagccaaacttggagaaccttctgaaattgaccagagagacaagtatgttggaatttgtggactctttgtattgcactttcagatttttcgaactattgataaaaagttttataagtctttattggacatttgtaagaaggtaccagccatcactctaactgctaatattatttggtttcctgataattttctgatccagaaaataccagcagctgccaaactgctagacagaaaaagtcttcaagccattaaaatacacagggatacttttctacaacagaaagctcaatcacttaccaaagatgtacagtcttactacgtctttgtgagctcatggatgatgaaaatggaatctattttgtctaaagagcagagaatggataaatttgctgaagatctcaccaatagatgtaatgtttttatacaggtaggcttcttgtatgcatatagtattagtaccattattaaaaccacaatgaatctctacatgtccatgcaaaagccaatgaccaaaacctcagttaaggcattgtgcaggcttgttgaacttctcaaggcaatagagcatatgttctacaggagaagcatggttgtggctgattcagtttcacatataacacagcaccttcaacatcaggctcttcattctatttctgtggccaagaaaagagtgatttctgacaaaaaatacagcgaacagcgtcttgatgtgctctctgctctagttttggctgaaaacactctaaatggaccaagcacaaagcaacggcgacttattgtttctttggcactaagtgttggcacacaaatgaaaacatttaaagatgaagaactctttccacttcaagtagtcatgaaaaaactggatcttattagtgaacttagagaacgagtccaaacacaatgtgactgttgttttttatactggcatcgagctgtcttcccaatttatttagatgatgtatatgaaaatgctgttgatgcagccagattacattacatgttcagtgctttgcgcgactgtgtacctgctatgatgcatgcaaggcatttagagtcctatgagatacttctggattgctatgacaaggaaattatggaaattttaaatgagcatttgctggacaaattatgcaaagaaatagagaaagatctgcgactttctgtgcatactcatttaaagctggatgaccgaaaccctttcaaagttggcatgaaagacctggctctttttttctctctgaatccaattcggtttttcaatcgtttcattgacattcgggcttacgtaactcactacctagacaagactttctacaatctaacaactgtagcccttcatgactgggccacttatagtgagatgagaaacttagctactcagcgttatggactggttatgacagaggcacatcttcccagtcagactttggaacagggccttgatgttttagaaattatgagaaacattcatatatttgtgtcccgatacctctataatctcaacaatcagatttttattgaacgaacaagcaataacaagcatttgaatactattaatattcggcatattgctaattcaattcgaacacatggcacgggaattatgaatacaactgttaatttcacctaccagtttttgaaaaagaagttctatatatttagccaatttatgtatgatgaacacatcaaatccagattgattaaagatattcgatttttcagggaaattaaggaccaaaatgatcataagtatccttttgatagagcagaaaaattcaatcgaggcatcagaaaacttggagtaacacctgagggacagagctaccttgatcaattcaggcaactcatcagccagattggtaatgctatgggctatgtacgaatgataagatctggtggtcttcattgtagcagcaatgccattagatttgttcctgatcttgaagatattgtaaattttgaagaactagtaaaagaagaaggtcttgcagaagaaacattaaaagcagcaaggcatttggattcagtcctcagtgatcacacacgaaattctgccgaaggcacagaatatttcaaaatgcttgtagacgtttttgctccagaatttcgaaggccaaagaatatacatctccgaaatttctatataattgttccccctctgaccctcaactttgtagagcattccattagttgcaaggaaaaattaaataaaaaaaataaaattggagctgcctttactgatgatggctttgccatgggtgtggcttacattctaaagcttttggatcagtatcgggagtttgattcacttcactggttccagtctgttagagagaaatacctgaaggagataagagcagttgctaagcaacagaatgtacagtcagccagtcaagatgaaaaactcttacaaaccatgaatctcactcagaagcgactggatgtctatctacaggaatttgaattgctgtatttctcactgagcagtgcaagaattttcttcagagcagacaagactgcggctgaagaaaaccaagaaaagaaagagaaggaagaagaaactaaaacaagcaatggagacctgtctgacagcactgtgtctgctgatcctgttgtgaaatgatacggatggtattcactgcacatatgatgaaatcatcagaattgttaaaacttttgccagtggaatggataaactattgatgaattgtttcctgggtcacatctctggaaaatagatgttacagttcttaaaggcagtgctttaaagtgaagttcattctgtttccaaaggctctactttcaaaggttaagaatgagattttaaaattggatttttgcctggacttgagggtacaagatgtttctatttgaagtgaagttataaaagggcaaatccagattcataaactatcacctcggatttcttgtaatctacatgtttgtaatttgtatttgcatagatctttgatctatagttatttcaagtcatgggaaattcaatgcatatactatatacagccagtaaatacatgcttaacaaaaggaatgagcctgaagttcataaagaatacatatcaatattcttataaaaggaatatatgaagatggctttgatactagaggtgaggcacaagtgttttatgtactctcagtgtacagtataactgatgatccttctttcattgttaatttcatgtgactcacaagagctgctgatgtctttgatgagacattttataactagtttacattgctttgagaacatttaacctccaacagctgctttaaatttaagatttacttaatactcagaaaattcagataaagccatagagtcctgtttgaagcttcacttctattttggttgaaggcatgatgtatgatgtcagaaaaaaaattgaatgaattatttctacatccaaactcaggtttcttctacattagattgaattgaaattttggtgatggtttgggtagactttttttttatatcaagtataatttaaaacatcagattaaataattacactgttcaggcttttaaaaaaataccactgtgagaataaagcgctagcaagatacatcacttactgattttaaaaatacagaaagattttgagtaaattttgtgcccagcaagctgttagttttatttttgtaaaggtatgtaagttattaaatggttaatcatggccttttaaaaataaaataaagtgatacctttacaatgaagacaaaagtttaaaactttctaatacaaacaccattttgggaaatgcttgatttttttctattgcatttgtctgctaaacatttctttggataaatcctgcaaatacttctaacattattctttgattccagcttttagaatgggtgtacaatgccctgtttgtacttactggttagggtcagggtaacttgccagcccaagataaatactttaattgttaaaagtcagaagagacagaatatgtaggaaatgttttttgtttattatgtaaacatggcttacagaattatgaacagtggatagattaaaggcatttaatatttgtaattcataataactgtagaaatggccctaaagcatgctgcataattaataatttatattttcattattataagtgtttatattaatgatcttgcatttgattatatcaaattcgtcatttcatagcaacagtattgttttctctgtttttcttctctaacttctctgaaatcatctcctattaagggatagaaattgttactagaagagaatcacatgttctgtgttcattatccctacacatgtaaattaattattttatcaatactagatagagttcacatgctgactccctggatacctacagttgagaagaaaatgacagacaattatttttcctttaggtcaaaataatgtcactgctatctggataaattataagttcatatatttgaaataagatcctggaaacgaatttaaatggtgtcaaactgcagagcaacagggcttcagtatattcacatctaataggttaatatgtacatttggatgatgatttttcttgataacattaacattaattttattttttcagacatactgtaatttaaaaattaatgtgagcgtttgttttaagttcacagaaaacttaataattcaaattctcaggaattaaggactcaccataacattgtcagttctaatgaaattttgtaaaagatggcaagtttgttacctcacttgagtggggttttccttttcccccaattctaagagaatataatgtgtatactaaaacattaataaacataattttg

SEQ ID NO: 145902 - DNA, 4556 bp, Homo sapiens
  Payload ID: 8930
  Gene Symbol: KIAA1107
  Gene Name: KIAA1107
  ENST ID: ENST00000370378
  CDS Start-End: 99-4163
cgtctcagcttcaagaaaaatgtattgcatttattgtagacaacttctccaagattattcagagtgaaaattttgctcttcttttacagtcacaagcaatgagcagcacagccgatctgttggacacaattttaaaagcaattgaagaaaatatcaccactgaaaatagctgctctcttcttatggctctggacacactgctgaactctgacagtacaaaggaaatgggttttacgtgcaagatccaggctctgcgtgataagctgtggatcttcctggttcagtctttctatgctgttcgtcacacagaaagctggaagctgatgagcacagatgatcaacagaaaatccaagcagctgcatttgacaaaggtgatgatcgaagacttggcaaaaagcctatattcagtagctcgcagcaaaggaaacaagtttctgactctggtgatataaaaatcaaatcttggaggggaaataacaagaaagagtgttggagttatctctctactaataaaaagatgaaatctgatggattaggagcatctggacattcgtcaagtaccaatagaaatagtataaataaaactctgaagcaagatgatgtaaaggaaaaagatggtacaaaaatagcatctaagattacaaaagaactaaaaactgggggaaaaaatgtttctggaaagcccaaaactgtaacaaaatccaaaacagaaaatggtgataaggcacggttggaaaacatgtcacctagacaagttgtagaaagatcagcaacagcagcagcagcagcaactggacagaagaatttactaaatggaaaaggagtgagaaatcaggaagggcaaatttcaggtgccagacccaaggtactcacaggaaacttaaatgtgcaagccaaagcaaagcctttgaagaaagctacagggaaggattcaccatgcctcagcatcgcaggaccctccagcagatccacagattcaagtatggaattctcaatttccactgaatgtctggatgaaccgaaagaaaatggatcaacagaagaagaaaagccttctggacataaactatccttttgtgattctccaggacagatgatgaaaaacagtgtagatagtgtcaaaaattccactgtagccataaaatctcgacctgtttcaagagttaccaatggaacttccaataaaaaaagtattcatgaacaagacactaatgtaaataacagtgtactaaagaaagtcagtggcaaaggatgtagtgagccagtaccacaggcaattttgaagaaaagaggaactagcaatggatgtactgcagctcagcagaggacaaagagtaccccatctaatcttactaaaactcaaggatcccaaggagagtcaccaaactcagtaaaatcttcagtctcttcaaggcagtctgatgaaaatgtggcaaagttggaccacaatacaactacagagaaacaagcacctaagagaaaaatggtcaagcaagtacacacagctttgcctaaggttaatgcaaaaatagtggcaatgcctaaaaatctaaatcagtcaaagaaaggtgaaactttgaataataaagattcaaaacagaaaatgcctcctggacaggttatatcaaaaactcagccttcctcccaaagacctttaaaacatgaaacatctactgtccaaaaaagtatgtttcatgatgtgcgtgataataacaacaaggacagtgtttctgaacagaagcctcacaaacctctcattaatcttgcatctgaaataagtgatgcagaagcactccagtcatcctgcaggcctgacccacaaaagccattaaacgatcaagaaaaagagaagttggcgttagaatgccaaaatatttcaaagctggataaatcattaaaacacgaactggaatcaaaacagatttgtttagataaaagtgaaacaaaatttcccaatcacaaagaaacagatgattgcgatgcagctaacatatgttgtcattctgttgggagtgataatgtaaattcaaaattttatagcaccacagccctaaaatacatggtttcaaatccaaatgaaaactccttgaactctaatccagtttgtgatttagactcaacaagtgcagggcaaatccatttgatatcagatagggagaaccaagtagggagaaaagatacaaacaaacaatcaagtattaaatgtgtggaagatgtttcactgtgtaatcctgaaaggacaaatggtaccttaaattctgctcaagaagacaaaaaatcgaaagttcctgtggaaggactgacaattcctagtaagttgtcagatgaatctgctatggatgaagacaaacatgctacagcagactcagatgtatcttccaagtgtttttcgggacagctatcagaaaaaaattctcctaaaaatatggaaacatcagaatctccagagagccatgaaactccagaaactccatttgtgggtcactggaatttgagtactggtgttctgcatcagcgagagagtcctgaatctgacactggcagtgctaccacctcctccgatgacataaagcccagatctgaagactatgatgctggagggtctcaggatgatgatgggtcaaatgacagaggtatctctaaatgtggcactatgctgtgccatgattttcttggaagaagtagcagtgataccagtactcctgaagaattaaaaatttatgatagtaatttaagaattgaagtaaaaatgaaaaagcaaagtaataatgatcttttccaagttaattcaacgagtgatgatgaaatccctaggaaaaggccagaaatttggtctcgatctgcaatagttcactctagggaaagagaaaatattccacgaggcagtgtccagtttgctcaggaaatagatcaggtatcttcttcagcagatgaaacagaagatgaaagatctgaagctgaaaacgttgcagaaaatttctctatatctaacccagctcctcagcagtttcagggaataattaatttagcttttgaagatgcaactgaaaatgaatgtcgtgaattttctgcaactaaaaagtttaaaaggtcagttttactttcagtcgatgaatgtgaagagctgggatcagatgaaggagaagtccatactccctttcaggcttctgtagattctttttcaccttctgatgtttttgatggcatttctcatgaacatcatggaaggacctgctattccagattctcacgagaaagtgaagataatattttagaatgtaaacaaaataaaggcaatagtgtatgtaaaaatgaaagcactgtcttggatcttagtagcattgactcttcaagaaaaaataaacagagtgtttcagccacagaaaaaaagaacacaatagacgtcctatccagtagaagcagacagcttcttcgagaagataaaaaagtaaacaatggaagcaatgtggaaaatgacattcagcaacgcagcaaattcttggatagtgatgtaaaatctcaagaaagaccatgtcacttggatcttcatcaaagagaacccaattctgacataccaaagaacagctctacaaaatctctagactcctttcggagtcaagttctgcctcaggaaggtccagtgaaagagagccattctacaactactgaaaaagctaatattgctttatctgcaggagacatagatgattgtgacacactggcacaaacccgcatgtatgaccatcggccttcaaaaaccctgtctccaatatatgagatggatgtaatagaagcatttgagcagaaagtggaatcagaaacacatgttacagatatggattttgaagatgaccaacattttgcaaaacaagattggacactactaaagcaactgctctctgaacaggattcaaacttagatgttacaaattccgttcctgaagacttaagtttagcacagtatctaatcaatcagacactacttttagcacgagatagctcaaaacctcagggtataacacatattgacactttgaacagatggagtgaactaacatctccacttgattcctcagcgagcatcaccatggctagtttttcctctgaagattgttcgcctcaaggcgagtggacaattctggaactggaaactcagcattaagtgttaacattttggaaaaatttatgccactcctttattttttgatgcctatattatatccaaatgataattgcattagccggatataaactttctttaatattgagtctttccaatttaatgaggtaaacatagtttatttattaatatatcacatatagaaaaatgtttttctaaagtttttgagcatgttttctctaattattagagaaattagaagacttataaggaaaccctagcttcagttttcctttcctagctgatgatttgttcacttaatcattattcaagaatttaaaatgtgaatgcagaagtagatcagtccctttactttttgctctgcatagggtaacatagtaatttaacaataaaaacttaccgtgcttgtgtcca

SEQ ID NO: 145903 - DNA, 15896 bp, Homo sapiens
  Payload ID: 8931
  Gene Symbol: KIAA1109
  Gene Name: KIAA1109
  Uniprot ID: Q2LD37
  ENST ID: ENST00000264501
  CDS Start-End: 374-15391
agtgccgcccggcctcggttgggacccctcccctcctcctccgcccccttgggtgtcggtggctgcggccagggtctggacctgggcggcggccccgggcggcggggctaaagggtgtgggcaccggcagagcttcgcaggctgcatccggctcggtgctgctgccgtcgccgcccctgccgccgcccaaggccctcggcgttccccggagagaggccagagggatttcgggctgcctcggcactcgcccaggtttgttaagatgaaacactgcagaaaggctatctgaagaaaagtagaaggaaaaacagaacgttgcaaactctggaaaaaaacttgggcctttagatgttgttctggaaaaactttagtaatggatcaaaggaagaatgagagtattgttcctagtataactcaattagaagattttcttacagaacacaattccaatgttgtttggctccttgttgctaccattttgtcctgtggatggattatttacctcacatattataattcccggaatgttggtcttattttaacactagttcttaacagattatacaagcatggctatatccatattggttccttctctttctctgttctttctggaaaagtcatggttcgtgaaatctattacattacagaagacatgtctattaggattcaagatggattcatcatttttcggtggtggaaaatgtataacccaaaacagaagcaacatgatccaaaggcagaaaccaggttatacatcacagtcaatgactttgaatttcatgtctataatcgctcggatctttatggacgccttcaagagttgtttggtttggagccaacaataattccacctaagaaagatgatgataaaacacgggaaattggaagaacaagaacccaatcgaaaattgaaagagttaaagtaaaaacagaatcccaagaccccacatcttcatggagatcacttattccagtcataaaggtcaatgtgagcacaggacgtttggcctttggaaatcactaccagccgcaaactctgtgcatcaactttgatgatgctttcttaacttatactacaaaaccaccttcaagtcatcttgaccaattcatgcatattgtgaaaggaaagcttgaaaatgttcgagtcatgcttgttcctagtccaagatatgttggtcttcaaaatgatgaaccaccgagattaatgggagaaggttttgtggtgatgcagtcaaatgatgttgacatctactactacatggatgagccaggacttgttccggaagaaacagaagaaaatattgaaggagaaatgagcagtgaggattgcaaattacaagacttgcctccatgttggggactggatatagtttgtggtaaaggaacagattttaattatggaccatgggccgataggcagagagattgtttgtggaagtttttctttccacctgactatcaagttctgaaagtttctgaaattgcacagcctgggagaccaagacagatccttgcttttgaattacgaatgaatattattgcagatgctacaattgatttgctgtttaccaaaaatagggaaacaaatgctgtacatgtaaatgtaggagctggctcatatttagaaattaatattccaatgacagttgaagaaaatggttacactcctgctattaagggacaactcttacatgtggatgccactaccagcatgcaatatcggacccttttagaagcagaaatgttagcattccacatcaatgccagctacccccgaatatggaacatgccgcagacatggcagtgtgaattagaggtttataaagccacttaccacttcatctttgcacagaaaaacttctttacagatttaattcaagactggtctagtgacagtcctccagacattttttcatttgttccatatacgtggaattttaaaatcatgtttcatcagtttgaaatgatttgggctgctaatcaacacaattggatcgactgttctactaaacaacaggaaaatgtgtatctggcagcctgtggagaaacactaaacattgatttttctttgccttttacggactttgttccagctacatgtaataccaagttctctttaagaggagaagatgttgatcttcatttgtttctaccagactgccaccctagtaaatattctttatttatgctggtaaaaaattgccatccaaataagatgattcatgatactggtattcctgctgagtgtcaaagtggccagaaaacagttaaaccaaaatggcgcaacgttactcaggaaaagtctggttgggttgaatgctggactgtcccaagtgtcatgcttacaattgattatacatggcatccaatttatccacaaaaagcagatgaacagctgaaacaatcattatcagaaatggaagagacaatgctatctgtattaaggccatcccagaagacatcagacagagttgtttcttctccctctacttcttcacgcccacctattgatccctcagaacttccacctgataaacttcatgtagaaatggaactttctccagattctcagataactctctatggacctctactaaatgcctttttgtgtataaaggaaaactactttggggaagatgacatgtatatggattttgaagaggttatctcaagtcctgttttgtcactgtcaacatcatccagctctgggtggactgctgttggaatggaaaatgacaaaaaggaaaatgaaggttcagccaagtcaattcatccacttgccttgcgtccttgggatattactgtacttgttaatttgtacaaagttcatgggcgtcttcctgttcatggaactactgatggtcctgaatgccctacagctttcttggaaagactatgttttgaaatgaaaaaaggatttagggagaccatgctgcaacttatcctgtcacccctgaatgtgtttgtcagtgataactatcagcagcgaccccctgtggatgaagtactcagggaaggtcacatcaatttgtcaggtctccagctgagagcacacgctatgttctcagcagaaggtcttcctttgggaagcgattccttagaatacgcatggttaattgatgtgcaggctggaagtcttacagctaaggtcacagcaccacagctggcatgcctcttggagtggggacagacatttgtttttcatgtggtatgtcgggagtatgaactggaaagaccgaaatcagttataatatgtcagcatggaattgatcgtcggttctgtgaatccaagttgagttgtattcctgggccttgtccaacttcagatgatttgaaatatactatgattcgtttagcagtagatggagccgatatttacattgttgagcatggttgtgctacaaatataaagatgggtgcaattcgagttgcaaactgtaatctccacaatcaatcggttggggaaggaatcagtgctgcaattcaggattttcaagtgagacagtacattgagcaattaaataattgcagaattggacttcagcctgcagtgctacggagggcctattggcttgaagctgggtcagccaatttaggacttattactgttgatattgctttagctgctgaccatcattctaaacatgaggcacaaagacatttcttagaaactcatgatgccagaactaagaggttgtggtttttatggccagatgatatcctgaagaataagaggtgtagaaacaaatgtggttgtctcggtggctgcagattctttggtggcacagtaactggcctagatttcttcaaacttgaagagttgacaccttccagtagctctgcattttcaagcacaagtgcagagtctgatatgtattatggacagtctctgctacagcctggagaatggataattactaaagaaattcccaaaattatagatggtaatgtgaatggcatgaagaggaaagaatgggaaaacaaatcagtgggaatagaagtagagagaaaaactcagcaccttagtcttcaagtaccattacgatctcatagttcatcctcttcctcagaagagaacagtagttctagtgctgcacagcctttgttggctggtgaaaaggaaagtccttcatctgttgctgatgaccatttggttcaaaaagagttcttgcatgggacaaaaagagatgatggccaagcaagtatccctacagaaatttcaggaaacagccctgtgtctcctaatactcaggataagtcagtaggtcaatctcctcttagatctcccttgaaacgacaagcctctgtctgttccacccgtcttggaagtactaagagtcttactgctgctttctatggggacaagcagcctgtaacagttggagtccagtttagtagtgatgtctctcgaagtgatgagaatgtactagactcaccaaagcagaggagaagttttggttcattcccatatacaccatcagcagactctaattcatttcatcagtatcgatcaatggattccagcatgtcaatggctgatagtgaagcctacttttctgctgctgaggaatttgagcccattagcagtgatgaaggccctggaacttatccgggtagaaaaaagaagaaaaagcaaacccagcagattgactacagtaggggttccatatatcacagtgtagaagggccacttactggacatggagaaagcattcaggattccagaactctgccattcaaaactcatccttctcaggcttcatttgtttctgcgttaggtggagaagatgatgttatagaacatctatatattgtagaaggtgagaaaacagtggagagtgaacagattactccgcaacaacccgtgatgaattgttatcagacttaccttactcagttccaggtaattaattggtcagttaagcacccaaccaacaaaagaacctctaaatcctcattgcatcgtccccttgatctggatacaccaaccagtgaagaaagttcatcgtcatttgaacagctttctgttccaacttttaaggttatcaagcaggggctcacagctaattctttgctagacagaggcatgcaactttcaggatcaacttcaaatacgccgtatactccattggaaaaaaaactcgctgataacacagatgatgaaacattaacagaagagtggaccctggatcaaccagtgtcccagaccaggacaacagccatagttgaagtaaaaggaactgttgatattgttttgactcccctggtggctgaagctttagacagatatattgaagcaatggttcattgtgctagtacccgacatccagctgcaattgtagatgatcttcatgctaaagtcctcagggaagctgtccaaaatagcaagactaccttttcagaaaatttatcttccaaacaagacattagaggaacaaaaactgagcagtctacaataggaacgactaaccaaggacaagcacagacaaatcttacaatgaagcaagataatgtaacaattaaaggtcttcagactaatgttagcataccaaaggtaaacttatgtttgttacaagcctcagtggaagaatctccaactacggctcctagtaggagtgtgactcatgtttccctagtggcattgtgttttgacagaattgctacacaggttcgcatgaacagaggtgtggttgaagagacttcaaacaatgcagaacctggtagaacatcaaattttgataggtatgttcatgccacaaagatgcagcctcagtcatctggatctctcagatcaaatgctggagcagaaaaaggcaaagaaattgcagctaagttaaacattcatcgagttcatgggcaacttaggggtcttgatacaacagacattgggacctgtgcaatcactgctattccttttgagaagtccaaagttttatttactcttgaagagttggatgaatttacttttgtggatgaaactgatcagcaagctgttccagatgtaactcgaataggtcccagccaagaaaaatggggatggataatgtttgaatgtggacttgaaaatttaaccataaaaggaggaagacagtctggtgctgttttatataacagttttggaattatgggtaaagctagtgacacagaaaggggtggagtgctgacatccaataattcttctgattctccaaccggcagtggctataatactgatgtctctgatgataatcttccatgtgaccggacaagcccttcctcagacttaaatggaaattctgtttcagatgaacaggatgaaggagtcgaatctgatgatttgaaaaaagatctacctctgatgcctcctcctccagattcatgtagcatgaagttgaccattaaagaaatttggtttagttttgcagctcccaccaatgtgagatctcacacacatgcattttctaggcagctgaaccttttaagcactgcaacaccagctgttggtgcatggcttgttcccattgaccaactcaagtcatctttaaacaaattggaaactgagggaaccttgagaatttgtgctgttatgggatgcataatgacagaagcattagagaataaaagtgtacattttcccctaagaagtaaatacaacaggcttacaaaagttgctcgctttctccaagaaaatccttcatgtttactatgtaatatactacaccactatctgcaccaggcaaattactccatcattgatgatgctacaatgagcgatggacttcctgctttggtaactttgaagaaaggtttagttgcactggcaaggcagtggatgaagtttattgtggtgacaccagcctttaaaggagttagcttacatagaccagctcagcctctgaaacctcaaatagctatggaccatgaacatgaagatggacttggattggacaatgggggtggtcttcaaagtgataccagtgctgatggagcagaatttgagttcgatgcagccacagtcagtgaacacacaatgctattagaaggaacagctaaccggcctccacctggtagctctggacctgtaactggagctgagataatgaggaaactttctaaaactcatacccatagtgactctgcattaaaaataaagggcattcacccatatcattctctgagctataccagtggagacactgccactgattctccagtgcatgttggacgtgctgggatgccagtaaaggacagtccaaggaaggagagcctactcagctacctgactggaagcttcccaagcctgcacaacctcctggaaggtactcctcagagaagcagtgctgctgtgaaaagtagctccctaacgagaacaggaaatacagtagccactgatatgttatctgaacatcccttgctatctgagccatcatctgtgagtttctataattggatgtcaaatgctgtgggtaatcgaggaagtgtgttacaagaatctcctgttacaaaatcaggacacaatagtcttcccacaggtgttgcacccaatcttccaacaataccctcagcctcagatttcaacactgtcttgtctagtgaccaaaatactttggatgggacacattctcagcatagcaccagtcaggatgatgtggcaggtgtagaagaagcaaaccaagggtttcctgctgttcagcttgctgatgcacaggttgttttcaagcctcttctgagtcatacagggatccagtcacaggatacaatgccattctgctaccgaatgtactttggagaacacctttcattttcagggactttggactgcctcagagcagatattgtggattcagacacagccaaagagagaaaaggcaaaagagcaagaaggcaaggccatgtgaatcttcctccacttgagttcaaaccagcattaatgttgggaacctttagcatcagtgctgttgtaatggaaaagtccgtgtgcacccctcagaactctaccagtgccctttcttttcatgatctcagcaagcggtattataacacctttcactgcaactttactatttcctgtcagtcaataagccagcatgtagatatggctttggttcgtcttattcatcagtttagcacaatgatagatgacatcaaagcaactcagactgatattaaacttagcagatatacagccggatctgcttccccaacacctaccttcaaaaccagaaaacatcgggactttcgttcatctgactttagccgcagttctagaggaagtcttaatggtggcaatagagtaaataatgcaaagaacaaacggaccaacaatgagaataacaaaaaggaatctcgaaacaagaattcattaggaagatctgaaagaagaacatcaaaagtgtctaggaaaggttcaaaagatgtggtggatcacatgactattcatatggatgactctgattcaattacagtgtcagaacaaagtgagccttcagctgagtgctggcagaatatgtataaattgcttaacttctattcacttatctccgatccaacaggaatattggaaaagtcttcagaaacatttggaccagcaggagttcggagccctacagagccaacatgtaaagttgtgtttgagaatgaacaagacaacagcagtttgactaagactcagaggaaacgtagcttggtaacttctgaacctcagcatgttactctaatagtgtttgggattggcatggtgaaccgcacacacctagaggcagatattggtggactaacaatggaatcagaactgaagaggatccatggcagttttactcttaaggaaaaaatgaaagatgttttacatcaaaagatgactgagacttgtgctactgctcatattggtggggttaatattgtgctgcttgaagggattacaccaaatatacaactggaggattttcctacatctcctacaagtacagccaaacaagagtttctaactgtagtgaaatgtagtattgccaagtcccaagccctctacagtgcccaaagagggctgaagacaaacaatgctgctgtgttcaaagtaggagctatcagtatcaacattcctcagcaccctgccaccttacatagcatgatggttcgaagttctcaccaactatctaaacaaatctcagacctaatcagacagccttctacagccccacagcctgtaaaagaagatattgcaaccccactaccttctgaaaaaaccccaacaagtgttaatcaaactcctgttgaaacaaatgaatttcctcagctaccagaaggcttagaaaagaagcctattgttcttaaattcagtgccatgttagatggtatagccattggagcagcacttttaccatctctgaaagcagaatacaagatgggaagaatgagaagtcatggaatgacaggtgcacagacaagatttacatttgagctgccaaatcacagattgcgttttacttcaaaagtttctgccacagatatgtcaaccattcctccttctgccagtcttaaccttccccctgttaccatgtcagggaaatatataatggaagaacatgatagttattcggatcaggtgtggagtatagatgaactgccttctaaacaaggttactatttacagggaaattatctgcgttgtgtggcagaagttggttcctttgaacataatcttacaactgatcttctaaaccacttggtatttgtacagaaagtgttcatgaaggaagttaatgaagtaatacaaaaagtttctggtggggagcagcctattcctctctggaacgaacatgatggaacagcagatggagataaacctaaaattctcctctattccctaaacttgcagttcaagggtattcaagtaacggccactactccatcaatgagagctgtaagatttgaaactggattgattgaactggaactttctaaccgacttcaaaccaaagcttcaccaggaagtagcagctatctgaaactgtttggcaaatgccaggtggatttaaatctggcattaggacaaattgtcaaacatcaggtttatgaggaagctggttctgattttcatcaagttgcctattttaaaaccagaattggattaagaaatgccctccgagaagaaatcagtggttcttcagatagggaagctgtgcttattactttgaatagaccaattgtttatgcacagcctgtggcctttgatagagctgtgctgttttggctgaattataaggccgcctatgacaactggaatgaacaacgaatggctttacataaggatattcatatggctacaaaggaagtagtagatatgctacctggtatccagcaaacatcagcccaggcctttgggactctttttctccagctcactgtcaatgatctgggaatttgcctacctatcacaaatactgcacagtctaatcatactggagaccttgacactggttctgctttggtattaaccattgaaagtactctcatcactgcatgctcttcagagtctctggttagcaaagggcatttcaaaaacttttgtatccgttttgctgatggatttgagacatcatgggatgactggaaaccagaaattcatggggatttagtgatgaatgcctgtgtagttccagatggcacctatgaagtatgttcaagaactacaggacaagcagcagctgaaagcagtagtgctggaacctggacactcaacgtattgtggaaaatgtgtgggattgatgttcacatggatcctaacattggcaaaaggcttaatgctctgggcaatactcttacaacactgacaggagaggaagacatagatgacattgctgacttaaattcagtgaacatagctgacctgtcagatgaggatgaagttgatactatgtctcccactatccatactgaagccacagattatcgaagacaggcagcatctgctagccagccgggagaacttagaggaagaaaaattatgaagcgtatagtggatatcagagaactgaatgaacaggccaaagtaatagatgatctgaaaaaattaggtgcaagtgaaggaaccataaaccaggaaattcaacgttaccaacagttagaatctgtggctgtgaatgacattagaagagatgttcgtaaaaaattacggaggtccagtatgcgggctgcttccctaaaggataagtggggtttgagttacaaaccaagttacagccgatcaaaaagcatttctgcttctggaagaccacctcttaagcgaatggaaagggcaagttctcgagtaggagaaactgaagagctcccagaaatccgtgtggatgcagcatctcctggacctagagtaacttttaatatccaggatacatttccagaggagacagaactggaccttttgtcagtaaccattgaaggtccatcccattattcatcaaatagtgaaggatcatgttctgtgttcagttctcccaaaactccaggaggcttttcaccaggcattcctttccaaactgaagagggccgacgggatgacagtttgtcttctaccagtgaagattccgagaaggatgaaaaagatgaagaccatgagagggaaaggttttatatttacaggaaaccctcacatacgtctcgtaaaaaagcaacaggctttgctgctgttcatcagctatttacagaacgctggccaacaacaccagtcaatagaagtcttagtggcacagctacagagagaaatattgactttgaacttgatatacgggttgaaattgatagtggaaaatgtgtactccacccaaccacccttctacaagaacatgatgatataagtttgagaaggagttatgatcgaagttccaggagcttagatcaagattcaccttcaaaaaagaagaagtttcaaactaattatgcttctaccacccatttaatgaccggcaagaaagtgccatcatctctacagacaaagcctagtgacttagaaacaacagtattttacattcccggagttgatgtaaagttgcattacaattccaagacgctaaagactgaatcacctaatgcctccaggggatcttccttgccaagaacactgtccaaagagtccaagctgtatggtatgaaagatagtgcaacatctcctccttctcctcctttaccttccactgtccagagcaagactaacaccttacttcctccccagcccccacctattcctgcagccaaaggaaaaggaagtggaggagtaaaaacagccaagttatatgcctgggtagcacttcagtcattgccagaagaaatggttattagtccctgcctattagactttctggaaaaagctctggaaactatcccaattacaccagttgaaaggaattatacagctgtcagctcacaagatgaagatatgggacattttgaaataccagatcctatggaagaatcaacaacatcactagtgtcgtcttcaacatctgcttactcttccttccctgtagatgttgtggtttatgtacgagttcagccctcacagatcaaatttagctgtttaccagtatcaagagtagaatgcatgttaaagctgccatccctggatttggtgttttcttcaaaccgaggagaactggagactttagggactacatatcctgcagagactttatcccctggaggtaatgctactcagagtggaacaaagacttctgctagcaaaactggaataccaggttcatcgggattaggcagccctcttggccgaagtcgacatagtagtagtcagtcagacctgaccagttccagcagtagttcatctggcttgagcttcactgcatgcatgtctgacttttccctttatgtatttcatccatatggagcagggaaacaaaaaactgctgtttctggcctcacacctggatcaggaggattagggaatgtggatgaggagcccacttcagtcactggtcgaaaagattcactcagtataaaccttgagtttgtaaaagtgagtttgtcacggatcaggcgttcaggaggtgcctcattttttgaaagtcagtctgtaagcaagtctgcaagcaaaatggatactacgttaataaatatatctgctgtttgtgatatagggtctgcctcctttaaatatgatatgcgccgactcagtgaaattctggcatttccaagagcatggtatagaagaagtattgcaagacgtctattccttggagaccaaactataaatttgccaacatctggcccagggacacctgattccattgaaggggtaagccaacacctttcccctgaatcatcaagaaaagcttactgcaagacctgggagcagccaagtcagtcagcctccttcacccacatgcctcagtcacctaatgtgttcaatgagcatatgacaaacagcaccatgtcaccagggacagtaggacagagcctaaaatccccagcttccataagatcaaggagtgtatctgattcttcagttcctcgaagagattcactttcaaaaacatcaactccttttaacaaatcaaacaaagcagcaagccaacaagggaccccatgggaaacacttgtcgtgtttgctatcaacttgaagcaattaaacgttcaaatgaatatgagtaatgtaatgggaaatacaacttggacaactagtggtttgaagagccagggccgtctgtcagtaggaagtaatcgtgatcgagagatcagcatgtctgttggtctgggaagatcacaattagattctaaaggaggagtagttggagggaccatagatgtcaatgctttggagatggttgctcatatttctgaacatccaaatcagcaacccagtcacaaaattcagattactatgggttctactgaagctcgtgttgattacatgggctcaagtatcctcatgggcatcttcagtaatgctgatcttaagcttcaggatgaatggaaagtaaacttgtataatacattggattcaagcataactgataaaagtgagattttcgtccatggagatttgaagtgggatattttccaagtaatgatatcaaggtcaaccacaccagatctgataaaaataggaatgaagctccaggaatttttcacacaacaatttgataccagcaaacgagctctgtctacctggggaccagttccttaccttccgccaaagacaatgactagcaacctagaaaaaagttcacaagaacaattacttgatgcagcacatcatcgacactggcctggagtattgaaggtggtatcaggatgccacatatccttatttcagattccattaccagaagatggaatgcaatttggaggatcaatgagcttacatggaaatcatatgacactggcatgttttcatggtccaaattttcgttcaaaatcttgggccctttttcatttagaagaaccaaatattgctttttggactgaagctcagaaaatctgggaagatggctccagtgatcattctacatatattgtacaaacactagattttcacctgggtcataatactatggttaccaaaccatgtggtgctttggaaagtcctatggcaacaataaccaagataacaaggcgtcgccatgaaaatccaccccatggagtagcaagtgtgaaagaatggttcaattatgttacagctacaaggaatgaagagctaaatctgcttcgtaatgttgatgctaacaacactgagaatagcactactgtgaagaattctagtttgttgagtggattcagaggaggttctagctacaaccatgaaacagagactatctttgcattaccaaggatgcagcttgactttaaatccattcatgttcaagaaccacaggagccttcattacaggatgccagcctgaagccaaaagtagaatgtagtgtggtgacagagttcactgaccacatttgtgtgactatggatgctgagctcatcatgtttcttcatgatttagtatcagcttatcttaaagaaaaagaaaaagccatctttccacctcggattttatctactcgaccaggacaaaaaagtccaattattatacatgacgacaattcctctgataaagatagagaagatagcatcacttatactactgtggactggagagattttatgtgcaatacatggcatctagaacctactcttagattaatttcttggactggaagaaagattgatccagtaggtgttgattatattcttcaaaaattgggctttcatcatgctaggactactattcctaaatggcttcaaagaggagtcatggatccactggacaaggttctgtcagttcttatcaaaaagctcggtactgcactacaggatgaaaaggaaaagaaaggcaaagacaaagaagaacactaaaaaagtaatttgatctgtgaacaaattatgattgtgtctgttttattacactggagtgtttttttagtataataatttgaaatataactttaaaataattctaaatttgtggctataattaaaagtttgtaagttaacctgttctagttccatcattctgtgtacagtgaagtattgcatgataatgtaaattttgtgaaaaactagattaaaatatataactgcttgttatggtttataattatataatgtgcaatacaattcctgcatctttaaaatgtctgcagaataactgtgaatttttttgttattggattggccgtaacttttagaaaaaaatcttgttgatgataatgtgattttggggaggtcattaattgctttttcttttttaaatgtagacttatataaatacctgtttgtatatagcttgagtaattgtgatatgattgtataccactaaaatattgttaactattataataaagtcacagtaatggtttaa

SEQ ID NO: 145904 - DNA, 4650 bp, Homo sapiens
  Payload ID: 8931
  Gene Symbol: KIAA1109
  Gene Name: KIAA1109
  ENST ID: ENST00000306802
  CDS Start-End: 1-4145
aaccaagttacagccgatcaaaaagcatttctgcttctggaagaccacctcttaagcgaatggaaagggcaagttctcgagtaggagaaactgaagagctcccagaaatccgtgtggatgcagcatctcctggacctagagtaacttttaatatccaggatacattgaaaaatacagtatggggaagtacaccacaatccagctgtcctggggaagggtattttcagtttccagaggagacagaactggaccttttgtcagtaaccattgaaggtccatcccattattcatcaaatagtgaaggatcatgttctgtgttcagttctcccaaaactccaggaggcttttcaccaggcattcctttccaaactgaagagggccgacgggatgacagtttgtcttctaccagtgaagattccgagaaggatgaaaaagatgaagaccatgagagggaaaggttttatatttacaggaaaccctcacatacgtctcgtaaaaaagcaacaggctttgctgctgttcatcagctatttacagaacgctggccaacaacaccagtcaatagaagtcttagtggcacagctacagagagaaatattgactttgaacttgatatacgggttgaaattgatagtggaaaatgtgtactccacccaaccacccttctacaagaacatgatgatataagtttgagaaggagttatgatcgaagttccaggagcttagatcaagattcaccttcaaaaaagaagaagtttcaaactaattatgcttctaccacccatttaatgaccggcaagaaagtgccatcatctctacagacaaagcctagtgacttagaaacaacagtattttacattcccggagttgatgtaaagttgcattacaattccaagacgctaaagactgaatcacctaatgcctccaggggatcttccttgccaagaacactgtccaaagagtccaagctgtatgccaaaggaaaaggaagtggaggagtaaaaacagccaagttatatgcctgggtagcacttcagtcattgccagaagaaatggttattagtccctgcctattagactttctggaaaaagctctggaaactatcccaattacaccagttgaaaggaattatacagctgtcagctcacaagatgaagatatgggacattttgaaataccagatcctatggaagaatcaacaacatcactagtgtcgtcttcaacatctgcttactcttccttccctgtagatgttgtggtttatgtacgagttcagccctcacagatcaaatttagctgtttaccagtatcaagagtagaatgcatgttaaagctgccatccctggatttggtgttttcttcaaaccgaggagaactggagactttagggactacatatcctgcagagactttatcccctggaggtaatgctactcagagtggaacaaagacttctgctagcaaaactggaataccaggttcatcgggattaggcagccctcttggccgaagtcgacatagtagtagtcagtcagacctgaccagttccagcagtagttcatctggcttgagcttcactgcatgcatgtctgacttttccctttatgtatttcatccatatggagcagggaaacaaaaaactgctgtttctggcctcacacctggatcaggaggattagggaatgtggatgaggagcccacttcagtcactggtcgaaaagattcactcagtataaaccttgagtttgtaaaagtgagtttgtcacggatcaggcgttcaggaggtgcctcattttttgaaagtcagtctgtaagcaagtctgcaagcaaaatggatactacgttaataaatatatctgctgtttgtgatatagggtctgcctcctttaaatatgatatgcgccgactcagtgaaattctggcatttccaagagcatggtatagaagaagtattgcaagacgtctattccttggagaccaaactataaatttgccaacatctggcccagggacacctgattccattgaaggggtaagccaacacctttcccctgaatcatcaagaaaagcttactgcaagacctgggagcagccaagtcagtcagcctccttcacccacatgcctcagtcacctaatgtgttcaatgagcatatgacaaacagcaccatgtcaccagggacagtaggacagagcctaaaatccccagcttccataagatcaaggagtgtatctgattcttcagttcctcgaagagattcactttcaaaaacatcaactccttttaacaaatcaaacaaagcagcaagccaacaagggaccccatgggaaacacttgtcgtgtttgctatcaacttgaagcaattaaacgttcaaatgaatatgagtaatgtaatgggaaatacaacttggacaactagtggtttgaagagccagggccgtctgtcagtaggaagtaatcgtgatcgagagatcagcatgtctgttggtctgggaagatcacaattagattctaaaggaggagtagttggagggaccatagatgtcaatgctttggagatggttgctcatatttctgaacatccaaatcagcaacccagtcacaaaattcagattactatgggttctactgaagctcgtgttgattacatgggctcaagtatcctcatgggcatcttcagtaatgctgatcttaagcttcaggatgaatggaaagtaaacttgtataatacattggattcaagcataactgataaaagtgagattttcgtccatggagatttgaagtgggatattttccaagtaatgatatcaaggtcaaccacaccagatctgataaaaataggaatgaagctccaggaatttttcacacaacaatttgataccagcaaacgagctctgtctacctggggaccagttccttaccttccgccaaagacaatgactagcaacctagaaaaaagttcacaagaacaattacttgatgcagcacatcatcgacactggcctggagtattgaaggtggtatcaggatgccacatatccttatttcagattccattaccagaagatggaatgcaatttggaggatcaatgagcttacatggaaatcatatgacactggcatgttttcatggtccaaattttcgttcaaaatcttgggccctttttcatttagaagaaccaaatattgctttttggactgaagctcagaaaatctgggaagatggctccagtgatcattctacatatattgtacaaacactagattttcacctgggtcataatactatggttaccaaaccatgtggtgctttggaaagtcctatggcaacaataaccaagataacaaggcgtcgccatgaaaatccaccccatggagtagcaagtgtgaaagaatggttcaattatgttacagctacaaggaatgaagagctaaatctgcttcgtaatgttgatgctaacaacactgagaatagcactactgtgaagaattctagtttgttgagtggattcagaggaggttctagctacaaccatgaaacagagactatctttgcattaccaaggatgcagcttgactttaaatccattcatgttcaagaaccacaggagccttcattacaggatgccagcctgaagccaaaagtagaatgtagtgtggtgacagagttcactgaccacatttgtgtgactatggatgctgagctcatcatgtttcttcatgatttagtatcagcttatcttaaagaaaaagaaaaagccatctttccacctcggattttatctactcgaccaggacaaaaaagtccaattattatacatgacgacaattcctctgataaagatagagaagatagcatcacttatactactgtggactggagagattttatgtgcaatacatggcatctagaacctactcttagattaatttcttggactggaagaaagattgatccagtaggtgttgattatattcttcaaaaattgggctttcatcatgctaggactactattcctaaatggcttcaaagaggagtcatggatccactggacaaggttctgtcagttcttatcaaaaagctcggtactgcactacaggatgaaaaggaaaagaaaggcaaagacaaagaagaacactaaaaaagtaatttgatctgtgaacaaattatgattgtgtctgttttattacactggagtgtttttttagtataataatttgaaatataactttaaaataattctaaatttgtggctataattaaaagtttgtaagttaacctgttctagttccatcattctgtgtacagtgaagtattgcatgataatgtaaattttgtgaaaaactagattaaaatatataactgcttgttatggtttataattatataatgtgcaatacaattcctgcatctttaaaatgtctgcagaataactgtgaatttttttgttattggattggccgtaacttttagaaaaaaatcttgttgatgataatgtgattttggggaggtcattaattgctttttcttttttaaatgtagacttatataaatacctgtttgtatatagcttgagtaattgtgatatgattgtataccactaaaatattgttaactattataataaagtcacagtaatggtttaa

SEQ ID NO: 145905 - DNA, 15574 bp, Homo sapiens
  Payload ID: 8931
  Gene Symbol: KIAA1109
  Gene Name: KIAA1109
  Uniprot ID: Q2LD37
  ENST ID: ENST00000388738
  CDS Start-End: 46-15063
gaaatcttttaggcctttagatgttgttctggaaaaactttagtaatggatcaaaggaagaatgagagtattgttcctagtataactcaattagaagattttcttacagaacacaattccaatgttgtttggctccttgttgctaccattttgtcctgtggatggattatttacctcacatattataattcccggaatgttggtcttattttaacactagttcttaacagattatacaagcatggctatatccatattggttccttctctttctctgttctttctggaaaagtcatggttcgtgaaatctattacattacagaagacatgtctattaggattcaagatggattcatcatttttcggtggtggaaaatgtataacccaaaacagaagcaacatgatccaaaggcagaaaccaggttatacatcacagtcaatgactttgaatttcatgtctataatcgctcggatctttatggacgccttcaagagttgtttggtttggagccaacaataattccacctaagaaagatgatgataaaacacgggaaattggaagaacaagaacccaatcgaaaattgaaagagttaaagtaaaaacagaatcccaagaccccacatcttcatggagatcacttattccagtcataaaggtcaatgtgagcacaggacgtttggcctttggaaatcactaccagccgcaaactctgtgcatcaactttgatgatgctttcttaacttatactacaaaaccaccttcaagtcatcttgaccaattcatgcatattgtgaaaggaaagcttgaaaatgttcgagtcatgcttgttcctagtccaagatatgttggtcttcaaaatgatgaaccaccgagattaatgggagaaggttttgtggtgatgcagtcaaatgatgttgacatctactactacatggatgagccaggacttgttccggaagaaacagaagaaaatattgaaggagaaatgagcagtgaggattgcaaattacaagacttgcctccatgttggggactggatatagtttgtggtaaaggaacagattttaattatggaccatgggccgataggcagagagattgtttgtggaagtttttctttccacctgactatcaagttctgaaagtttctgaaattgcacagcctgggagaccaagacagatccttgcttttgaattacgaatgaatattattgcagatgctacaattgatttgctgtttaccaaaaatagggaaacaaatgctgtacatgtaaatgtaggagctggctcatatttagaaattaatattccaatgacagttgaagaaaatggttacactcctgctattaagggacaactcttacatgtggatgccactaccagcatgcaatatcggacccttttagaagcagaaatgttagcattccacatcaatgccagctacccccgaatatggaacatgccgcagacatggcagtgtgaattagaggtttataaagccacttaccacttcatctttgcacagaaaaacttctttacagatttaattcaagactggtctagtgacagtcctccagacattttttcatttgttccatatacgtggaattttaaaatcatgtttcatcagtttgaaatgatttgggctgctaatcaacacaattggatcgactgttctactaaacaacaggaaaatgtgtatctggcagcctgtggagaaacactaaacattgatttttctttgccttttacggactttgttccagctacatgtaataccaagttctctttaagaggagaagatgttgatcttcatttgtttctaccagactgccaccctagtaaatattctttatttatgctggtaaaaaattgccatccaaataagatgattcatgatactggtattcctgctgagtgtcaaagtggccagaaaacagttaaaccaaaatggcgcaacgttactcaggaaaagtctggttgggttgaatgctggactgtcccaagtgtcatgcttacaattgattatacatggcatccaatttatccacaaaaagcagatgaacagctgaaacaatcattatcagaaatggaagagacaatgctatctgtattaaggccatcccagaagacatcagacagagttgtttcttctccctctacttcttcacgcccacctattgatccctcagaacttccacctgataaacttcatgtagaaatggaactttctccagattctcagataactctctatggacctctactaaatgcctttttgtgtataaaggaaaactactttggggaagatgacatgtatatggattttgaagaggttatctcaagtcctgttttgtcactgtcaacatcatccagctctgggtggactgctgttggaatggaaaatgacaaaaaggaaaatgaaggttcagccaagtcaattcatccacttgccttgcgtccttgggatattactgtacttgttaatttgtacaaagttcatgggcgtcttcctgttcatggaactactgatggtcctgaatgccctacagctttcttggaaagactatgttttgaaatgaaaaaaggatttagggagaccatgctgcaacttatcctgtcacccctgaatgtgtttgtcagtgataactatcagcagcgaccccctgtggatgaagtactcagggaaggtcacatcaatttgtcaggtctccagctgagagcacacgctatgttctcagcagaaggtcttcctttgggaagcgattccttagaatacgcatggttaattgatgtgcaggctggaagtcttacagctaaggtcacagcaccacagctggcatgcctcttggagtggggacagacatttgtttttcatgtggtatgtcgggagtatgaactggaaagaccgaaatcagttataatatgtcagcatggaattgatcgtcggttctgtgaatccaagttgagttgtattcctgggccttgtccaacttcagatgatttgaaatatactatgattcgtttagcagtagatggagccgatatttacattgttgagcatggttgtgctacaaatataaagatgggtgcaattcgagttgcaaactgtaatctccacaatcaatcggttggggaaggaatcagtgctgcaattcaggattttcaagtgagacagtacattgagcaattaaataattgcagaattggacttcagcctgcagtgctacggagggcctattggcttgaagctgggtcagccaatttaggacttattactgttgatattgctttagctgctgaccatcattctaaacatgaggcacaaagacatttcttagaaactcatgatgccagaactaagaggttgtggtttttatggccagatgatatcctgaagaataagaggtgtagaaacaaatgtggttgtctcggtggctgcagattctttggtggcacagtaactggcctagatttcttcaaacttgaagagttgacaccttccagtagctctgcattttcaagcacaagtgcagagtctgatatgtattatggacagtctctgctacagcctggagaatggataattactaaagaaattcccaaaattatagatggtaatgtgaatggcatgaagaggaaagaatgggaaaacaaatcagtgggaatagaagtagagagaaaaactcagcaccttagtcttcaagtaccattacgatctcatagttcatcctcttcctcagaagagaacagtagttctagtgctgcacagcctttgttggctggtgaaaaggaaagtccttcatctgttgctgatgaccatttggttcaaaaagagttcttgcatgggacaaaaagagatgatggccaagcaagtatccctacagaaatttcaggaaacagccctgtgtctcctaatactcaggataagtcagtaggtcaatctcctcttagatctcccttgaaacgacaagcctctgtctgttccacccgtcttggaagtactaagagtcttactgctgctttctatggggacaagcagcctgtaacagttggagtccagtttagtagtgatgtctctcgaagtgatgagaatgtactagactcaccaaagcagaggagaagttttggttcattcccatatacaccatcagcagactctaattcatttcatcagtatcgatcaatggattccagcatgtcaatggctgatagtgaagcctacttttctgctgctgaggaatttgagcccattagcagtgatgaaggccctggaacttatccgggtagaaaaaagaagaaaaagcaaacccagcagattgactacagtaggggttccatatatcacagtgtagaagggccacttactggacatggagaaagcattcaggattccagaactctgccattcaaaactcatccttctcaggcttcatttgtttctgcgttaggtggagaagatgatgttatagaacatctatatattgtagaaggtgagaaaacagtggagagtgaacagattactccgcaacaacccgtgatgaattgttatcagacttaccttactcagttccaggtaattaattggtcagttaagcacccaaccaacaaaagaacctctaaatcctcattgcatcgtccccttgatctggatacaccaaccagtgaagaaagttcatcgtcatttgaacagctttctgttccaacttttaaggttatcaagcaggggctcacagctaattctttgctagacagaggcatgcaactttcaggatcaacttcaaatacgccgtatactccattggaaaaaaaactcgctgataacacagatgatgaaacattaacagaagagtggaccctggatcaaccagtgtcccagaccaggacaacagccatagttgaagtaaaaggaactgttgatattgttttgactcccctggtggctgaagctttagacagatatattgaagcaatggttcattgtgctagtacccgacatccagctgcaattgtagatgatcttcatgctaaagtcctcagggaagctgtccaaaatagcaagactaccttttcagaaaatttatcttccaaacaagacattagaggaacaaaaactgagcagtctacaataggaacgactaaccaaggacaagcacagacaaatcttacaatgaagcaagataatgtaacaattaaaggtcttcagactaatgttagcataccaaaggtaaacttatgtttgttacaagcctcagtggaagaatctccaactacggctcctagtaggagtgtgactcatgtttccctagtggcattgtgttttgacagaattgctacacaggttcgcatgaacagaggtgtggttgaagagacttcaaacaatgcagaacctggtagaacatcaaattttgataggtatgttcatgccacaaagatgcagcctcagtcatctggatctctcagatcaaatgctggagcagaaaaaggcaaagaaattgcagctaagttaaacattcatcgagttcatgggcaacttaggggtcttgatacaacagacattgggacctgtgcaatcactgctattccttttgagaagtccaaagttttatttactcttgaagagttggatgaatttacttttgtggatgaaactgatcagcaagctgttccagatgtaactcgaataggtcccagccaagaaaaatggggatggataatgtttgaatgtggacttgaaaatttaaccataaaaggaggaagacagtctggtgctgttttatataacagttttggaattatgggtaaagctagtgacacagaaaggggtggagtgctgacatccaataattcttctgattctccaaccggcagtggctataatactgatgtctctgatgataatcttccatgtgaccggacaagcccttcctcagacttaaatggaaattctgtttcagatgaacaggatgaaggagtcgaatctgatgatttgaaaaaagatctacctctgatgcctcctcctccagattcatgtagcatgaagttgaccattaaagaaatttggtttagttttgcagctcccaccaatgtgagatctcacacacatgcattttctaggcagctgaaccttttaagcactgcaacaccagctgttggtgcatggcttgttcccattgaccaactcaagtcatctttaaacaaattggaaactgagggaaccttgagaatttgtgctgttatgggatgcataatgacagaagcattagagaataaaagtgtacattttcccctaagaagtaaatacaacaggcttacaaaagttgctcgctttctccaagaaaatccttcatgtttactatgtaatatactacaccactatctgcaccaggcaaattactccatcattgatgatgctacaatgagcgatggacttcctgctttggtaactttgaagaaaggtttagttgcactggcaaggcagtggatgaagtttattgtggtgacaccagcctttaaaggagttagcttacatagaccagctcagcctctgaaacctcaaatagctatggaccatgaacatgaagatggacttggattggacaatgggggtggtcttcaaagtgataccagtgctgatggagcagaatttgagttcgatgcagccacagtcagtgaacacacaatgctattagaaggaacagctaaccggcctccacctggtagctctggacctgtaactggagctgagataatgaggaaactttctaaaactcatacccatagtgactctgcattaaaaataaagggcattcacccatatcattctctgagctataccagtggagacactgccactgattctccagtgcatgttggacgtgctgggatgccagtaaaggacagtccaaggaaggagagcctactcagctacctgactggaagcttcccaagcctgcacaacctcctggaaggtactcctcagagaagcagtgctgctgtgaaaagtagctccctaacgagaacaggaaatacagtagccactgatatgttatctgaacatcccttgctatctgagccatcatctgtgagtttctataattggatgtcaaatgctgtgggtaatcgaggaagtgtgttacaagaatctcctgttacaaaatcaggacacaatagtcttcccacaggtgttgcacccaatcttccaacaataccctcagcctcagatttcaacactgtcttgtctagtgaccaaaatactttggatgggacacattctcagcatagcaccagtcaggatgatgtggcaggtgtagaagaagcaaaccaagggtttcctgctgttcagcttgctgatgcacaggttgttttcaagcctcttctgagtcatacagggatccagtcacaggatacaatgccattctgctaccgaatgtactttggagaacacctttcattttcagggactttggactgcctcagagcagatattgtggattcagacacagccaaagagagaaaaggcaaaagagcaagaaggcaaggccatgtgaatcttcctccacttgagttcaaaccagcattaatgttgggaacctttagcatcagtgctgttgtaatggaaaagtccgtgtgcacccctcagaactctaccagtgccctttcttttcatgatctcagcaagcggtattataacacctttcactgcaactttactatttcctgtcagtcaataagccagcatgtagatatggctttggttcgtcttattcatcagtttagcacaatgatagatgacatcaaagcaactcagactgatattaaacttagcagatatacagccggatctgcttccccaacacctaccttcaaaaccagaaaacatcgggactttcgttcatctgactttagccgcagttctagaggaagtcttaatggtggcaatagagtaaataatgcaaagaacaaacggaccaacaatgagaataacaaaaaggaatctcgaaacaagaattcattaggaagatctgaaagaagaacatcaaaagtgtctaggaaaggttcaaaagatgtggtggatcacatgactattcatatggatgactctgattcaattacagtgtcagaacaaagtgagccttcagctgagtgctggcagaatatgtataaattgcttaacttctattcacttatctccgatccaacaggaatattggaaaagtcttcagaaacatttggaccagcaggagttcggagccctacagagccaacatgtaaagttgtgtttgagaatgaacaagacaacagcagtttgactaagactcagaggaaacgtagcttggtaacttctgaacctcagcatgttactctaatagtgtttgggattggcatggtgaaccgcacacacctagaggcagatattggtggactaacaatggaatcagaactgaagaggatccatggcagttttactcttaaggaaaaaatgaaagatgttttacatcaaaagatgactgagacttgtgctactgctcatattggtggggttaatattgtgctgcttgaagggattacaccaaatatacaactggaggattttcctacatctcctacaagtacagccaaacaagagtttctaactgtagtgaaatgtagtattgccaagtcccaagccctctacagtgcccaaagagggctgaagacaaacaatgctgctgtgttcaaagtaggagctatcagtatcaacattcctcagcaccctgccaccttacatagcatgatggttcgaagttctcaccaactatctaaacaaatctcagacctaatcagacagccttctacagccccacagcctgtaaaagaagatattgcaaccccactaccttctgaaaaaaccccaacaagtgttaatcaaactcctgttgaaacaaatgaatttcctcagctaccagaaggcttagaaaagaagcctattgttcttaaattcagtgccatgttagatggtatagccattggagcagcacttttaccatctctgaaagcagaatacaagatgggaagaatgagaagtcatggaatgacaggtgcacagacaagatttacatttgagctgccaaatcacagattgcgttttacttcaaaagtttctgccacagatatgtcaaccattcctccttctgccagtcttaaccttccccctgttaccatgtcagggaaatatataatggaagaacatgatagttattcggatcaggtgtggagtatagatgaactgccttctaaacaaggttactatttacagggaaattatctgcgttgtgtggcagaagttggttcctttgaacataatcttacaactgatcttctaaaccacttggtatttgtacagaaagtgttcatgaaggaagttaatgaagtaatacaaaaagtttctggtggggagcagcctattcctctctggaacgaacatgatggaacagcagatggagataaacctaaaattctcctctattccctaaacttgcagttcaagggtattcaagtaacggccactactccatcaatgagagctgtaagatttgaaactggattgattgaactggaactttctaaccgacttcaaaccaaagcttcaccaggaagtagcagctatctgaaactgtttggcaaatgccaggtggatttaaatctggcattaggacaaattgtcaaacatcaggtttatgaggaagctggttctgattttcatcaagttgcctattttaaaaccagaattggattaagaaatgccctccgagaagaaatcagtggttcttcagatagggaagctgtgcttattactttgaatagaccaattgtttatgcacagcctgtggcctttgatagagctgtgctgttttggctgaattataaggccgcctatgacaactggaatgaacaacgaatggctttacataaggatattcatatggctacaaaggaagtagtagatatgctacctggtatccagcaaacatcagcccaggcctttgggactctttttctccagctcactgtcaatgatctgggaatttgcctacctatcacaaatactgcacagtctaatcatactggagaccttgacactggttctgctttggtattaaccattgaaagtactctcatcactgcatgctcttcagagtctctggttagcaaagggcatttcaaaaacttttgtatccgttttgctgatggatttgagacatcatgggatgactggaaaccagaaattcatggggatttagtgatgaatgcctgtgtagttccagatggcacctatgaagtatgttcaagaactacaggacaagcagcagctgaaagcagtagtgctggaacctggacactcaacgtattgtggaaaatgtgtgggattgatgttcacatggatcctaacattggcaaaaggcttaatgctctgggcaatactcttacaacactgacaggagaggaagacatagatgacattgctgacttaaattcagtgaacatagctgacctgtcagatgaggatgaagttgatactatgtctcccactatccatactgaagccacagattatcgaagacaggcagcatctgctagccagccgggagaacttagaggaagaaaaattatgaagcgtatagtggatatcagagaactgaatgaacaggccaaagtaatagatgatctgaaaaaattaggtgcaagtgaaggaaccataaaccaggaaattcaacgttaccaacagttagaatctgtggctgtgaatgacattagaagagatgttcgtaaaaaattacggaggtccagtatgcgggctgcttccctaaaggataagtggggtttgagttacaaaccaagttacagccgatcaaaaagcatttctgcttctggaagaccacctcttaagcgaatggaaagggcaagttctcgagtaggagaaactgaagagctcccagaaatccgtgtggatgcagcatctcctggacctagagtaacttttaatatccaggatacatttccagaggagacagaactggaccttttgtcagtaaccattgaaggtccatcccattattcatcaaatagtgaaggatcatgttctgtgttcagttctcccaaaactccaggaggcttttcaccaggcattcctttccaaactgaagagggccgacgggatgacagtttgtcttctaccagtgaagattccgagaaggatgaaaaagatgaagaccatgagagggaaaggttttatatttacaggaaaccctcacatacgtctcgtaaaaaagcaacaggctttgctgctgttcatcagctatttacagaacgctggccaacaacaccagtcaatagaagtcttagtggcacagctacagagagaaatattgactttgaacttgatatacgggttgaaattgatagtggaaaatgtgtactccacccaaccacccttctacaagaacatgatgatataagtttgagaaggagttatgatcgaagttccaggagcttagatcaagattcaccttcaaaaaagaagaagtttcaaactaattatgcttctaccacccatttaatgaccggcaagaaagtgccatcatctctacagacaaagcctagtgacttagaaacaacagtattttacattcccggagttgatgtaaagttgcattacaattccaagacgctaaagactgaatcacctaatgcctccaggggatcttccttgccaagaacactgtccaaagagtccaagctgtatggtatgaaagatagtgcaacatctcctccttctcctcctttaccttccactgtccagagcaagactaacaccttacttcctccccagcccccacctattcctgcagccaaaggaaaaggaagtggaggagtaaaaacagccaagttatatgcctgggtagcacttcagtcattgccagaagaaatggttattagtccctgcctattagactttctggaaaaagctctggaaactatcccaattacaccagttgaaaggaattatacagctgtcagctcacaagatgaagatatgggacattttgaaataccagatcctatggaagaatcaacaacatcactagtgtcgtcttcaacatctgcttactcttccttccctgtagatgttgtggtttatgtacgagttcagccctcacagatcaaatttagctgtttaccagtatcaagagtagaatgcatgttaaagctgccatccctggatttggtgttttcttcaaaccgaggagaactggagactttagggactacatatcctgcagagactttatcccctggaggtaatgctactcagagtggaacaaagacttctgctagcaaaactggaataccaggttcatcgggattaggcagccctcttggccgaagtcgacatagtagtagtcagtcagacctgaccagttccagcagtagttcatctggcttgagcttcactgcatgcatgtctgacttttccctttatgtatttcatccatatggagcagggaaacaaaaaactgctgtttctggcctcacacctggatcaggaggattagggaatgtggatgaggagcccacttcagtcactggtcgaaaagattcactcagtataaaccttgagtttgtaaaagtgagtttgtcacggatcaggcgttcaggaggtgcctcattttttgaaagtcagtctgtaagcaagtctgcaagcaaaatggatactacgttaataaatatatctgctgtttgtgatatagggtctgcctcctttaaatatgatatgcgccgactcagtgaaattctggcatttccaagagcatggtatagaagaagtattgcaagacgtctattccttggagaccaaactataaatttgccaacatctggcccagggacacctgattccattgaaggggtaagccaacacctttcccctgaatcatcaagaaaagcttactgcaagacctgggagcagccaagtcagtcagcctccttcacccacatgcctcagtcacctaatgtgttcaatgagcatatgacaaacagcaccatgtcaccagggacagtaggacagagcctaaaatccccagcttccataagatcaaggagtgtatctgattcttcagttcctcgaagagattcactttcaaaaacatcaactccttttaacaaatcaaacaaagcagcaagccaacaagggaccccatgggaaacacttgtcgtgtttgctatcaacttgaagcaattaaacgttcaaatgaatatgagtaatgtaatgggaaatacaacttggacaactagtggtttgaagagccagggccgtctgtcagtaggaagtaatcgtgatcgagagatcagcatgtctgttggtctgggaagatcacaattagattctaaaggaggagtagttggagggaccatagatgtcaatgctttggagatggttgctcatatttctgaacatccaaatcagcaacccagtcacaaaattcagattactatgggttctactgaagctcgtgttgattacatgggctcaagtatcctcatgggcatcttcagtaatgctgatcttaagcttcaggatgaatggaaagtaaacttgtataatacattggattcaagcataactgataaaagtgagattttcgtccatggagatttgaagtgggatattttccaagtaatgatatcaaggtcaaccacaccagatctgataaaaataggaatgaagctccaggaatttttcacacaacaatttgataccagcaaacgagctctgtctacctggggaccagttccttaccttccgccaaagacaatgactagcaacctagaaaaaagttcacaagaacaattacttgatgcagcacatcatcgacactggcctggagtattgaaggtggtatcaggatgccacatatccttatttcagattccattaccagaagatggaatgcaatttggaggatcaatgagcttacatggaaatcatatgacactggcatgttttcatggtccaaattttcgttcaaaatcttgggccctttttcatttagaagaaccaaatattgctttttggactgaagctcagaaaatctgggaagatggctccagtgatcattctacatatattgtacaaacactagattttcacctgggtcataatactatggttaccaaaccatgtggtgctttggaaagtcctatggcaacaataaccaagataacaaggcgtcgccatgaaaatccaccccatggagtagcaagtgtgaaagaatggttcaattatgttacagctacaaggaatgaagagctaaatctgcttcgtaatgttgatgctaacaacactgagaatagcactactgtgaagaattctagtttgttgagtggattcagaggaggttctagctacaaccatgaaacagagactatctttgcattaccaaggatgcagcttgactttaaatccattcatgttcaagaaccacaggagccttcattacaggatgccagcctgaagccaaaagtagaatgtagtgtggtgacagagttcactgaccacatttgtgtgactatggatgctgagctcatcatgtttcttcatgatttagtatcagcttatcttaaagaaaaagaaaaagccatctttccacctcggattttatctactcgaccaggacaaaaaagtccaattattatacatgacgacaattcctctgataaagatagagaagatagcatcacttatactactgtggactggagagattttatgtgcaatacatggcatctagaacctactcttagattaatttcttggactggaagaaagattgatccagtaggtgttgattatattcttcaaaaattgggctttcatcatgctaggactactattcctaaatggcttcaaagaggagtcatggatccactggacaaggttctgtcagttcttatcaaaaagctcggtactgcactacaggatgaaaaggaaaagaaaggcaaagacaaagaagaacactaaaaaagtaatttgatctgtgaacaaattatgattgtgtctgttttattacactggagtgtttttttagtataataatttgaaatataactttaaaataattctaaatttgtggctataattaaaagtttgtaagttaacctgttctagttccatcattctgtgtacagtgaagtattgcatgataatgtaaattttgtgaaaaactagattaaaatatataactgcttgttatggtttataattatataatgtgcaatacaattcctgcatctttaaaatgtctgcagaataactgtgaatttttttgttattggattggccgtaacttttagaaaaaaatcttgttgatgataatgtgattttggggaggtcattaattgctttttcttttttaaatgtagacttatataaatacctgtttgtatatagcttgagtaattgtgatatgattgtataccactaaaatattgttaactattataataaagtcacagtaatggtttaagtctgt

SEQ ID NO: 145906 - DNA, 4967 bp, Homo sapiens
  Payload ID: 8931
  Gene Symbol: KIAA1109
  Gene Name: KIAA1109
  ENST ID: ENST00000419325
  CDS Start-End: 1-4915
cattgaccaactcaagtcatctttaaacaaattggaaactgagggaaccttgagaatttgtgctgttatgggatgcataatgacagaagcattagagaataaaagtgtacattttcccctaagaagtaaatacaacaggcttacaaaagttgctcgctttctccaagaaaatccttcatgtttactatgtaatatactacaccactatctgcaccaggcaaattactccatcattgatgatgctacaatgagcgatggacttcctgctttggtaactttgaagaaaggtttagttgcactggcaaggcagtggatgaagtttattgtggtgacaccagcctttaaaggagttagcttacatagaccagctcagcctctgaaacctcaaatagctatggaccatgaacatgaagatggacttggattggacaatgggggtggtcttcaaagtgataccagtgctgatggagcagaatttgagttcgatgcagccacagtcagtgaacacacaatgctattagaaggaacagctaaccggcctccacctggtagctctggacctgtaactggagctgagataatgaggaaactttctaaaactcatacccatagtgactctgcattaaaaataaagggcattcacccatatcattctctgagctataccagtggagacactgccactgattctccagtgcatgttggacgtgctgggatgccagtaaaggacagtccaaggaaggagagcctactcagctacctgactggaagcttcccaagcctgcacaacctcctggaaggtactcctcagagaagcagtgctgctgtgaaaagtagctccctaacgagaacaggaaatacagtagccactgatatgttatctgaacatcccttgctatctgagccatcatctgtgagtttctataattggatgtcaaatgctgtgggtaatcgaggaagtgtgttacaagaatctcctgttacaaaatcaggacacaatagtcttcccacaggtgttgcacccaatcttccaacaataccctcagcctcagatttcaacactgtcttgtctagtgaccaaaatactttggatgggacacattctcagcatagcaccagtcaggatgatgtggcaggtgtagaagaagcaaaccaagggtttcctgctgttcagcttgctgatgcacaggttgttttcaagcctcttctgagtcatacagggatccagtcacaggatacaatgccattctgctaccgaatgtactttggagaacacctttcattttcagggactttggactgcctcagagcagatattgtggattcagacacagccaaagagagaaaaggcaaaagagcaagaaggcaaggccatgtgaatcttcctccacttgagttcaaaccagcattaatgttgggaacctttagcatcagtgctgttgtaatggaaaagtccgtgtgcacccctcagaactctaccagtgccctttcttttcatgatctcagcaagcggtattataacacctttcactgcaactttactatttcctgtcagtcaataagccagcatgtagatatggctttggttcgtcttattcatcagtttagcacaatgatagatgacatcaaagcaactcagactgatattaaacttagcagatatacagccggatctgcttccccaacacctaccttcaaaaccagaaaacatcgggactttcgttcatctgactttagccgcagttctagaggaagtcttaatggtggcaatagagtaaataatgcaaagaacaaacggaccaacaatgagaataacaaaaaggaatctcgaaacaagaattcattaggaagatctgaaagaagaacatcaaaagtgtctaggaaaggttcaaaagatgtggtggatcacatgactattcatatggatgactctgattcaattacagtgtcagaacaaagtgagccttcagctgagtgctggcagaatatgtataaattgcttaacttctattcacttatctccgatccaacaggaatattggaaaagtcttcagaaacatttggaccagcaggagttcggagccctacagagccaacatgtaaagttgtgtttgagaatgaacaagacaacagcagtttgactaagactcagaggaaacgtagcttggtaacttctgaacctcagcatgttactctaatagtgtttgggattggcatggtgaaccgcacacacctagaggcagatattggtggactaacaatggaatcagaactgaagaggatccatggcagttttactcttaaggaaaaaatgaaagatgttttacatcaaaagatgactgagacttgtgctactgctcatattggtggggttaatattgtgctgcttgaagggattacaccaaatatacaactggaggattttcctacatctcctacaagtacagccaaacaagagtttctaactgtagtgaaatgtagtattgccaagtcccaagccctctacagtgcccaaagagggctgaagacaaacaatgctgctgtgttcaaagtaggagctatcagtatcaacattcctcagcaccctgccaccttacatagcatgatggttcgaagttctcaccaactatctaaacaaatctcagacctaatcagacagccttctacagccccacagcctgtaaaagaagatattgcaaccccactaccttctgaaaaaaccccaacaagtgttaatcaaactcctgttgaaacaaatgaatttcctcagctaccagaaggcttagaaaagaagcctattgttcttaaattcagtgccatgttagatggtatagccattggagcagcacttttaccatctctgaaagcagaatacaagatgggaagaatgagaagtcatggaatgacaggtgcacagacaagatttacatttgagctgccaaatcacagattgcgttttacttcaaaagtttctgccacagatatgtcaaccattcctccttctgccagtcttaaccttccccctgttaccatgtcagggaaatatataatggaagaacatgatagttattcggatcaggtgtggagtatagatgaactgccttctaaacaaggttactatttacagggaaattatctgcgttgtgtggcagaagttggttcctttgaacataatcttacaactgatcttctaaaccacttggtatttgtacagaaagtgttcatgaaggaagttaatgaagtaatacaaaaagtttctggtggggagcagcctattcctctctggaacgaacatgatggaacagcagatggagataaacctaaaattctcctctattccctaaacttgcagttcaagggtattcaagtaacggccactactccatcaatgagagctgtaagatttgaaactggattgattgaactggaactttctaaccgacttcaaaccaaagcttcaccaggaagtagcagctatctgaaactgtttggcaaatgccaggtggatttaaatctggcattaggacaaattgtcaaacatcaggtttatgaggaagctggttctgattttcatcaagttgcctattttaaaaccagaattggattaagaaatgccctccgagaagaaatcagtggttcttcagatagggaagctgtgcttattactttgaatagaccaattgtttatgcacagcctgtggcctttgatagagctgtgctgttttggctgaattataaggccgcctatgacaactggaatgaacaacgaatggctttacataaggatattcatatggctacaaaggaagtagtagatatgctacctggtatccagcaaacatcagcccaggcctttgggactctttttctccagctcactgtcaatgatctgggaatttgcctacctatcacaaatactgcacagtctaatcatactggagaccttgacactggttctgctttggtattaaccattgaaagtactctcatcactgcatgctcttcagagtctctggttagcaaagggcatttcaaaaacttttgtatccgttttgctgatggatttgagacatcatgggatgactggaaaccagaaattcatggggatttagtgatgaatgcctgtgtagttccagatggcacctatgaagtatgttcaagaactacaggacaagcagcagctgaaagcagtagtgctggaacctggacactcaacgtattgtggaaaatgtgtgggattgatgttcacatggatcctaacattggcaaaaggcttaatgctctgggcaatactcttacaacactgacaggagaggaagacatagatgacattgctgacttaaattcagtgaacatagctgacctgtcagatgaggatgaagttgatactatgtctcccactatccatactgaagccacagattatcgaagacaggcagcatctgctagccagccgggagaacttagaggaagaaaaattatgaagcgtatagtggatatcagagaactgaatgaacaggccaaagtaatagatgatctgaaaaaattaggtgcaagtgaaggaaccataaaccaggaaattcaacgttaccaacagttagaatctgtggctgtgaatgacattagaagagatgttcgtaaaaaattacggaggtccagtatgcgggctgcttccctaaaggataagtggggtttgagttacaaaccaagttacagccgatcaaaaagcatttctgcttctggaagaccacctcttaagcgaatggaaagggcaagttctcgagtaggagaaactgaagagctcccagaaatccgtgtggatgcagcatctcctggacctagagtaacttttaatatccaggatacaatagcagaaattagaaggaagaagatcagcttcaaagttgtattctaatttcatagcatattaaacattatattaaaatgtttattttgttttttgtgta

SEQ ID NO: 145907 - DNA, 4476 bp, Homo sapiens
  Payload ID: 8931
  Gene Symbol: KIAA1109
  Gene Name: KIAA1109
  ENST ID: ENST00000446180
  CDS Start-End: 1-4343
acagtaggggttccatatatcacagtgtagaagggccacttactggacatggagaaagcattcaggattccagaactctgccattcaaaactcatccttctcaggcttcatttgtttctgcgttaggtggagaagatgatgttatagaacatctatatattgtagaaggtgagaaaacagtggagagtgaacagattactccgcaacaacccgtgatgaattgttatcagacttaccttactcagttccaggtaattaattggtcagttaagcacccaaccaacaaaagaacctctaaatcctcattgcatcgtccccttgatctggatacaccaaccagtgaagaaagttcatcgtcatttgaacagctttctgttccaacttttaaggttatcaagcaggggctcacagctaattctttgctagacagaggcatgcaactttcaggatcaacttcaaatacgccgtatactccattggaaaaaaaactcgctgataacacagatgatgaaacattaacagaagagtggaccctggatcaaccagtgtcccagaccaggacaacagccatagttgaagtaaaaggaactgttgatattgttttgactcccctggtggctgaagctttagacagatatattgaagcaatggttcattgtgctagtacccgacatccagctgcaattgtagatgatcttcatgctaaagtcctcagggaagctgtccaaaatagcaagactaccttttcagaaaatttatcttccaaacaagacattagaggaacaaaaactgagcagtctacaataggaacgactaaccaaggacaagcacagacaaatcttacaatgaagcaagataatgtaacaattaaaggtcttcagactaatgttagcataccaaaggtaaacttatgtttgttacaagcctcagtggaagaatctccaactacggctcctagtaggagtgtgactcatgtttccctagtggcattgtgttttgacagaattgctacacaggttcgcatgaacagaggtgtggttgaagagacttcaaacaatgcagaacctggtagaacatcaaattttgataggtatgttcatgccacaaagatgcagcctcagtcatctggatctctcagatcaaatgctggagcagaaaaaggcaaagaaattgcagctaagttaaacattcatcgagttcatgggcaacttaggggtcttgatacaacagacattgggacctgtgcaatcactgctattccttttgagaagtccaaagttttatttactcttgaagagttggatgaatttacttttgtggatgaaactgatcagcaagctgttccagatgtaactcgaataggtcccagccaagaaaaatggggatggataatgtttgaatgtggacttgaaaatttaaccataaaaggaggaagacagtctggtgctgttttatataacagttttggaattatgggtaaagctagtgacacagaaaggggtggagtgctgacatccaataattcttctgattctccaaccggcagtggctataatactgatgtctctgatgataatcttccatgtgaccggacaagcccttcctcagacttaaatggaaattctgtttcagatgaacaggatgaaggagtcgaatctgatgatttgaaaaaagatctacctctgatgcctcctcctccagattcatgtagcatgaagttgaccattaaagaaatttggtttagttttgcagctcccaccaatgtgagatctcacacacatgcattttctaggcagctgaaccttttaagcactgcaacaccagctgttggtgcatggcttgttcccattgaccaactcaagtcatctttaaacaaattggaaactgagggaaccttgagaatttgtgctgttatgggatgcataatgacagaagcattagagaataaaagtgtacattttcccctaagaagtaaatacaacaggcttacaaaagttgctcgctttctccaagaaaatccttcatgtttactatgtaatatactacaccactatctgcaccaggcaaattactccatcattgatgatgctacaatgagcgatggacttcctgctttggtaactttgaagaaaggtttagttgcactggcaaggcagtggatgaagtttattgtggtgacaccagcctttaaaggagttagcttacatagaccagctcagcctctgaaacctcaaatagctatggaccatgaacatgaagatggacttggattggacaatgggggtggtcttcaaagtgataccagtgctgatggagcagaatttgagttcgatgcagccacagtcagtgaacacacaatgctattagaaggaacagctaaccggcctccacctggtagctctggacctgtaactggagctgagataatgaggaaactttctaaaactcatacccatagtgactctgcattaaaaataaagggcattcacccatatcattctctgagctataccagtggagacactgccactgattctccagtgcatgttggacgtgctgggatgccagtaaaggacagtccaaggaaggagagcctactcagctacctgactggaagcttcccaagcctgcacaacctcctggaaggtactcctcagagaagcagtgctgctgtgaaaagtagctccctaacgagaacaggaaatacagtagccactgatatgttatctgaacatcccttgctatctgagccatcatctgtgagtttctataattggatgtcaaatgctgtgggtaatcgaggaagtgtgttacaagaatctcctgttacaaaatcaggacacaatagtcttcccacaggtgttgcacccaatcttccaacaataccctcagcctcagatttcaacactgtcttgtctagtgaccaaaatactttggatgggacacattctcagcatagcaccagtcaggatgatgtggcaggtgtagaagaagcaaaccaagggtttcctgctgttcagcttgctgatgcacaggttgttttcaagcctcttctgagtcatacagggatccagtcacaggatacaatgccattctgctaccgaatgtactttggagaacacctttcattttcagggactttggactgcctcagagcagatattgtggattcagacacagccaaagagagaaaaggcaaaagagcaagaaggcaaggccatgtgaatcttcctccacttgagttcaaaccagcattaatgttgggaacctttagcatcagtgctgttgtaatggaaaagtccgtgtgcacccctcagaactctaccagtgccctttcttttcatgatctcagcaagcggtattataacacctttcactgcaactttactatttcctgtcagtcaataagccagcatgtagatatggctttggttcgtcttattcatcagtttagcacaatgatagatgacatcaaagcaactcagactgatattaaacttagcagatatacagccggatctgcttccccaacacctaccttcaaaaccagaaaacatcgggactttcgttcatctgactttagccgcagttctagaggaagtcttaatggtggcaatagagtaaataatgcaaagaacaaacggaccaacaatgagaataacaaaaaggaatctcgaaacaagaattcattaggaagatctgaaagaagaacatcaaaagtgtctaggaaaggttcaaaagatgtggtggatcacatgactattcatatggatgactctgattcaattacagtgtcagaacaaagtgagccttcagctgagtgctggcagaatatgtataaattgcttaacttctattcacttatctccgatccaacaggaatattggaaaagtcttcagaaacatttggaccagcaggagttcggagccctacagagccaacatgtaaagttgtgtttgagaatgaacaagacaacagcagtttgactaagactcagaggaaacgtagcttggtaacttctgaacctcagcatgttactctaatagtgtttgggattggcatggtgaaccgcacacacctagaggcagatattggtggactaacaatggaatcagaactgaagaggatccatggcagttttactcttaaggaaaaaatgaaagatgttttacatcaaaagatgactgagacttgtgctactgctcatattggtggggttaatattgtgctgcttgaagggattacaccaaatatacaactggaggattttcctacatctcctacaagtacagccaaacaagagtttctgtatgtcatattattctttttcatggctttgtaattactgtagtattgaatagtttttaaaatatttaaatttttttcatggctgtgaattatttagttattgttttgtagctgtaatataggcccttttatataatagattaaagcttactggtaatcaaggaaaa

SEQ ID NO: 145908 - DNA, 619 bp, Homo sapiens
  Payload ID: 8931
  Gene Symbol: KIAA1109
  Gene Name: KIAA1109
  ENST ID: ENST00000442707
  CDS Start-End: 1-592
atttagctgtttaccagtatcaagagtagaatgcatgttaaagctgccatccctggatttggtgttttcttcaaaccgaggagaactggagactttagggactacatatcctgcagagactttatcccctggaggtaatgctactcagagtggaacaaagacttctgctagcaaaactggaataccaggttcatcgggattaggcagccctcttggccgaagtcgacatagtagtagtcagtcagacctgaccagttccagcagtagttcatctggcttgagcttcactgcatgcatgtctgacttttccctttatgtatttcatccatatggagcagggaaacaaaaaactgctgtttctggcctcacacctggatcaggaggattagggaatgtggatgaggagcccacttcagtcactggtcgaaaagattcactcagtataaaccttgagtttgtaaaagtgagtttgtcacggatcaggcgttcaggaggtgcctcattttttgaaagtcagtctgtaagcaagtctgcaagcaaaatggatactacgttaataaatatatctggtactcaattttatagtttttaaattaaaatactgttttccaaaattaaa

SEQ ID NO: 145909 - DNA, 3741 bp, Homo sapiens
  Payload ID: 8931
  Gene Symbol: KIAA1109
  Gene Name: KIAA1109
  ENST ID: ENST00000424425
  CDS Start-End: 1-3741
acgggaaattggaagaacaagaacccaatcgaaaattgaaagagttaaagtaaaaacagaatcccaagaccccacatcttcatggagatcacttattccagtcataaaggtcaatgtgagcacaggacgtttggcctttggaaatcactaccagccgcaaactctgtgcatcaactttgatgatgctttcttaacttatactacaaaaccaccttcaagtcatcttgaccaattcatgcatattgtgaaaggaaagcttgaaaatgttcgagtcatgcttgttcctagtccaagatatgttggtcttcaaaatgatgaaccaccgagattaatgggagaaggttttgtggtgatgcagtcaaatgatgttgacatctactactacatggatgagccaggacttgttccggaagaaacagaagaaaatattgaaggagaaatgagcagtgaggattgcaaattacaagacttgcctccatgttggggactggatatagtttgtggtaaaggaacagattttaattatggaccatgggccgataggcagagagattgtttgtggaagtttttctttccacctgactatcaagttctgaaagtttctgaaattgcacagcctgggagaccaagacagatccttgcttttgaattacgaatgaatattattgcagatgctacaattgatttgctgtttaccaaaaatagggaaacaaatgctgtacatgtaaatgtaggagctggctcatatttagaaattaatattccaatgacagttgaagaaaatggttacactcctgctattaagggacaactcttacatgtggatgccactaccagcatgcaatatcggacccttttagaagcagaaatgttagcattccacatcaatgccagctacccccgaatatggaacatgccgcagacatggcagtgtgaattagaggtttataaagccacttaccacttcatctttgcacagaaaaacttctttacagatttaattcaagactggtctagtgacagtcctccagacattttttcatttgttccatatacgtggaattttaaaatcatgtttcatcagtttgaaatgatttgggctgctaatcaacacaattggatcgactgttctactaaacaacaggaaaatgtgtatctggcagcctgtggagaaacactaaacattgatttttctttgccttttacggactttgttccagctacatgtaataccaagttctctttaagaggagaagatgttgatcttcatttgtttctaccagactgccaccctagtaaatattctttatttatgctggtaaaaaattgccatccaaataagatgattcatgatactggtattcctgctgagtgtcaaagtggccagaaaacagttaaaccaaaatggcgcaacgttactcaggaaaagtctggttgggttgaatgctggactgtcccaagtgtcatgcttacaattgattatacatggcatccaatttatccacaaaaagcagatgaacagctgaaacaatcattatcagaaatggaagagacaatgctatctgtattaaggccatcccagaagacatcagacagagttgtttcttctccctctacttcttcacgcccacctattgatccctcagaacttccacctgataaacttcatgtagaaatggaactttctccagattctcagataactctctatggacctctactaaatgcctttttgtgtataaaggaaaactactttggggaagatgacatgtatatggattttgaagaggttatctcaagtcctgttttgtcactgtcaacatcatccagctctgggtggactgctgttggaatggaaaatgacaaaaaggaaaatgaaggttcagccaagtcaattcatccacttgccttgcgtccttgggatattactgtacttgttaatttgtacaaagttcatgggcgtcttcctgttcatggaactactgatggtcctgaatgccctacagctttcttggaaagactatgttttgaaatgaaaaaaggatttagggagaccatgctgcaacttatcctgtcacccctgaatgtgtttgtcagtgataactatcagcgaccccctgtggatgaagtactcagggaaggtcacatcaatttgtcaggtctccagctgagagcacacgctatgttctcagcagaaggtcttcctttgggaagcgattccttagaatacgcatggttaattgatgtgcaggctggaagtcttacagctaaggtcacagcaccacagctggcatgcctcttggagtggggacagacatttgtttttcatgtggtatgtcgggagtatgaactggaaagaccgaaatcagttataatatgtcagcatggaattgatcgtcggttctgtgaatccaagttgagttgtattcctgggccttgtccaacttcagatgatttgaaatatactatgattcgtttagcagtagatggagccgatatttacattgttgagcatggttgtgctacaaatataaagatgggtgcaattcgagttgcaaactgtaatctccacaatcaatcggttggggaaggaatcagtgctgcaattcaggattttcaagtgagacagtacattgagcaattaaataattgcagaattggacttcagcctgcagtgctacggagggcctattggcttgaagctgggtcagccaatttaggacttattactgttgatattgctttagctgctgaccatcattctaaacatgaggcacaaagacatttcttagaaactcatgatgccagaactaagaggttgtggtttttatggccagatgatatcctgaagaataagaggtgtagaaacaaatgtggttgtctcggtggctgcagattctttggtggcacagtaactggcctagatttcttcaaacttgaagagttgacaccttccagtagctctgcattttcaagcacaagtgcagagtctgatatgtattatggacagtctctgctacagcctggagaatggataattactaaagaaattcccaaaattatagatggtaatgtgaatggcatgaagaggaaagaatgggaaaacaaatcagtgggaatagaagtagagagaaaaactcagcaccttagtcttcaagtaccattacgatctcatagttcatcctcttcctcagaagagaacagtagttctagtgctgcacagcctttgttggctggtgaaaaggaaagtccttcatctgttgctgatgaccatttggttcaaaaagagttcttgcatgggacaaaaagagatgatggccaagcaagtatccctacagaaatttcaggaaacagccctgtgtctcctaatactcaggataagtcagtaggtcaatctcctcttagatctcccttgaaacgacaagcctctgtctgttccacccgtcttggaagtactaagagtcttactgctgctttctatggggacaagcagcctgtaacagttggagtccagtttagtagtgatgtctctcgaagtgatgagaatgtactagactcaccaaagcagaggagaagttttggttcattcccatatacaccatcagcagactctaattcatttcatcagtatcgatcaatggattccagcatgtcaatggctgatagtgaagcctacttttctgctgctgaggaatttgagcccattagcagtgatgaaggccctggaacttatccgggtag

SEQ ID NO: 145910 - DNA, 624 bp, Homo sapiens
  Payload ID: 8931
  Gene Symbol: KIAA1109
  Gene Name: KIAA1109
  ENST ID: ENST00000421930
  CDS Start-End: 1-624
tctaatcatactggagaccttgacactggttctgctttggtattaaccattgaaagtactctcatcactgcatgctcttcagagtctctggttagcaaagggcatttcaaaaacttttgtatccgttttgctgatggatttgagacatcatgggatgactggaaaccagaaattcatggggatttagtgatgaatgcctgtgtagttccagatggcacctatgaagtatgttcaagaactacaggacaagcagcagctggagaggaagacatagatgacattgctgacttaaattcagtgaacatagctgacctgtcagatgaggatgaagttgatactatgtctcccactatccatactagttcagatggaagttcaataagtggagatggccacaaactcacctttgggcagcgacttgtaaatcacctactaggcctgacacccccaaatcagcgccattctgttcctgcagagtatctgtgtgacccagagatgtggggctcccctcagtctagccagtcccatttgaaagcatgcagagcacactcatggggaaacgaagccacagattatcgaagacaggcagcatctgctagccagccgggagaacttagaggaaga

SEQ ID NO: 145911 - DNA, 5528 bp, Homo sapiens
  Payload ID: 8931
  Gene Symbol: KIAA1109
  Gene Name: KIAA1109
  ENST ID: ENST00000438707
  CDS Start-End: 1-5025
gggcatttcaaaaacttttgtatccgttttgctgatggatttgagacatcatgggatgactggaaaccagaaattcatggggatttagtgatgaatgcctgtgtagttccagatggcacctatgaagtatgttcaagaactacaggacaagcagcagctgaaagcagtagtgctggaacctggacactcaacgtattgtggaaaatgtgtgggattgatgttcacatggatcctaacattggcaaaaggcttaatgctctgggcaatactcttacaacactgacaggagaggaagacatagatgacattgctgacttaaattcagtgaacatagctgacctgtcagatgaggatgaagttgatactatgtctcccactatccatactagttcagatggaagttcaataagtggagatggccacaaactcacctttgggcagcgacttgtaaatcacctactaggcctgacacccccaaatcagcgccattctgttcctgcagagtatctgtgtgacccagagatgtggggctcccctcagtctagccagtcccatttgaaagcatgcagagcacactcatggggaaacgaagccacagattatcgaagacaggcagcatctgctagccagccgggagaacttagaggaagaaaaattatgaagcgtatagtggatatcagagaactgaatgaacaggccaaagtaatagatgatctgaaaaaattaggtgcaagtgaaggaaccataaaccaggaaattcaacgttaccaacagttagaatctgtggctgtgaatgacattagaagagatgttcgtaaaaaattacggaggtccagtatgcgggctgcttccctaaaggataagtggggtttgagttacaaaccaagttacagccgatcaaaaagcatttctgcttctggaagaccacctcttaagcgaatggaaagggcaagttctcgagtaggagaaactgaagagctcccagaaatccgtgtggatgcagcatctcctggacctagagtaacttttaatatccaggatacattgaaaaatacagtatggggaagtacaccacaatccagctgtcctggggaagggtattttcagtttccagaggagacagaactggaccttttgtcagtaaccattgaaggtccatcccattattcatcaaatagtgaaggatcatgttctgtgttcagttctcccaaaactccaggaggcttttcaccaggcattcctttccaaactgaagagggccgacgggatgacagtttgtcttctaccagtgaagattccgagaaggatgaaaaagatgaagaccatgagagggaaaggttttatatttacaggaaaccctcacatacgtctcgtaaaaaagcaacaggctttgctgctgttcatcagctatttacagaacgctggccaacaacaccagtcaatagaagtcttagtggcacagctacagagagaaatattgactttgaacttgatatacgggttgaaattgatagtggaaaatgtgtactccacccaaccacccttctacaagaacatgatgatataagtttgagaaggagttatgatcgaagttccaggagcttagatcaagattcaccttcaaaaaagaagaagtttcaaactaattatgcttctaccacccatttaatgaccggcaagaaagtgccatcatctctacagacaaagcctagtgacttagaaacaacagtattttacattcccggagttgatgtaaagttgcattacaattccaagacgctaaagactgaatcacctaatgcctccaggggatcttccttgccaagaacactgtccaaagagtccaagctgtatgccaaaggaaaaggaagtggaggagtaaaaacagccaagttatatgcctgggtagcacttcagtcattgccagaagaaatggttattagtccctgcctattagactttctggaaaaagctctggaaactatcccaattacaccagttgaaaggaattatacagctgtcagctcacaagatgaagatatgggacattttgaaataccagatcctatggaagaatcaacaacatcactagtgtcgtcttcaacatctgcttactcttccttccctgtagatgttgtggtttatgtacgagttcagccctcacagatcaaatttagctgtttaccagtatcaagagtagaatgcatgttaaagctgccatccctggatttggtgttttcttcaaaccgaggagaactggagactttagggactacatatcctgcagagactttatcccctggaggtaatgctactcagagtggaacaaagacttctgctagcaaaactggaataccaggttcatcgggattaggcagccctcttggccgaagtcgacatagtagtagtcagtcagacctgaccagttccagcagtagttcatctggcttgagcttcactgcatgcatgtctgacttttccctttatgtatttcatccatatggagcagggaaacaaaaaactgctgtttctggcctcacacctggatcaggaggattagggaatgtggatgaggagcccacttcagtcactggtcgaaaagattcactcagtataaaccttgagtttgtaaaagtgagtttgtcacggatcaggcgttcaggaggtgcctcattttttgaaagtcagtctgtaagcaagtctgcaagcaaaatggatactacgttaataaatatatctgctgtttgtgatatagggtctgcctcctttaaatatgatatgcgccgactcagtgaaattctggcatttccaagagcatggtatagaagaagtattgcaagacgtctattccttggagaccaaactataaatttgccaacatctggcccagggacacctgattccattgaaggggtaagccaacacctttcccctgaatcatcaagaaaagcttactgcaagacctgggagcagccaagtcagtcagcctccttcacccacatgcctcagtcacctaatgtgttcaatgagcatatgacaaacagcaccatgtcaccagggacagtaggacagagcctaaaatccccagcttccataagatcaaggagtgtatctgattcttcagttcctcgaagagattcactttcaaaaacatcaactccttttaacaaatcaaacaaagcagcaagccaacaagggaccccatgggaaacacttgtcgtgtttgctatcaacttgaagcaattaaacgttcaaatgaatatgagtaatgtaatgggaaatacaacttggacaactagtggtttgaagagccagggccgtctgtcagtaggaagtaatcgtgatcgagagatcagcatgtctgttggtctgggaagatcacaattagattctaaaggaggagtagttggagggaccatagatgtcaatgctttggagatggttgctcatatttctgaacatccaaatcagcaacccagtcacaaaattcagattactatgggttctactgaagctcgtgttgattacatgggctcaagtatcctcatgggcatcttcagtaatgctgatcttaagcttcaggatgaatggaaagtaaacttgtataatacattggattcaagcataactgataaaagtgagattttcgtccatggagatttgaagtgggatattttccaagtaatgatatcaaggtcaaccacaccagatctgataaaaataggaatgaagctccaggaatttttcacacaacaatttgataccagcaaacgagctctgtctacctggggaccagttccttaccttccgccaaagacaatgactagcaacctagaaaaaagttcacaagaacaattacttgatgcagcacatcatcgacactggcctggagtattgaaggtggtatcaggatgccacatatccttatttcagattccattaccagaagatggaatgcaatttggaggatcaatgagcttacatggaaatcatatgacactggcatgttttcatggtccaaattttcgttcaaaatcttgggccctttttcatttagaagaaccaaatattgctttttggactgaagctcagaaaatctgggaagatggctccagtgatcattctacatatattgtacaaacactagattttcacctgggtcataatactatggttaccaaaccatgtggtgctttggaaagtcctatggcaacaataaccaagataacaaggcgtcgccatgaaaatccaccccatggagtagcaagtgtgaaagaatggttcaattatgttacagctacaaggaatgaagagctaaatctgcttcgtaatgttgatgctaacaacactgagaatagcactactgtgaagaattctagtttgttgagtggattcagaggaggttctagctacaaccatgaaacagagactatctttgcattaccaaggatgcagcttgactttaaatccattcatgttcaagaaccacaggagccttcattacaggatgccagcctgaagccaaaagtagaatgtagtgtggtgacagagttcactgaccacatttgtgtgactatggatgctgagctcatcatgtttcttcatgatttagtatcagcttatcttaaagaaaaagaaaaagccatctttccacctcggattttatctactcgaccaggacaaaaaagtccaattattatacatgacgacaattcctctgataaagatagagaagatagcatcacttatactactgtggactggagagattttatgtgcaatacatggcatctagaacctactcttagattaatttcttggactggaagaaagattgatccagtaggtgttgattatattcttcaaaaattgggctttcatcatgctaggactactattcctaaatggcttcaaagaggagtcatggatccactggacaaggttctgtcagttcttatcaaaaagctcggtactgcactacaggatgaaaaggaaaagaaaggcaaagacaaagaagaacactaaaaaagtaatttgatctgtgaacaaattatgattgtgtctgttttattacactggagtgtttttttagtataataatttgaaatataactttaaaataattctaaatttgtggctataattaaaagtttgtaagttaacctgttctagttccatcattctgtgtacagtgaagtattgcatgataatgtaaattttgtgaaaaactagattaaaatatataactgcttgttatggtttataattatataatgtgcaatacaattcctgcatctttaaaatgtctgcagaataactgtgaatttttttgttattggattggccgtaacttttagaaaaaaatcttgttgatgataatgtgattttggggaggtcattaattgctttttcttttttaaatgtagacttatataaatacctgtttgtatatagcttgagtaattgtgatatgattgtataccactaaaatattgttaactattataataaagtcacagtaatggttt

SEQ ID NO: 145912 - DNA, 492 bp, Homo sapiens
  Payload ID: 8931
  Gene Symbol: KIAA1109
  Gene Name: KIAA1109
  ENST ID: ENST00000449251
  CDS Start-End: 1-492
aatgaaggttcagccaagtcaattcatccacttgccttgcgtccttgggatattactgtacttgttaatttgtacaaagttcatgggcgtcttcctgttcatggaactactgatggtcctgaatgccctacagctttcttggaaagactatgttttgaaatgaaaaaaggatttagggagaccatgctgcaacttatcctgtcacccctgaatgtgtttgtcagtgataactatcagcagcgaccccctgtggatgaagtactcagggaaggtcacatcaatttgtcaggtctccagctgagagcacacgctatgttctcagcagaaggtcttcctttgggaagcgattccttagaatacgcatggttaattgatgtgcaggctggaagtcttacagctaaggtcacagcaccacagttgagttgtattcctgggccttgtccaacttcagatgatttgaaatatactatgattcgtttagcagtagatgga

SEQ ID NO: 145913 - DNA, 5122 bp, Homo sapiens
  Payload ID: 8932
  Gene Symbol: KIAA1143
  Gene Name: KIAA1143
  Uniprot ID: Q96AT1
  ENST ID: ENST00000296121
  CDS Start-End: 61-525
gcctctgtatcgtcgcgaatccgtcgcggaacctgtcttctgtctttacccagagctaccatgagcaagcggaaccaggtatcgtacgtgcggccagccgagccggcgtttctggcccgcttcaaggaacgggtcggctacagggagggacccaccgtagagactaagagaattcagcctcagcccccagatgaagatggggatcacagtgacaaagaagatgaacagcctcaagtggtggttttaaaaaagggagacctgtcagttgaagaagtcatgaaaattaaagcagaaataaaggctgccaaagcagatgaagaaccaactccagccgatggaagaatcatatatcgaaaaccagtcaagcatccctcagatgaaaaatattcaggtttaacagcaagctcaaaaaagaagaagccaaatgaagatgaagtaaatcaggactcggtcaaaaagaactcacaaaaacaaattaaaaatagtagcctcctttcttttgacaacgaagatgaaaatgagtaagtgtaaatattttgaatttagtctactttgaaagtatatggagtgttcattaaaatcacattttttcctattataaagatactacaagttctttatagaaagtttaggaaatagagaaaaaaatttaataaactacatctattcatcaatacccctctgacttaaaatgccaactctatagaaattagctagtattaacattttgttatttcccttgtgtggttgtatatatatgtaaattatatttttaagcaaaatacattttttgtgtgtaaacaaaattttataaatacaactgtattgcaaatgttctttgtcctgcttctcacttgacattgcattacgagtattcttccaggtcagtaaatttcaaaaacctgacattaatagctacagataatttcataaacatctcattgtatctttttcattagcaatagctccactttgggtgggggagatgataatgtgccttgttaaaaatacctccccaactcctgctaagggtggccatgagactcagctctggcaagttaagaaatacaggtggaattctgcttgataaagctgctgggttttttgttacaaaaggacagacttggcaaacatgagcctttgctcttatcttttcatcctacttggagtgcagagataaaacctgagtaccagagccacttttaggcataaggaaggcagccatgtgctttgggtcatgttagtaaaaagactcagagcttggctccttgctgacatgcctggaggagctgctacaccagcttggattgctgacctctgacttcttggtagtgagaagaataaacactgtgcttaattaggccttggtcaggtttcttttatatgcagccaaatgcagtcctaagtaatacaataaataactggtcaaactgttactggtggagggtgtccaggttcttggcattttggacaaataattgaacaaaacgcacaaagcaatgaatatcctctagaggtttgccattggttacttggcgtacaccctgtgtaaatgaagtagtggcccgtgacctgtctgattggtgcagaaagtgaccaatcagaggctgaagtgaagttacaaagttatactcctgtgtaaatgaggacttggcctatgaccagtctgattggttgcaggaggggaccaatcagaggcactttcatttttcatctgcaatgcagaaaaggcaaggggattgcaaagggagtagcctctgatccttttgttacttaggtatggagaggtggggttttccttttgattcagttctaggaagtcaatgtgaatcagccttaggttccctgtctccagaccctattctcctgcctcattttccccctgagagacgtgatcctcgtaaatctttatgggaggctgagagactgagggtctttcttctgtaactgcttcatgctaacttgggacacagtccctacctattggagatcacgtaactctcaccctgctttgtctaggggagacagggtagcttcttgatggccggtggtgtcttctcctgaaactggctagaaatcttgtcacatgatcatctaacttggtggtctctaggcaaaaggaaatggatttggttaaaagatttaacagatatggtccaaaaaccaaggcaaatataatcattaataatgggctggccaagggagggagccatgaaacccaacttagtgccctttaggtgccccagctgttgtcatattttagaggcccagtcagctagttttcaggtggtgtcccttactaatcctgattggttgacatcaaaacagcattcttcttctaggaaaatacataagccacctgtttcagcagttaggagatctagtccccttcgattttgcaaagcgaccactgccaaggagcctatccgaatttgtaaggtgacaatactttgagcaatgttatccaggctttccataaaatccttggacaagcgttggtaataggatagggaagttgcaatcccgctaactcccattcctacctctgctgttattcctagccgttgtgtctggtggttgcagttaaaggtataatgagggattggttgttgggagctatattaatttagggacatacaatatttctgtctccagtctaccacttccaccaaagacaaatcacagcagaaccgacctaacttcaaaataaactgcagtcccatatactgggcctgattacccacacaaagtgcaacaagaatcattgtccatatagactctcctagattggctttgctagaacatttcacaaggccatttcagtcaaagtcctgagaaagtaaccggtttcaattgtgccctattacaaaagaaaacgtggttattaactttatacagacaaatgccatgaattaagaatattcataaatagtttacaaattctggagaaattagaatactcaatacacttaaagtgtatttcaaggctataaatagctcaaaataaaaagattattcagactctgaaaaaacaaaaagaagtagcaatatttcaaacaacaaaagccatacaaattatttcagtcttccattagttcatttcagtccatgtaatcaactcctgctctacttcatattcatctttatgaacacatcagcctttcaattagtgccttggaagttttctgtctaatccaatggcacactctccaaagttaccagaaacctgcattcaagagttcttttcatgaactccaaagaagtaagccttggactgtagctgattataagtcactttttttttttgagaaggatcagagcaaaacatcaattatggatgacaaaagtcttaagacagccataaagacacagttgacaaatgtggctatttctgtggcttacaacaatttaacataatcattacaacatatattaagacatatcagaattttagaactctcatacaatcctggaacacatattaacaacaaatctctatcagtataacccaaaggaagctaaacaccacctcacacttgacaatgtttcctgtataattcaaacattacaaataagcctaatataagcctaatatgtcactcttgaacttcaggaagcctaatatccaaaaagttagtttaaggtcaaaagtttttgaattaacttttttccattagtatggtcatatctttcttactaatttgtaagttatgtaatttatcaatttttttttgttgttctgtttcccaacctctatgtcagataaagaatcacccaggccagacacaatggctcatgcttgtaatcccaacactttgggaagccaaggtgggagaattgcttgaagccaggaatctgagcccagcctgggcgacaaagcaatacccctatctctacaaaaaataaaaaatagccaggtgtagcgacacacacctgtagtcccagctgctcaggaggctaagcaggaggatggcttgggcccaggagttcaacgctgcagtgagctatgattgcaccactgcactccagcctgggcaacagagtaagaactgtctcaaaaaaaataaaaaatagaaataaattttaaaaaaagaattacccatattctctttgtttttgtttattcacattaacctttattctatctggaatttattagagtatacttttttctcaaataatcaattgtcctagaaccatgtgtttctcatttatttgaaaggccatctagtgagagatttctccaaatgttggggtagggaagggaggggaagcactttaaagtctgagcctttagaggtgattcctcaagaccctgcttaatcctaacaattttcctcattagtaaaagtcagcccaaactgggggcttgttaagatccttaccagccacatccatctgaaattatgaatttcaaagtatcttacaaatttggtgccacattatcttttttaagtttgttttgttttgtttttttgagacagagtctcgctctgtcacccaggctggagtgcagtggcgcgatctcagctcactgcaagctccgcctcctgggttcacaccattctcttgcctcagcctcccaagtatctgggactacagtcgcccgccaccacgcccggctaatttttttgtatttttaatagagacggggtttcactttgttagccaggatggtctcaatctcctgacctcatgatccacctgcctcggcctcccaaagtgctgggattacaggcaggagccaccgcgcctgggcctttttttaagttttaagtacctataaagaacactgaaaggtgatgtgtgtggatgagctaggaagacctgaaataggctctctctaaattaatcaaattaatcctgaagccattctgcaatactgtctttaatgtatactcacttgttatagaagccagggttttttcccctaatttgtatcattgctatatgtgttattgtaccaaactacactgttttaattgctgtaaattttaatatgtcttagtatctgggtgtgggaatcttgaaagcatggagtttgtgttattcaccactgtattctcaaatatcagaagagtatctggcctactaagtgcacaataaacatagttaaaatgaa

SEQ ID NO: 145914 - DNA, 5122 bp, Homo sapiens; identical to SEQ ID NO: 145913
  Payload ID: 8932
  Gene Symbol:
  Gene Name: KIAA1143
  ENST ID: ENST00000627745
  CDS Start-End: 61-525

SEQ ID NO: 145915 - DNA, 1847 bp, Homo sapiens
  Payload ID: 8933
  Gene Symbol: KIAA1147
  Gene Name: KIAA1147
  ENST ID: ENST00000482493
  CDS Start-End: 66-1121
ctcctctcctctgagtcccagccccacagtggtgttcgcacttcagtgacagggcatccggaaacatggtagaatggtgcttacctcaagatattgaccttgaaggtgttgagttcaagtctatggccagtgggtcccataaaatccaatctgatttcatctatttccgaaaggggcccttcttcggcctggcctgctttgccaacatgcccgtggagagcgagctggaacgtggcgcgcggatgaagtctgtgggcatcctctctccctcctacacactgctttaccgctacatgcacttcttggagaaccaggttcggcaccagttggagatgccaggacattactctcatctggctgccttctatgaggacaaaaagggggtgctccatgctggtcccggcagaggcagcagcctgccccctgtctactggctgccttccatccaccgatacatgtaccctgagatgaagttctttggagaacagatcctcatcctctggaaatttgccttacttcgaaagcgcattttgatattttctcccccacctgtgggcgtggtgtgctatagagtgtactgctgctgctgcttggccaacgtttcactgcctggcatcgggggcaccattcctgagtccaaacctttcttctacgtgaacgtggctgacatcgagagcctggaggtagaggtgtcctatgtggcctgcaccacagagaagatattcgaggagaagcgggagctgtatgacgtctacgtggataaccagaatgtgaagacacaccacgaccacctgcagccgctgctgaagatcaacagtgctgacagggagaagtaccgccggctcaacgagcagaggcagatgctgttgtactcccaggaagtagaagaagactacaacccttgtgaagaggacctcttcgtgctgtttttcctagaacaaaacaaccggatatttcagactttgttggaggtgtctgccagtcaagacaaaactctgacagcagagcatgcccggggcatgggcctagacccccaaggagaccggagctttctcctggacctgctggaggcctatggcattgatgtcatgctggttatcgacaacccctgttgcccgtaggaggagccaacaggactgggagccacttcacgtgggatgtcagcagcccggagttcaccccagggccccagagggcctcattttttattaagttgacacaaaggaatattgtttatactttccaacaaacataatttttgcaatttcctttctgcccttttccctagagataaggtgagatcaccttggttttgtgtcctgccatgttaggatattggaatctgccactttctcccagagctgctggtcctctgggcttggtcatgggagttgtatcactaggagtaggctgagctctggaaacattgggatggactgttcagaaagtctgtgtggtctttgtcccttgatgtatttgagaataagacaaccacctgtcccctgtggccttagatgttcatctgcctaaaggcagaaactagaccagatgatcttttaaggtttttagtagttctaggagtctatagtcttgggatcaaatcccttttcttgttcattagggcaactttatgtcttctctgtttacttgagtagggaccacaaagagggaaaaaaggatgtttctgacaccaaatatgagcttatcttatggtcagaatgaaagaggttgcttatcagtgagctgaaaactaaaattatagaatgaagcctggaaaccttcctcaaagtaacttgatggtggccatgcaatgtaatgttcctctttgtctgaaccttcctcttctt

SEQ ID NO: 145916 - DNA, 7296 bp, Homo sapiens
  Payload ID: 8933
  Gene Symbol: KIAA1147
  Gene Name: KIAA1147
  Uniprot ID: A4D1U4
  ENST ID: ENST00000536163
  CDS Start-End: 1-1368
atggtggagcagggagacgcggcgccgctgctgcgctgggccgagggccccgccgtctccctgccgcaggccccgcagccgcaggcgggaggctggggccggggcggcggcgggggcgcccggccggccgcggagccgccccggaggcgggagcccgaggagccggccgccccggaggtgctgctgcagcccgggcgcctggagctgggcgacgtggaggaggaccaggtggtggccgtgttcgtggtcaccttcgacccccgctcgggaaacatggtagaatggtgcttacctcaagatattgaccttgaaggtgttgagttcaagtctatggccagtgggtcccataaaatccaatctgatttcatctatttccgaaaggggcccttcttcggcctggcctgctttgccaacatgcccgtggagagcgagctggaacgtggcgcgcggatgaagtctgtgggcatcctctctccctcctacacactgctttaccgctacatgcacttcttggagaaccaggttcggcaccagttggagatgccaggacattactctcatctggctgccttctatgaggacaaaaagggggtgctccatgctggtcccggcagaggcagcagcctgccccctgtctactggctgccttccatccaccgatacatgtaccctgagatgaagatcacacacccagctggctgcatgtctcagtttataaagttctttggagaacagatcctcatcctctggaaatttgccttacttcgaaagcgcattttgatattttctcccccacctgtgggcgtggtgtgctatagagtgtactgctgctgctgcttggccaacgtttcactgcctggcatcgggggcaccattcctgagtccaaacctttcttctacgtgaacgtggctgacatcgagagcctggaggtagaggtgtcctatgtggcctgcaccacagagaagatattcgaggagaagcgggagctgtatgacgtctacgtggataaccagaatgtgaagacacaccacgaccacctgcagccgctgctgaagatcaacagtgctgacagggagaagtaccgccggctcaacgagcagaggcagatgctgttgtactcccaggaagtagaagaagactacaacccttgtgaagaggacctcttcgtgctgtttttcctagaacaaaacaaccggatatttcagactttgttggaggtgtctgccagtcaagacaaaactctgacagcagagcatgcccggggcatgggcctagacccccaaggagaccggagctttctcctggacctgctggaggcctatggcattgatgtcatgctggttatcgacaacccctgttgcccgtaggaggagccaacaggactgggagccacttcacgtgggatgtcagcagcccggagttcaccccagggccccagagggcctcattttttattaagttgacacaaaggaatattgtttatactttccaacaaacataatttttgcaatttcctttctgcccttttccctagagataaggtgagatcaccttggttttgtgtcctgccatgttaggatattggaatctgccactttctcccagagctgctggtcctctgggcttggtcatgggagttgtatcactaggagtaggctgagctctggaaacattgggatggactgttcagaaagtctgtgtggtctttgtcccttgatgtatttgagaataagacaaccacctgtcccctgtggccttagatgttcatctgcctaaaggcagaaactagaccagatgatcttttaaggtttttagtagttctaggagtctatagtcttgggatcaaatcccttttcttgttcattagggcaactttatgtcttctctgtttacttgagtagggaccacaaagagggaaaaaaggatgtttctgacaccaaatatgagcttatcttatggtcagaatgaaagaggttgcttatcagtgagctgaaaactaaaattatagaatgaagcctggaaaccttcctcaaagtaacttgatggtggccatgcaatgtaatgttcctctttgtctgaaccttcctcttcttgggatgaattggtgaattgctaagggccaatgctggccttggagcttgcaagcaaattaattttccagtttagtctcttaagggttcaataatgctcttggagtaagttgggtatttttaaaggctgaagtttggactaccggaggatagagcaattgaagttcgagcaggatggagaagccactctaagtctcttcatctggacacgaattctctggaggcattagcagcagcacctctgggtcaacacagatttactggattccaaaatctagcaaggatctgagctggttaactcagagggtggagcatgatgctaacaagacggtttatcattttggacccctcacaaacacacttctctttagcagaggtgacattccttaggctaaataattggatccagggacataacagatttgttgagagaaaatgtggcagtgccttcacccgggacagtggtcaggaagccctgagcatccctgatggatttatccatcctcttctgaagtgctctgctctaggctgggtcctgttgccacctgcctgttctctggttggcttttgcaggagggcagcttacgtgtttgtcaaccagttagaaagccagttcctgtgggtcgagtttaggcctttttggccatagttgagaattttgacttgggatactgggttgttggtgacaaataatgtcttccttttcccccttcccgcctggctcggttatgggaatagccgtcagtgcatccatgtctgtgaccaacacccagccagactaatgtacacagcagggagaaataacattcaaatggtggttcacacatctcatctcaagataagattcttagggttcactgctttattcaaaagtgttttcactgtagctccttcatatggaatatcaaaactgaagaaattcacatgtggaaatgcaaatagacattgattaatcaaggtagcatctttatgtaaatatataaataagtttgggcattgaaatgtaaactgtacagctaatagacttttctcctctgcaatgtgggttgctgtcatttcagtaatgtgtatgtttacaaaagaaaaaaaaatctgtgtttcgaggttgaagcctcaccttttattctcctttacatgcaaccctctcttcttgcctctcaagggttgaggggtcctttctgtcaagtaatggttatttttcgtggtatcctgaggttcagggtgttttaagctgggggtaggtggttagaggcaggagtagaagtgaaaggaaaggtctgattctcctagaggacacaagaagacctcctttttctggaattagggaatctgccggaaggagctgtttgaggcatttctgctctgagccttctatatgcaaacactgcagttttaactgcaagctcagaagtgctggtgtaaacatagcagggtgagaatgaagttcctgttttttcctttgaatggtgagtcagggcttctgggttcccttaactttgtgcttgtctcggtagctttctgtctcacatctccacgtgtccaccctcctgctcatgcagagggccagggtatgggtggccccagaggagaacgtgccagtgaggcagtgccatgtttcaggtcataggggccttgggctcagctgaccccaatgcagaacttctccctttaagagagattccaataaattggtccttccctaccttgccagcttcttcataggaccagaaatcttgtgcagagcctctgcttggctgaacagcgtgtgctttatctcttcagttacctttgccactgttgagcatcctcagagtatgtcttgcctgggctatgaagtggagcctgtggcttcggaaatcacctttcgaagccttgctctatgccagattctgctccccaacatgacagattaacaggcacaacctaggatcctttgctaccagttctctactagggaattccacagtggcagcagaagctaggagccatgtggacctgcttttctgccagtcttgaaatattttctgagaaaccatctgcttttgttcagaagaaagtgctgaacatcgttcacagacttctaggtctgtaagctctttaggggcgggcattatgatgaccaccggcctcctggaggagggttggatacctgtggtgtgacaccttctgccaccatctcctgccgggcctcagccctcgcctgcctgagcaggcctagttctcctgtgaagctgtcagcctgatctcatgccacactgtgaaatgaactatgtgccagtttggaaatgattgctgacctgagatgctggctgggctgccctgttgttcctgaataagtcagaagaagttccaggtgggagtggaattcaggtttggggctcgttggtatccatgcaaaatatgacaaaggcctgttcaagagggcattttcaattctgtaggctcagcagatgatactgcccagcctttgggaaaatgtccagttggcccctggcttaggactctccacaaggagtttgaaatggtagggcttatcccctaccagactaaaagtatggcccaaattatgtgtttagaatttgcttggcctttaaacacgaaccattccctatgcctggtagagaccattccagtgtcagtgtcccacctgggacctgtacagtcctcagtaaattatgattgcaatgaattagaaggcttttgccttccatatccatcatccattatagcatctgtgcttccacctggttagggggagggaagctgaaatcattgatgtatcaatagaagtaatttagcttaggaacttgcatctataacttaccttgttttgttccactttaaagtcaagacaagaaagttaagatagcacacaggtgcacatgcttccagatgccacatgtgaacatttgttgatcatgtgactaccgatgacactttagctagaagataaattaaatcttagctaaatcattgtttttccttctggtggctatgaggatgaatttgctctcagtcttgatgcactgaaagcccttcaaacacagtaaaagatgaaatcactcatctttaaactgaggccttcagggaagcttttgtaaaggacagtaatgaattaggctttcagttttaggacatcaaccctccgagaaaaggcagaaacccgagggaccatttatttcccttcgaaactgtatagcccagggaatggattgagatgctttctccagaccctgtataggtcaaccttgcagaggtaaaggaggaggggcaggtggatgaataaaataggataatgctcagcttggcagtggacttgccttagtgtgatgacaggtctaacatgggcaagacaattagaatggggaccaatatgccaggcatgggcttttatctccctagtagatcccaagctagtaggcttggattctgccaaatggccagccctcctgtcttctccccgtaccttgtagttagaccgaggtgagaatcctgctgaccccagtcccatcccctctcatttcaggaaaacccttttgtgattcaggtagggggagaggaggagttaagggctccgtttactcccaagtcatggatttttaatattccatttttatcactaatatacctctcttcctagaagctactggagtattgagtgttgtgggaaaaggctaactgtgaattaagttaatgtttttcttataagaaatggaagtttatttttttattgatattactatgtgatgaactgagtatgcatatactgaaatggaaggaaattttaaaactattattctagaagaaatgggcagttttgtaatttggtggtggctgagaccccatagaagttttactatgtaaataatttggagagtgaataaggagattgtgctatgaaatcctgacagcgctctttaggaggcagacttgacagtcctaggaaggttgacataaaaataccaaccttcagtaaagctctagtacaaaaaagggtaaatgtcatcattcttatttttaggcctctttcttgagagaggtgggagtgggaggtagtgttataactggcactttaatttgtttttggaactagaatttaggggcagttggatgaaattgcaaatttagaaggggaataagaattttctagtgctatataaagaaatgatgatggagacaaaagccttgctttcctctttttagaatttattttcgatttttagcatactgtggggcttttagagctaatatgatctaaattcagaaaatttaattttcatagtaggccaggtgtgaattacttatgtttgctatagaatgcttatttagactaacaataaatttactttgctttctaaggccagtcagcgaatgtggggatgaggcaggatgttttaaatgagccagagatgatccacaaagtgaacagtcgacacagaggtctttgagttggatggttgcaaatatattgacattagagtgaaaactccttcctttgggtaaactaaagaaagataaagtatactaaaaaattttaagatggtgttatacaaaaaaaagtttgggtctaacgtgtccacaaagactgtcaagtgaagaatggtggagattcttggtgtttgagcagccaacctggatgagtgacttcagggacagagcagaggaaagcaaaatgaatttcctttatttacccaaaacttgttgactgaatttttgtataggtccgggaaaataagcctaaacaaatagttgtagccttagaaaaactgttttcccatttctttctgagttagaatcagcatagcctccctgtcgccttaaatgtaaaaatcctattttgattaataccccagcctaagagttatagcaatacgagagactgaatctatttttgtttcgggtctttacctcatagtatgaaattagtaagacactgcatagattttgccctgaatactggtgtgcccaggtatgccgtgctctctctctgtttccagtggtggtaattttaaggcctaaagaaagctggggttaatcctgaagctaaaagtaaatgtttcttgaattgattttgttctgtggtacaaataacatctatgaatatcatatctgtatatatctgaaccaagttgtgtgcagagaggttgatataactatatttacagaaaatgatttttacaattaaagttcacattttaacatgaa

SEQ ID NO: 145917 - DNA, 7296 bp, Homo sapiens; identical to SEQ ID NO: 145916
  Payload ID: 8933
  Gene Symbol: KIAA1147
  Gene Name: KIAA1147
  Uniprot ID: A4D1U4
  ENST ID: ENST00000575464
  CDS Start-End: 1-1368

SEQ ID NO: 145918 - DNA, 1847 bp, Homo sapiens; identical to SEQ ID NO: 145915
  Payload ID: 8933
  Gene Symbol: KIAA1147
  Gene Name: KIAA1147
  ENST ID: ENST00000574704
  CDS Start-End: 66-1121

SEQ ID NO: 145919 - DNA, 6398 bp, Homo sapiens
  Payload ID: 8934
  Gene Symbol: KIAA1161
  Gene Name: KIAA1161
  Uniprot ID: Q6NSJ0
  ENST ID: ENST00000297625
  CDS Start-End: 125-2269
gcgcaggggatcggcgggaagctctttcacccccgcttctgccgggctgtaactgcaatggagcaggttgagatgaactcagtcagatggccccacggcccgctcctttcttagcagcccactaatgctccagaaccctcaggagaagagccaggcctacccccgccgccgccggcctggctgctacgcataccgtcagaaccccgaggccatcgcagccgcagctatgtacaccttcctgcccgacaacttctcacctgccaagcccaagccttccaaagacctgaagccgctgctgggctccgcggttctggggctgctgcttgtgctggccgcggtggtggcctggtgctactacagcgtctccctacgcaaggcggagcgacttcgcgcggagctgctggacctgaaagctggcggcttctccatccgcaatcagaagggagagcaggtcttccgcctggccttccgctccggcgcgctggaccttgactcctgcagccgcgatggcgccctgctgggctgctcgctcacggccgacgggctgccgctgcacttcttcatccagactgtgcggcccaaggacacggtcatgtgctaccgcgtgcgctgggaggaggcagcgccgggccgggccgtggagcacgccatgttcttgggcgacgcggcggcccactggtatggtggcgccgagatgaggacgcaacactggcccatccgcctggatggccagcaggagccccagccgttcgtcaccagcgatgtctactcctccgacgccgcgtttgggggcatcctcgagcgctactggctatcttcgcgcgcggccgccatcaaagtcaatgactcagtgcccttccacctgggctggaacagcacggagcgctcgctgcggcttcaggcgcgctaccacgacacgccctacaagccacccgccggccgcgccgcagcgccagagctgagctaccgagtgtgcgtgggctcagacgtcacctccatccacaagtacatggtgcgtcgctacttcaacaagccgtcaagggtgccagcacccgaggccttccgagaccccatttggtccacatgggcgctgtacgggcgcgccgtggaccaggacaaggtgctgcgttttgcccaacagatccgcctgcaccacttcaacagcagccacctggaaatcgacgacatgtacacacctgcttatggcgacttcgacttcgatgaggtcaaattccccaacgccagcgacatgttccgccgcctgcgcgacgccggcttccgcgtcacgctctgggtgcacccttttgtcaactacaactcgtcgcgcttcggcgagggcgtggagcgcgagctgttcgtgcgcgaacccacgggccggttacctgcgctggtgcgctggtggaacggcatcggcgcggtgctagacttcacgcacccaaaggcccgcgactggttccagggacacctgcggcggctgcgctctcgctactccgtggcttccttcaagttcgacgcgggcgaggtcagctacctgccgcgggacttcagcacctaccggccgctgccggaccccagcgtctggagccggcgctacactgagatggcgctgcccttcttctcgctggcggaggtgcgcgtaggctaccagtcacagaacatctcctgcttcttccgcctggtggatcgcgactctgtgtggggctacgacctggggttgcgctcactcatccccgcggtgctcaccgtcagcatgctgggctacccattcatcctacccgatatggtgggcggcaacgccgtgccccagcggacagccggcggcgatgtgcccgagcgcgagctctacattcgctggctggaagtggccgcctttatgccggccatgcagttctctatcccgccctggcgctacgacgcggaagtggtggccatcgcgcagaagttcgccgccctgcgggcctcgcttgtggcaccgctgttgcttgagctggcgggcgaggtcaccgacacgggtgaccctatcgtgcgccccctttggtggattgcgcccggcgacgagacagctcaccgtatcgactcgcagttccttattggggacacgctgcttgtggccccggtgctggagccaggcaagcaggagcgcgacgtctatttgcccgccggcaagtggcgcagctacaagggtgagcttttcgacaagacgccggtgctgctcaccgattacccggtcgacctggatgagatcgcctactttacctgggcgtcctgacccagcccagggcccggtaaccgcaaagcccccagtcttcatgcagaccttgaaccctccgtcacacccgcaccatgtactcccaggaacctcccacctctataccacccattaagtggctgctgacttaaatgtgctggaaccagctgctgaaggtggggcctagggagggggcactgaagcaatctcctgctccaacgcacaatccttactgtgccctttccacccccacactcacaccaatctgcagaaacctcttccctggggtggaagccagagagcttagaggaaaaaggtcagctctcttcctgttatacatggttatacatggttggggtttaaaagcacaaagagaaacctccccctcctggctttcgtggccatctttgtccatcttaggtggggacttgatcttatttaaggtctccaaatagcccccaccacacttagaacgtgtgttttcttagtgttagaagccaggccctgagtccccagcactcacctgaactgtggctgatttggtcccagtccagctggggaggtgtttggctgacaaggaggcaagagatcccctcccagggaacaggaggactgggcttagcacagagccatcatcatgttcccaatttgtgaagagactcctaacactgcactaacccatttgtgtacatacatgggctcagccctgggccaaatgtgcctgatgggaacagacttgcagggccatgcaggccagacttcgtgccttaactgaagagtgtgcgtgtgtgtgtgtgagagagagagagagagagaaacacgcatcatgggtccctgatctatgaaatgaacacaacctctctgaggctggatgatctggaggaagggggcatggagcaaatttgaggctctgattgctgagccagcctcctcccaggcggtttccccaggactctcgtaggaaataaatagccctttcaagattcctcagctgcctcaccccctgcacatgtgcctggggtgtggcctagaagggagtgatgttcttactctggtggtctgtgcttctgaacacaggctacatgcacacactgacaactaccaataaacagacaggggaaggtctttcatctcagccattttctcttccccccgcccccccttagatggagtcttgctctgtcacccaggttggagtgcagtggcacaatcagctcactgcaacccctcctcctaggttcaagcgattgagtagctgagattacaggcatgcatcactatgcctggctttttgtattttttagtagagatggggtttaccatgttggccaggctagtctcaaactcctgacctagtgatgcacccaccttggcctcccaaagtgttgggattacaggcatgagccaccacgccagccattttctctttctaagaagagcaacctcagccggagtgagttttttctgactttgcagctgagtctggagaaaagtggcatgccagagcgggtcggtgggaaacagggtgaactttagcttccatcaacagctctggtagcaaaaccagtcccctaccccctagagaatgcatccgtttccccacctgatatggtttggctgtgtccccacctaaaactcatcttgaattgtagctcccataattgccatgtgttgtgggaaggacccagtgggagataattgaaatatgggggcagtttccgccatactgttctggtgatagtgaatagatctcatgagagctgatgattttataagaggtttccccttttgcttagttctcattctctcttgcctgccgccatgtaagacgtgcctttctgtcatgcttgtgaggcctccccagccacgtggagctgtgagttcattaaacctctttttctttataaattacccagtcttggttatgtctttatcagcactgtgaaaatgaacctatacagtaaattggtaccagtagagtggggcgctgctgtaaatacccaaaaatgtggaagcaactttggaactgggtaacaggcagaggttggaacagtttggagggatcagaagacaggaaaatgtgggaaagtttgggacttcctagagacttgttaaatggctttgaccaaaatgctgataatgattgggacatgaaatccaggctgagttggtctcagatagcgatgaggaacttgtttggtactggagtaaaggtgactcttgctatattttagcaaagagactggctgcattttgcccctgccctagagatttgtggaactttgaactcgagggagatgatttagggtatctggcagaagaaatttctaagcagcaaagcattcatgaggtgacttgggtgctgttaaaagcattcagttttaaaagggaaacagactataaaagtttggaaaatttgcagcctgatgatgagatagaaaagaaaaacccattttctgaggataaattcaagccccctgcagaaatttgcataagtaacaaggagccaaatgttaatcactaagacatggggaaaatgtctgcagggcatgtcagagacctttgcagcagtgcctcccatcacaggcctggaggcctaggagggaaaaaatggttttgtgggccaggcccaaggtccccttgctgtgtgcagcccagggacttggtaccatgcatcccagctgctctagtcatggctaaaaggggccaagatacagctcaggccttggcttcagagggtgcaagccccaagtcttggcatcttccacgtagtgttgagcctgcaggtgcacagaagtcaagaactgaggtttgggaacctctgcctagatttcagagaatgtatggaaatgcatgtatgtccaggcagaagtttgctacaggagtgaggccctcatggagaacctctgttaaggcaatgtggaaggggaagcccccacacagagaccccactgggacactgcctagtagagctgtcagaagaaggccaccgtcctccagacatcagaatggtatatccactgacagcttgcaccatgcacctggaaaagccacagacactcaacgccagcctgtaaaagcaaccgagaagtaggctgtaccctgcaatgccataggggtggagctgcccaagaccatgggaacccacctcctgcatcagtgtgacctggatgtgagacatggagtcaaaggagaccattttggagctttaagatttaactgccctgctggatttcagacttgcatggggcctttagccacttcgttttggccaacttctcccacttgaaatgggtgtatttagccaatgcctgtacctccgttgtatctaggaagtaactaactagcctttgattttacaggctcataggtggaagggacttgccttgtttcagatgagactttggagtatggacttttgagttaatgctgaaatgagttaagactttgggggactgttgggaaggcatgattgatttttaaatgagaggacatgagatttgggaggggccagggagagaatgatatggtttggctgtgtccccatccaaatatcaccttaaattgtagctcccataattgtgggagggacctggtgggagataattgaatcataggggcagtttctcccatactgttctggtggtagtgaataagtctcacgagatctgatggtttaataaggggtttccccttttgcttggctctcattctctcttgtctgctgccatgtaagatgtgccttttgccttccaccatgattgtgaggcctcccagccacatggaactgtgagttcattaaacctctttttcttcataaattacccagtctcgggtatgtctttatcagcagtgtgaaaacagactaatacaccactcctctaccttctttattttctcagtgtggaaaatgcctgatgaaagctttggggccctcacagatgcacaactcaagtgctgattctatcacttatctaccagctctgtgaccttgaacaagccgcttaaccttgctaagcctctgttttctcatatgtcaaatggtgataataatgcctacctcccgaggttgttgtaagaattataagcacaaatgtatgtaaagtgcctggcacaaagtaggtgctcaataaatggtagctattataat

SEQ ID NO: 145920 - DNA, 480 bp, Homo sapiens
  Payload ID: 8934
  Gene Symbol: KIAA1161
  Gene Name: KIAA1161
  ENST ID: ENST00000379142
  CDS Start-End: 1-480
ttcctgcccgacaacttctcacctgccaagcccaagccttccaaagacctgaagccgctgctgggctccgcggttctggggctgctgcttgtgctggccgcggtggtggcctggtgctactacagcgtctccctacgcaaggcggagcgacttcgcgcggagctgctggacctgaaagctggcggcttctccatccgcaatcagaagggagagcaggagccccagccgttcgtcaccagcgatgtctactcctccgacgccgcgtttgggggcatcctcgagcgctactggctatcttcgcgcgcggccgccatcaaagtcaatgactcagtgcccttccacctgggctggaacagcacggagcgctcgctgcggcttcaggcgcgctaccacgacacgccctacaagccacccgccggccgcgccgcagcgccagagctgagctaccgagtgtgcgtgggctcagacgtcacctccatc

SEQ ID NO: 145921 - DNA, 2991 bp, Homo sapiens
  Payload ID: 8935
  Gene Symbol: KIAA1191
  Gene Name: KIAA1191
  Uniprot ID: Q96A73
  ENST ID: ENST00000298569
  CDS Start-End: 535-1452
ggcgtttcctctcggggctggcggattccacactcggagctgcggctccacaactcgctgggcggcgaagggcatggggagggggcgggtctcgcgatcgtggacaacaactcccagcatgccctgtgctccgctgggccaagtctcgcgcgagatcccgcggtctccggaggctttatctgcagtgctgcctgcccgctgggtggtactgctacctagtgggtcttggggaccttcgaaatcgccgccgctctcacaatggcttgggtccagactgcgccacagcctctcgggagacgtgggccctcggaacctttttagtgccggactccgggccgcaggcagtcccgcggcagcaggatcacagaacctctggatggactcttcctgggaagctttgctactttgcagcagctggaccatgttcctcattaacatctgtctgtccgcttagtcatcacatcatttcactgtggtggcagggactcagctcggaattctgtatagaaaaagcacctggatcccagtctttcaatggcttcaagacaaccagaagtgcctgctcttgaggctagtgcgcctctaggcaagatgtccctgcccatcgggatataccgccgggcagtcagctatgatgataccctcgaggaccctgcgcccatgactcctcctccatcggacatgggcagcgtcccttggaagccagtgattccagagcgcaagtatcagcacctcgccaaggtggaggaaggagaggccagtctaccctcccctgccatgaccctgtcatcagccattgacagtgtggacaaggtcccagtggtgaaggctaaagctacccatgtcatcatgaattctctgatcacaaaacagacccaggaaagcattcagcattttgagcgacaggcagggctgagagatgctggctacacaccccacaagggcctcaccaccgaggagaccaagtaccttcgagtggccgaagcactccacaaactaaagttacagagtggagaggtaacaaaagaagagaggcagcctgcatcagcccagtccaccccaagcaccactccgcactcttcacctaagcagaggcccaggggctggttcacttctggttcttccacagccttacctggcccaaatcctagcaccatggactctggaagtggggataaggacagaaacttgtcagataagtggagcctctttggaccgagatcccttcagaagtacgattctggaagttttgccacccaggcctaccgaggagcccagaagccctctccattggaactgatacgtgcccaggccaaccgaatggctgaagatccagcagccttgaagccccccaagatggacatcccagtgatggaaggaaagaaacagccaccacgggcccataacctcaaaccccgtgacctgaatgtgctcacacccactggcttctagagccctctttccagggattctggtaaaggtggtttcttgcatcccactccccttttaccttggctttgacataggaaaggtatatttaaaaacttaatcagctgggcgtggtggctcacgcctgtaatcccagcactttgggaggccaaggtaggtggatacctgaggtcaggagttcaagaccagcctggccaacatggtgaaaccccgtctctactaaaaatacaaaaattagctgggcgtggtggtgggcgcctgtagtcccagctacttgggaggctgaggcaggagaatcgcctgaacccaggaagcagatgttgtaccgagctgagatcatgccattacactccagcctgggcgacagaacgagacgccatcaataaataaataaataaagtaaagtaaaaaacctattaaattgaggctagagctggagatgtaattggtttttgagaaacattagtataaagcttgcccttgttgtgtggaagaagccattttgtactgctttaaagttagactaatattctcagcacgggtgtatggggacctcattacctatttttttcatcatttaccctaggtaagaactttgatcactgcttactaggtaaagaatgtttgtactgttccaaaacccaggcttctttattcctttaccactatccatgtgagcattgacaaatcatggcttagaggtgctcactgactcgctaagacgactttggccctgttgatgactggtgctgtgctccagccttatcagttaggggacccaaggtttgtttgggacctgggtacaggtaaaagccagacttggcagggacccctctttctaggctgaaccttgagtccccctgctttttggcagacctaatggatcactgtcttgcagctagttcttcatgtggggcctcttaggccagtgccggaggaggcatgctcctctttctatgccacagaacaaacactactctagcagagcctttcttgcactttaaagtgagattaatttagctgtaatttggttaaaaacttcctaagagagaaaattaagtctactgatttggtataggtaaatggacattaaacttttttaaagtaaaggagatggtagataccgttagattatagtcttgaggttcatgtgaagccagtggtgttaacttactttgatttccttgttcaggtcagggcctggaacgcctgtgcggggaggtcactcaattcaaaattttctgtatgaaagcatttttcaccaaaatgagcctcatccctttatgcaacacataaccttactgagggagggaaatacagaagccacctttttatttctcttcactgtgtacaagttcacttgttgtcttgaacactgtctcaaatacctgctttttgttttggatagtaccttgtctgtataagaagctggcctttccatagagaggccctggagtctaaaattatgagaacaattaatttatttgtgtcttctattatgatctcgttttgacaataaaaatccttactactttctcaaat

SEQ ID NO: 145922 - DNA, 2700 bp, Homo sapiens
  Payload ID: 8935
  Gene Symbol: KIAA1191
  Gene Name: KIAA1191
  Uniprot ID: Q96A73
  ENST ID: ENST00000393725
  CDS Start-End: 302-1162
tggtactgctacctagtgggtcttggggaccttcgaaatcgccgccgctctcacaatggcttgggtccagactgcgccacagcctctcgggagacgtgggccctcggaacctttttagtgccggactccgggccgcaggcagtcccgcggcagcaggatcacagaacctctggatggactcttcctgggaagctttgctactttgcagcagctggaccatgttcctcattaacatctgtctgtccgcttagtcatcacatcatttcactgtgctcttgaggctagtgcgcctctaggcaagatgtccctgcccatcgggatataccgccgggcagtcagctatgatgataccctcgaggaccctgcgcccatgactcctcctccatcggacatgggcagcgtcccttggaagccagtgattccagagcgcaagtatcagcacctcgccaaggtggaggaaggagaggccagtctaccctcccctgccatgaccctgtcatcagccattgacagtgtggacaaggtcccagtggtgaaggctaaagctacccatgtcatcatgaattctctgatcacaaaacagacccaggaaagcattcagcattttgagcgacaggcagggctgagagatgctggctacacaccccacaagggcctcaccaccgaggagaccaagtaccttcgagtggccgaagcactccacaaactaaagttacagagtggagaggtaacaaaagaagagaggcagcctgcatcagcccagtccaccccaagcaccactccgcactcttcacctaagcagaggcccaggggctggttcacttctggttcttccacagccttacctggcccaaatcctagcaccatggactctggaagtggggataaggacagaaacttgtcagataagtggagcctctttggaccgagatcccttcagaagtacgattctggaagttttgccacccaggcctaccgaggagcccagaagccctctccattggaactgatacgtgcccaggccaaccgaatggctgaagatccagcagccttgaagccccccaagatggacatcccagtgatggaaggaaagaaacagccaccacgggcccataacctcaaaccccgtgacctgaatgtgctcacacccactggcttctagagccctctttccagggattctggtaaaggtggtttcttgcatcccactccccttttaccttggctttgacataggaaaggtatatttaaaaacttaatcagctgggcgtggtggctcacgcctgtaatcccagcactttgggaggccaaggtaggtggatacctgaggtcaggagttcaagaccagcctggccaacatggtgaaaccccgtctctactaaaaatacaaaaattagctgggcgtggtggtgggcgcctgtagtcccagctacttgggaggctgaggcaggagaatcgcctgaacccaggaagcagatgttgtaccgagctgagatcatgccattacactccagcctgggcgacagaacgagacgccatcaataaataaataaataaagtaaagtaaaaaacctattaaattgaggctagagctggagatgtaattggtttttgagaaacattagtataaagcttgcccttgttgtgtggaagaagccattttgtactgctttaaagttagactaatattctcagcacgggtgtatggggacctcattacctatttttttcatcatttaccctaggtaagaactttgatcactgcttactaggtaaagaatgtttgtactgttccaaaacccaggcttctttattcctttaccactatccatgtgagcattgacaaatcatggcttagaggtgctcactgactcgctaagacgactttggccctgttgatgactggtgctgtgctccagccttatcagttaggggacccaaggtttgtttgggacctgggtacaggtaaaagccagacttggcagggacccctctttctaggctgaaccttgagtccccctgctttttggcagacctaatggatcactgtcttgcagctagttcttcatgtggggcctcttaggccagtgccggaggaggcatgctcctctttctatgccacagaacaaacactactctagcagagcctttcttgcactttaaagtgagattaatttagctgtaatttggttaaaaacttcctaagagagaaaattaagtctactgatttggtataggtaaatggacattaaacttttttaaagtaaaggagatggtagataccgttagattatagtcttgaggttcatgtgaagccagtggtgttaacttactttgatttccttgttcaggtcagggcctggaacgcctgtgcggggaggtcactcaattcaaaattttctgtatgaaagcatttttcaccaaaatgagcctcatccctttatgcaacacataaccttactgagggagggaaatacagaagccacctttttatttctcttcactgtgtacaagttcacttgttgtcttgaacactgtctcaaatacctgctttttgttttggatagtaccttgtctgtataagaagctggcctttccatagagaggccctggagtctaaaattatgagaacaattaatttatttgtgtcttctattatgatctcgttttgacaataaaaatccttactactttctcaaa

SEQ ID NO: 145923 - DNA, 1243 bp, Homo sapiens
  Payload ID: 8935
  Gene Symbol: KIAA1191
  Gene Name: KIAA1191
  Uniprot ID: Q96A73
  ENST ID: ENST00000510164
  CDS Start-End: 220-1137
actgctacctagtgggtcttggggaccttcgaaatcgccgccgctctcacaatggcttgggtccagactgcgccacagcctctcgggagacgtgggccctcggaacctttttagtgccggactccgggccgcaggcagtcccgcggcagcaggatcacaggtggcagggactcagctcggaattctgtatagaaaaagcacctggatcccagtctttcaatggcttcaagacaaccagaagtgcctgctcttgaggctagtgcgcctctaggcaagatgtccctgcccatcgggatataccgccgggcagtcagctatgatgataccctcgaggaccctgcgcccatgactcctcctccatcggacatgggcagcgtcccttggaagccagtgattccagagcgcaagtatcagcacctcgccaaggtggaggaaggagaggccagtctaccctcccctgccatgaccctgtcatcagccattgacagtgtggacaaggtcccagtggtgaaggctaaagctacccatgtcatcatgaattctctgatcacaaaacagacccaggaaagcattcagcattttgagcgacaggcagggctgagagatgctggctacacaccccacaagggcctcaccaccgaggagaccaagtaccttcgagtggccgaagcactccacaaactaaagttacagagtggagaggtaacaaaagaagagaggcagcctgcatcagcccagtccaccccaagcaccactccgcactcttcacctaagcagaggcccaggggctggttcacttctggttcttccacagccttacctggcccaaatcctagcaccatggactctggaagtggggataaggacagaaacttgtcagataagtggagcctctttggaccgagatcccttcagaagtacgattctggaagttttgccacccaggcctaccgaggagcccagaagccctctccattggaactgatacgtgcccaggccaaccgaatggctgaagatccagcagccttgaagccccccaagatggacatcccagtgatggaaggaaagaaacagccaccacgggcccataacctcaaaccccgtgacctgaatgtgctcacacccactggcttctagagccctctttccagggattctggtaaaggtggtttcttgcatcccactccccttttaccttggctttgacataggaaaggtatatttaaaaacttaatcagctggg

SEQ ID NO: 145924 - DNA, 512 bp, Homo sapiens
  Payload ID: 8935
  Gene Symbol: KIAA1191
  Gene Name: KIAA1191
  ENST ID: ENST00000506983
  CDS Start-End: 226-512
ggctttatctgcagtgctgcctgcccgctgggtggtactgctacctagtgggtcttggggaccttcgaaatcgccgccgctctcacaatggcttgggtccagactgcgccacagcctctcgggagacgtgggccctcggaacctttttagtgccggactccgggccgcaggcagtcccgcggcagcaggatcacagctcttgaggctagtgcgcctctaggcaagatgtccctgcccatcgggatataccgccgggcagtcagctatgatgataccctcgaggaccctgcgcccatgactcctcctccatcggacatgggcagcgtcccttggaagccagtgattccagagcgcaagtatcagcacctcgccaaggtggaggaaggagaggccagtctaccctcccctgccatgaccctgtcatcagccattgacagtgtggacaaggtcccagtggtgaaggctaaagctacccatgtcatcatgaattctctgatcacaaaacagaccca

SEQ ID NO: 145925 - DNA, 639 bp, Homo sapiens
  Payload ID: 8935
  Gene Symbol: KIAA1191
  Gene Name: KIAA1191
  ENST ID: ENST00000503082
  CDS Start-End: 430-639
gcagtgctgcctgcccgctgggtggtactgctacctagtgggtcttggggaccttcgaaatcgccgccgctctcacaatggcttgggtccagactgcgccacagcctctcgggagacgtgggccctcggaacctttttagtgccggactccgggccgcaggcagtcccgcggcagcaggatcacagaacctctggatggactcttcctgggaagctttgctactttgcagcagctggaccatgttcctcattaacatctgtctgtccgcttagtcatcacatcatttcactgtggtggcagggactcagctcggaattctgtatagaaaaagcacctggatcccagtctttcaatggcttcaagacaaccagaagtgcctggtaaacttaattctttttgctcttgaggctagtgcgcctctaggcaagatgtccctgcccatcgggatataccgccgggcagtcagctatgatgataccctcgaggaccctgcgcccatgactcctcctccatcggacatgggcagcgtcccttggaagccagtgattccagagcgcaagtatcagcacctcgccaaggtggaggaaggagaggccagtctaccctcccctgccatgaccctgtcatcagccattgac

SEQ ID NO: 145926 - DNA, 486 bp, Homo sapiens
  Payload ID: 8935
  Gene Symbol: KIAA1191
  Gene Name: KIAA1191
  ENST ID: ENST00000504688
  CDS Start-End: 291-486
ggtactgctacctagtgggtcttggggaccttcgaaatcgccgccgctctcacaatggcttgggtccagactgcgccacagcctctcgggagacgtgggccctcggaacctttttagtgccggactccgggccgcaggcagtcccgcggcagcaggatcacaggttggaatgcagtggcacgatcttggctctctgcaacctccgcctcctgggttcaagcaattctcctgcctcagtctcccaagtagctgggactacagctcttgaggctagtgcgcctctaggcaagatgtccctgcccatcgggatataccgccgggcagtcagctatgatgataccctcgaggaccctgcgcccatgactcctcctccatcggacatgggcagcgtcccttggaagccagtgattccagagcgcaagtatcagcacctcgccaaggtggaggaaggagaggccagtctaccctcccctgccatgaccctgt

SEQ ID NO: 145927 - DNA, 560 bp, Homo sapiens
  Payload ID: 8935
  Gene Symbol: KIAA1191
  Gene Name: KIAA1191
  ENST ID: ENST00000533553
  CDS Start-End: 331-453
ggtactgctacctagtgggtcttggggaccttcgaaatcgccgccgctctcacaatggcttgggtccagactgcgccacagcctctcgggagacgtgggccctcggaacctttttagtgccggactccgggccgcaggcagtcccgcggcagcaggatcacagaacctctggatggactcttcctgggaagctttgctactttgcagcagctggaccatgttcctcattaacatctgtctgtccgcttagtcatcacatcatttcactgtggtggcagggactcagctcggaattctgtatagaaaaagcacctggatcccagtctttcaatggcttcaagacaaccagaagtgcctgaaactaaagttacagagtggagaggtaacaaaagaagagaggcagcctgcatcagcccagtccaccccaagcaccactccgcactcttcacctaagcagaggcccaggggctggttcacttctggttcttccacagccttacctggcccaaatcctagcaccatggactctggaagtggggataaggacagaaacttgtcag

SEQ ID NO: 145928 - DNA, 2452 bp, Homo sapiens
  Payload ID: 8935
  Gene Symbol: KIAA1191
  Gene Name: KIAA1191
  ENST ID: ENST00000620366
  CDS Start-End: 243-917
ggtctccggaggctttatctgcagtgctgcctgcccgctgggtggtactgctacctagtgggtcttggggaccttcgaaatcgccgccgctctcacaatggcttgggtccagactgcgccacagcctctcgggagacgtgggccctcggaacctttttagtgccggactccgggccgcaggcagtcccgcggcagcaggatcacaggtggaggaaggagaggccagtctaccctcccctgccatgaccctgtcatcagccattgacagtgtggacaaggtcccagtggtgaaggctaaagctacccatgtcatcatgaattctctgatcacaaaacagacccaggaaagcattcagcattttgagcgacaggcagggctgagagatgctggctacacaccccacaagggcctcaccaccgaggagaccaagtaccttcgagtggccgaagcactccacaaactaaagttacagagtggagaggtaacaaaagaagagaggcagcctgcatcagcccagtccaccccaagcaccactccgcactcttcacctaagcagaggcccaggggctggttcacttctggttcttccacagccttacctggcccaaatcctagcaccatggactctggaagtggggataaggacagaaacttgtcagataagtggagcctctttggaccgagatcccttcagaagtacgattctggaagttttgccacccaggcctaccgaggagcccagaagccctctccattggaactgatacgtgcccaggccaaccgaatggctgaagatccagcagccttgaagccccccaagatggacatcccagtgatggaaggaaagaaacagccaccacgggcccataacctcaaaccccgtgacctgaatgtgctcacacccactggcttctagagccctctttccagggattctggtaaaggtggtttcttgcatcccactccccttttaccttggctttgacataggaaaggtatatttaaaaacttaatcagctgggcgtggtggctcacgcctgtaatcccagcactttgggaggccaaggtaggtggatacctgaggtcaggagttcaagaccagcctggccaacatggtgaaaccccgtctctactaaaaatacaaaaattagctgggcgtggtggtgggcgcctgtagtcccagctacttgggaggctgaggcaggagaatcgcctgaacccaggaagcagatgttgtaccgagctgagatcatgccattacactccagcctgggcgacagaacgagacgccatcaataaataaataaataaagtaaagtaaaaaacctattaaattgaggctagagctggagatgtaattggtttttgagaaacattagtataaagcttgcccttgttgtgtggaagaagccattttgtactgctttaaagttagactaatattctcagcacgggtgtatggggacctcattacctatttttttcatcatttaccctaggtaagaactttgatcactgcttactaggtaaagaatgtttgtactgttccaaaacccaggcttctttattcctttaccactatccatgtgagcattgacaaatcatggcttagaggtgctcactgactcgctaagacgactttggccctgttgatgactggtgctgtgctccagccttatcagttaggggacccaaggtttgtttgggacctgggtacaggtaaaagccagacttggcagggacccctctttctaggctgaaccttgagtccccctgctttttggcagacctaatggatcactgtcttgcagctagttcttcatgtggggcctcttaggccagtgccggaggaggcatgctcctctttctatgccacagaacaaacactactctagcagagcctttcttgcactttaaagtgagattaatttagctgtaatttggttaaaaacttcctaagagagaaaattaagtctactgatttggtataggtaaatggacattaaacttttttaaagtaaaggagatggtagataccgttagattatagtcttgaggttcatgtgaagccagtggtgttaacttactttgatttccttgttcaggtcagggcctggaacgcctgtgcggggaggtcactcaattcaaaattttctgtatgaaagcatttttcaccaaaatgagcctcatccctttatgcaacacataaccttactgagggagggaaatacagaagccacctttttatttctcttcactgtgtacaagttcacttgttgtcttgaacactgtctcaaatacctgctttttgttttggatagtaccttgtctgtataagaagctggcctttccatagagaggccctggagtctaaaattatgagaacaattaatttatttgtgtcttctattatgatctcgttttgacaataaaaatccttactactttctc

SEQ ID NO: 145929 - DNA, 2631 bp, Homo sapiens
  Payload ID: 8935
  Gene Symbol: KIAA1191
  Gene Name: KIAA1191
  Uniprot ID: Q96A73
  ENST ID: ENST00000614420
  CDS Start-End: 236-1096
ggtctccggaggctttatctgcagtgctgcctgcccgctgggtggtactgctacctagtgggtcttggggaccttcgaaatcgccgccgctctcacaatggcttgggtccagactgcgccacagcctctcgggagacgtgggccctcggaacctttttagtgccggactccgggccgcaggcagtcccgcggcagcaggatcacagctcttgaggctagtgcgcctctaggcaagatgtccctgcccatcgggatataccgccgggcagtcagctatgatgataccctcgaggaccctgcgcccatgactcctcctccatcggacatgggcagcgtcccttggaagccagtgattccagagcgcaagtatcagcacctcgccaaggtggaggaaggagaggccagtctaccctcccctgccatgaccctgtcatcagccattgacagtgtggacaaggtcccagtggtgaaggctaaagctacccatgtcatcatgaattctctgatcacaaaacagacccaggaaagcattcagcattttgagcgacaggcagggctgagagatgctggctacacaccccacaagggcctcaccaccgaggagaccaagtaccttcgagtggccgaagcactccacaaactaaagttacagagtggagaggtaacaaaagaagagaggcagcctgcatcagcccagtccaccccaagcaccactccgcactcttcacctaagcagaggcccaggggctggttcacttctggttcttccacagccttacctggcccaaatcctagcaccatggactctggaagtggggataaggacagaaacttgtcagataagtggagcctctttggaccgagatcccttcagaagtacgattctggaagttttgccacccaggcctaccgaggagcccagaagccctctccattggaactgatacgtgcccaggccaaccgaatggctgaagatccagcagccttgaagccccccaagatggacatcccagtgatggaaggaaagaaacagccaccacgggcccataacctcaaaccccgtgacctgaatgtgctcacacccactggcttctagagccctctttccagggattctggtaaaggtggtttcttgcatcccactccccttttaccttggctttgacataggaaaggtatatttaaaaacttaatcagctgggcgtggtggctcacgcctgtaatcccagcactttgggaggccaaggtaggtggatacctgaggtcaggagttcaagaccagcctggccaacatggtgaaaccccgtctctactaaaaatacaaaaattagctgggcgtggtggtgggcgcctgtagtcccagctacttgggaggctgaggcaggagaatcgcctgaacccaggaagcagatgttgtaccgagctgagatcatgccattacactccagcctgggcgacagaacgagacgccatcaataaataaataaataaagtaaagtaaaaaacctattaaattgaggctagagctggagatgtaattggtttttgagaaacattagtataaagcttgcccttgttgtgtggaagaagccattttgtactgctttaaagttagactaatattctcagcacgggtgtatggggacctcattacctatttttttcatcatttaccctaggtaagaactttgatcactgcttactaggtaaagaatgtttgtactgttccaaaacccaggcttctttattcctttaccactatccatgtgagcattgacaaatcatggcttagaggtgctcactgactcgctaagacgactttggccctgttgatgactggtgctgtgctccagccttatcagttaggggacccaaggtttgtttgggacctgggtacaggtaaaagccagacttggcagggacccctctttctaggctgaaccttgagtccccctgctttttggcagacctaatggatcactgtcttgcagctagttcttcatgtggggcctcttaggccagtgccggaggaggcatgctcctctttctatgccacagaacaaacactactctagcagagcctttcttgcactttaaagtgagattaatttagctgtaatttggttaaaaacttcctaagagagaaaattaagtctactgatttggtataggtaaatggacattaaacttttttaaagtaaaggagatggtagataccgttagattatagtcttgaggttcatgtgaagccagtggtgttaacttactttgatttccttgttcaggtcagggcctggaacgcctgtgcggggaggtcactcaattcaaaattttctgtatgaaagcatttttcaccaaaatgagcctcatccctttatgcaacacataaccttactgagggagggaaatacagaagccacctttttatttctcttcactgtgtacaagttcacttgttgtcttgaacactgtctcaaatacctgctttttgttttggatagtaccttgtctgtataagaagctggcctttccatagagaggccctggagtctaaaattatgagaacaattaatttatttgtgtcttctattatgatctcgttttgacaataaaaatccttactactttctc

SEQ ID NO: 145930 - DNA, 7824 bp, Homo sapiens
  Payload ID: 8936
  Gene Symbol: KIAA1210
  Gene Name: KIAA1210
  Uniprot ID: Q9ULL0
  ENST ID: ENST00000402510
  CDS Start-End: 1-5130
atgagggccggctggacgcctcgaggcttctctgcctttcacgcttctctccttcctggccggcacccctacctggctcacctgggccccagggaccgaggggccaggattggaagtcgagcgtattcccaaggctgttgcagttgtctttggttgacttacaaaggcaagaaggagggaagcaccaagggggagcttggcccagctgcagtgactgacctggaaatacctagttattcccggggcttcctgccctgcacaccgcgattccctaccacttggtgcaggggacctggatgcttttgtggcactgcagtgattgctggtaatcttggggatctggccaggatagtgggcccctcacatcatgctagtcagcttctcctactccaagaacaggattcaggaaatcatcctacaatggctgaatcactaagtgaaatttctgacagtctggatgttctggaggccggtgatgagggaaagaagaaatgcaaatttaaagcccttaagagcttttttgttaagaagaaggaaaaagaagccgaagatacccaggaagaagaaatgctagaactgagcttgtccagcagcaacattaacatctcttctctgcagcccgttcgggaaaatcaaccaactaaggccagggccaagagcagcatggggagcaaagccctatcccatgatagcatcttcatgttgggtcctgagcctgaaagatcagcaagtaaaatgtttccttctatggatccccagagaggcagacctcagcagagatcccatatttccagaactctgcctaaacctaggagtaaggttcctggagttgtgtctggagccatgtcaggagctgtgcttcaaaatgtgcctacaagtgcagtctgggttgctggccccaagatcactgagaacccaccatcgcgccgacgccgactcagcatcatcccacctgttatccaacctgaaataatttctaagaacttggtagaaatctctctcgatgatgagtcacctaagaatccacaaaagaaggctttaccacataagagtttgacagcgactcagagcttctctgagttatcatctggacctgattgctcacagtccttgactgcatttgccacacttgcctctaccagtagcacccagctgcccattggtttcagcaccccagccaccacccagggctgtttggattcttcagctgctcgccacaaaatgactttaaatccccgcaaacaaaagaagaaccttcaagtgattattcgtggccttccagtgtggttcagtcatttccagggtattttagagggatccctgcagtgtgtcactcagacattagaaactccaaacctggatgaaccacttccagtggaaccaaaggaggaggagccaaaccttccattggtttctgaagaagaaaagagcataaccaaaccaaaagaaatcaacgaaaagaagctgggaatggacagtgcagattcctcaagccagaaacagaacaacaaaactgagatgtatgataagaagacaacagaccaggctccaaacactgatgcttctcggagtcagggctatccaatgtcagcagcatatggaagaagatggagaagaaaaggagcaagtgtttcaggattgagtgggtgtgaattcaaaggaagaagccttaaacaatccagtgaagggtatggcctgggcgatagagctgggtcttcacctaccaataagactgccaggaatgtccctttctcgcacttgtccttagagaaggacaacatggagcagcctacaacttcacaaccagaaaccactacccctcaggggttgctttcagataaagatgacatgggaaggagaaatgctggcatagatttcggatccagaaaagcatcagcagcacagcccatacctgaaaacatggacaattccatggttagtgatccacaaccataccatgaagatgcagcttctggagctgagaagacagaagccagagcttctctctcactgatggtggaaagcctttctacaacccaagaggaggccattctctcagtagcagcagaggctcaggtgtttatgaatccttctcatatccagttagaagatcaagaagctttcagctttgatttacaaaaggcccaatccaaaatggagtcagcccaggatgttcaaactatctgcaaagaaaagccttctggaaatgttcaccagacctttacagcaagtgttttgggtatgacaagtactacagccaaaggagatgtttatgccaagactctgcctcccagaagcctttttcagtcctcaaggaagcctgatgctgaagaagtctcctcagattcagagaatattcctgaggagggggatggttctgaagaactggctcatggtcactcttcccagtccttggggaagtttgaagatgaacaagaagtcttctcagaatcaaaaagttttgttgaggacttgagcagctctgaggaggagctggacctcagatgcctctcccaggctttagaggagcctgaagatgcagaagtcttcacagaatcaagcagttatgttgaaaagtacaacacttctgatgattgcagcagctcagaggaagacctgcctctcagacaccctgctcaggccttgggaaagcccaaaaaccaacaagaagtctcctctgcttcaaataatactcctgaagagcagaatgattttatgcagcagctgccttccagatgcccttctcagcccattatgaatcctactgttcagcaacaagtccccaccagttcagtgggcacttctataaaacagagcgattccgtggagccaatccctccaagacaccctttccagccatgggtgaaccctaaagtggagcaagaagtttcctcatctccaaagagcatggctgttgaagagagcatttctatgaagcctctgcctcctaaacttctttgccagcccttgatgaatcctaaagttcaacaaaacatgttctcaggttcagaggacattgctgttgagagagtcatttctgtggagccactactccccagatattctcctcagtccttgacagatcctcaaatccggcaaatctcagaaagcacagctgttgaggaaggcacttatgtggaaccgctgcctcccagatgcctttcccagccctcggagaggcctaagttcctggactcaatgagtacttctgcagaatggagcagtcctgtggcaccaacaccttccaaatacacttccccgccatgggtgacccctaaatttgaggaactgtatcaactctctgcacatccagaaagcactactgttgaagaggacatttctaaggagcagctgcttcccagacatctttcccagttgactgtgggaaataaagtccagcaactgtcctcaaatttcgagcgggctgctattgaggcagacatttctgggagtccattgcctccccaatatgctacccagttcttaaagaggtctaaagttcaggaaatgacctcacgactagagaaaatggctgttgaaggcacttctaacaaatcaccgattcccaggcgtccgacccagtcattcgtgaaatttatggcacagcaaatcttttcagagagctctgctcttaagaggggcagtgatgtggcacctctgcctcccaatcttccttccaaatctttatcaaagcctgaagtcaagcaccaagttttctcagattcagggagtgctaatcctaagggaggcatttcttcaaagatgctacctatgaagcaccctttacagtccttggggaggcctgaagacccacagaaagttttctcttattcagagagagctcctgggaagtgcagcagttttaaagagcagctgtctcccaggcagctttcccaggccttgaggaaacctgagtatgagcaaaaagtctcccctgtttctgccagttctcctaaagagtggaggaattctaaaaagcagctgcctcccaaacattcttcccaagcctcagataggtctaaattccagccacagatgtcatcaaagggcccagtgaatgtacctgtaaagcagagcagcggtgagaagcacctgccttcaagtagtcctttccagcaacaggttcattcaagttctgtgaatgctgctgctaggcgatctgtttttgagagcaattctgacaattggttcctaggaagagatgaagcttttgcaatcaaaaccaagaaattcagccaaggttccaaaaaccccataaagagcattccagcccctgctaccaaacctgggaagttcaccattgctcctgtcaggcaaacatccacttctgggggcatttactctaagaaagaagatcttgagagtggtgatggtaataataaccagcatgcaaacctatccaatcaggatgatgttgaaaagctttttggagttcgactgaaaagagcccctccctcgcagaagtataagagtgagaaacaagataacttcacccagcttgcttcagtgccctcgggcccaatttcatcctctgtaggcaggggacataaaatcagaagcacttcccaggggctcctggatgctgcagggaacctcaccaaaatatcttacgttgcagataagcaacagagcaggcccaaatctgaaagcatggccaagaagcaacctgcttgcaagaccccaggaaagcctgctggtcaacagtcagattatgctgtctcagagccggtttggataactatggcaaagcagaagcagaagagtttcaaggcccacatttctgtgaaagagctgaaaactaagagcaatgctggagccgatgctgagactaaggagcctaaatatgagggagctggctctgcaaatgaaaaccaacctaaaaagatgttcacttccagtgtccataaacaggagaagacagcacagatgaagccacctaagcctacaaaatcagttggatttgaagctcagaagatactgcaagttcctgccatggaaaaagaaaccaaacgatcttcaactctcccagccaagttccagaacccagttgagccaattgagcctgtctggttctcactggccaggaagaaagccaaagcatggagccacatggcagaaatcacgcaataaagagctcttgtgtggagcatcagcatttattttatttagtttttttttttttttttttttttgagacagagtctcgctctgttacccagattggagtgcagtggcgcgatctccgctcactgcaagctccgcctcccgggttcacgccactctcccgcctcagtctcccgactagctgggactacaggcgcccgccatcacgcccggctaattttgttttcgtatttttagtagagacggggtttcaccatgttggccaggatggtcttgatctcctgacctcgtgatccgcccgcctcagcctcccaaaagctgggattacaggcgtgagccaccgcgcccggccaagcatcagcgttttaaatgataattgctaatagctgtattaattctatgtagtgatctttttactgtgaccacttgtattaagcaaaataagtattaagcaaactaagaatttattaagcaaaataagaatttattaagcaaaatagccttagaaatgcaaattaaaacataattatttgaatgaaataaatgccatgaatgcttaaccttccacgtagtcactgccagcacccagaaacccagcatttcctctattaaaactatcgaaaacatttgcactgctgtaaaattgcaaaatctttaactttggacaatgtgctttagaagggagaaagcaaaaacattttgttggagcaactagaaaattgtcatttccctcaaccaaataaagtaattctaatggaaacattcagatgatttgacctaaagattggcctttaggttttatgagcctagatagatgccgcaattatttggttgttgctctaagctttgcaagggatcctaaaagaggcggtggaagtgaaaattctgggtctccaagaaaatttctgcacagccagttctccaatcagcctatcaccccttgaaacatcttccctgtgtccctgggggcccctgatgctttctccttgggtgatagtaacatgcagagcacttacacaaagctccctctttggacataccccacgtcgacctgtcacaggcctggctgtagcgagcacctccctatgacgcagaatgcttcttgggaattatcttactcctctggagggttagtccatcaatgttttgcttcttgtcccaatactactgtgaccctctctgatcgcacagaaatcactgcctatcacatatatcctgttaagcactgaagaccctattgaaattagagttctacagatgccaaaagctgtactttccatcaggcagatggcaagcttactgccttgatgcacatctggagccactggagctccttcctctctggttccagcattaaggtggagaactccatgtagcttcttgtcctttcccctcagctgtctttgcttcacaaggttttagcccaaagcaagagtgcaatcccaaagccacagagaaatgaactttccgctacctggaagctttaagtgagtaaatcagcttttcccctctcattcctagaggcacacacctcaaaagttactaggctggagagaccctaccttccagtgacccactcatcccccagccacggagaagagggaagaccaaaaagggagagtgagaaagaggatgagagggatggtcagctgtgaggggagggggcaagtggcccagcaaatgttgatgcctcccttcccatcttgccacacggtctttttcttttgtagcacagcctccattaataactcctcggctgaggatgaagatgtaggcacctttacccccagagccagttccttaattggctggctttctgagatgcagaccaccctagaatctcatctaggttcactagaagttagttaaatcttcctttctctgtctttctcttcattccatcccccaaacccaccaaacactaagggagagctccctttggatgtctgggcagtaaacctagctcatttttctaggagacccagaagtgacttctgagtagttatcactgtgtctgcctctgttacactgtgctgctttgcttaaacagaaatgcaggcctggacatctgactgtgcctttatattctgagtggggtgctgccccatgcaaaaaaatccagagaggtagtgaggtgtcagagctaaacacttggtgctgggttttgttgatgctggtataatgtgacacagtacaattacatgctaaattttgcattttctctatataacatctatttttcctgatactgtgcctttgccattttgataatgctattttgattgagtgaattttatttcctttgtattcccatagtgaacaatatattaaggtagatgccctttatctgggtactcctggtagattagctgttacacctcccttcccttttttacagtgaacctgtattcagttattgtcactctgagaactctccaataacaatttcttttccacagttaacaacacagctgttacacctcccttcctttttttcacagtgaacctgtattcagctattctcactctgagaactctccaataacaatttcttttccacagttaacaacaaagttctgtttttaaatgaagagattaagttctttttaaatgcctaaaggcatattctgacaacttttctacttctttaacttttttgatttaagatatatgcaaagcaaataaattcaataaagccta

SEQ ID NO: 145931 - DNA, 4109 bp, Homo sapiens
  Payload ID: 8937
  Gene Symbol: KIAA1211
  Gene Name: KIAA1211
  Uniprot ID: Q6ZU35
  ENST ID: ENST00000264229
  CDS Start-End: 392-4093
acatgccttctggtttgactggagtaatcctggtagaatccacgtagctctgaagacttacaagagcagtgattcccaggctttctcagcaatgtaccccatttcctgacatttacagctgaaggtgaagtttcccttttgcaaggagaaaattttggtggagaattatccaacaagaaaaagacctgtggctattaagatagacaagaagaagggaggcaaattccagccttttaaaaagttgtttggcaaaaggaaaaagaaagacccttcgttgttccgggtgccgtcgttggggaagaagagttactctcaccagagtgtcagcaatgggaccttctcttcggatgaggagaccctggaagacaatctaaggtccttcaactattctatgggaacccgggcattttcccatgacagtatttttatccctgatgggggagcagaaagtgagcagacagttcaagcaatgtcacaggacaacatcctgggcaaagtcaaaactcttcagcaacagttgggcaagaatatcaagtttgggcagcggtcacccaatgccattcccatgaataaggcaaacagtggagaggctagcttagaagaggatctgttcctgaccagtcccatggaaattgtgactcagcaggacatcgtcctctcagacgcagagaacaagtccagtgatacgccaagttctctaagtcctctgaatctccctggagctggaagtgagatggaagagaaggttgctcccgttaaaccgtctcggccaaaaaggcacttctcttctgctggcaccatcgaaagtgtcaacttagatgccatccccctggccatcgctcgcctggacaacagtgccgccaagcacaagctggctgttaagccaaaaaaacagagggtgtcaaagaagcacaggcgccttgcccaggatccacaacatgagcaaggcggccttgagagtcggccctgcctggaccagaacggacacccaggcgaggacaagccaacgtggcacgaagaggaacccaatccgctggattccgaggaagagagaagacgccaagaagactactggcgagaactggaggccaagtgcaagcggcaaaaggcggaagcagccgagaagagacgcctagaggagcagaggctgcaggcgctggagaggaggctttgggaagagaacagaaggcaggagctcttggaggaggagggcgaggggcaggagccgcctctagaggcggaaagggcgccgcgggaagagcagcagcggagcctggaagcgccaggttgggaggacgcggagcggagggagcgtgaggagcgcgagcgcctggaggcggaggaggagcgaaggcgtctgcaggcccaggcccaagcggaggagaggcggcggctggaggaggacgccaggctggaggagcggaggcggcaggaggaggaggaaggaagatgcgcggaggagctcaaaaggcaggaggaggaggaggctgagggatgggaagagctggaacagcaggaggcggaggtgcaggggccgcccgaggcgttggaggagactggggagggccggcggggcgcggaggaggaggatctgggggaagaggaggaggagggccaggcgcacctggaggactggagggggcagctcagtgagcttctgaacgactttgaggagaggctcgaagaccaggaacgcctgaaacccgaaggacaaagagaacactccgaggagccaggtatttgcgaggagcagaacccagaggccgagcggcgaagagagcagcagggaaggagcggggatttccagggggccgatcgtcctgggcccgaggaaaagagagaagaaggggacacggagcctctcctgaaacaagaggggccggtggaagccgcgcagcctccggtggagaggaaagaagccgccgcccttgaacaaggccgcaaggtggaggagctgcggtggcaggaggtggacgagagacagaccatgccccggccctacacgttccaggtgtcctccggagggaagcagattctctttcccaaagtcaacctgagccccgtgacgcccgcaaaggacacggggctcaccgctgctccccaggaaccaaaggcccccaaagccagcccagtccagcacgccctaccgtcgtccctgagcgttccccacaccgccattctggtcacgggcgcgcagctctgtggcccggcagtcaacctgagccagatcaaggacaccgcgtgcaagtccctcctgggcttggaggagaagaagcacgcggaagccccagctggggagaaccctccccgaggccccggcgacgcgagggcgggcagcgggaaggctaagccccgccaggagtctcccagcagcgcgtccgcactcgcagaatgggcttccattcggtccagaatcctgaagaacgcagagagtgacccgcgcagcagcgagagggaccagttgaggcccggtgatgagtccactcccaggggccggtgtgattcccgcgggaaccaacggaagactccgccagtcaatgcaaagttctctattatgcctgcctggcagaaattttccgatggtggcacggagacctccaaacagagcacggaagctgaaagcatacgaaaaagacccatgctgggacccagcgaagagacagccccccagcctcctcctgctggtgttcgcgagctcgggaagggtccggagaagtcggagatgcaccgggagcccgcagacaccaccgagggatgcaaatttgccaaagacctcccgtctttccttgtcccaagccttccttaccctccgcagaaagtggtggcccacacagagttcacgacctcgtcggacagcgagactgcaaacgggatagcaaagccagaccctgtgatgccaggtggagaggaaaaagcctcaccgtttggaataaaattgagaaggaccaactattccttgcgcttcaactgcgaccaacaggcagaacagaagaagaagaagaggcacagcagcaccggagacagcgcggatgcagggccgcctgcagcggggagcgctcgtggagagaaagagatggagggtgtggccctcaagcatggtccatccctcccccaagagcggaagcaagccccttccacccggagggactccgctgaaccttccagcagccgctctgttcctgtggcccaccctgggcctccaccggccagcagccagaccccggctccggagcacgacaaggcagcaaacaaaatgccactggcacaaaagccagcactggctcccaagcccaccagtcagaccccaccagcatccccactttccaaactgagcaggccctacttggtagagctgctgtctcgccgagcggggaggccggacccagagccaagtgagccgtccaaggaggaccaggagagcagtgaccgccggccaccctcgcccccaggccccgaggaaaggaagggacagaagagggacgaggaggaagaggcgacagagaggaaacctgcttccccacctctgcctgccactcagcaagagaaaccttctcaaacacccgaggccgggaggaaagagaagccgatgcttcagagcagacactccttagatggctccaaacttacagagaaagtggaaactgctcagccgctgtggataacgttagcactgcaaaagcaaaaggggtttcgggagcagcaggcgacgcgggaggagagaaagcaagccagagaggccaaacaggcagaaaagctctccaaagaaaatgtcagtgtcagcgtgcagcctggaagcagcagtgtcagcagagcaggttccctgcacaagtccactgctctgccagaagagaagaggcccgagactgcagtgtccaggcttgagcgcagagaacagctgaaaaaggccaatactcttcctacgtctgtgacagtggagatctccgactcggctcccccagcgccgctggtaaaagaagtcaccaagaggttttccaccccggatgctgcccccgtgtcaacagaaccagcctggctggctttggccaaaaggaaagcaaaggcttggagcgactgtccacagattattaagtaaagagtgactctcaccc

SEQ ID NO: 145932 - DNA, 4628 bp, Homo sapiens
  Payload ID: 8937
  Gene Symbol: KIAA1211
  Gene Name: KIAA1211
  Uniprot ID: Q6ZU35
  ENST ID: ENST00000504228
  CDS Start-End: 106-3807
ccgtcgttggggaagaagagttactctcaccagagtgtcagcaatgggaccttctcttcggatgaggagaccctggaagacaatctaaggtccttcaactattctatgggaacccgggcattttcccatgacagtatttttatccctgatgggggagcagaaagtgagcagacagttcaagcaatgtcacaggacaacatcctgggcaaagtcaaaactcttcagcaacagttgggcaagaatatcaagtttgggcagcggtcacccaatgccattcccatgaataaggcaaacagtggagaggctagcttagaagaggatctgttcctgaccagtcccatggaaattgtgactcagcaggacatcgtcctctcagacgcagagaacaagtccagtgatacgccaagttctctaagtcctctgaatctccctggagctggaagtgagatggaagagaaggttgctcccgttaaaccgtctcggccaaaaaggcacttctcttctgctggcaccatcgaaagtgtcaacttagatgccatccccctggccatcgctcgcctggacaacagtgccgccaagcacaagctggctgttaagccaaaaaaacagagggtgtcaaagaagcacaggcgccttgcccaggatccacaacatgagcaaggcggccttgagagtcggccctgcctggaccagaacggacacccaggcgaggacaagccaacgtggcacgaagaggaacccaatccgctggattccgaggaagagagaagacgccaagaagactactggcgagaactggaggccaagtgcaagcggcaaaaggcggaagcagccgagaagagacgcctagaggagcagaggctgcaggcgctggagaggaggctttgggaagagaacagaaggcaggagctcttggaggaggagggcgaggggcaggagccgcctctagaggcggaaagggcgccgcgggaagagcagcagcggagcctggaagcgccaggttgggaggacgcggagcggagggagcgtgaggagcgcgagcgcctggaggcggaggaggagcgaaggcgtctgcaggcccaggcccaagcggaggagaggcggcggctggaggaggacgccaggctggaggagcggaggcggcaggaggaggaggaaggaagatgcgcggaggagctcaaaaggcaggaggaggaggaggctgagggatgggaagagctggaacagcaggaggcggaggtgcaggggccgcccgaggcgttggaggagactggggagggccggcggggcgcggaggaggaggatctgggggaagaggaggaggagggccaggcgcacctggaggactggagggggcagctcagtgagcttctgaacgactttgaggagaggctcgaagaccaggaacgcctgaaacccgaaggacaaagagaacactccgaggagccaggtatttgcgaggagcagaacccagaggccgagcggcgaagagagcagcagggaaggagcggggatttccagggggccgatcgtcctgggcccgaggaaaagagagaagaaggggacacggagcctctcctgaaacaagaggggccggtggaagccgcgcagcctccggtggagaggaaagaagccgccgcccttgaacaaggccgcaaggtggaggagctgcggtggcaggaggtggacgagagacagaccatgccccggccctacacgttccaggtgtcctccggagggaagcagattctctttcccaaagtcaacctgagccccgtgacgcccgcaaaggacacggggctcaccgctgctccccaggaaccaaaggcccccaaagccagcccagtccagcacgccctaccgtcgtccctgagcgttccccacaccgccattctggtcacgggcgcgcagctctgtggcccggcagtcaacctgagccagatcaaggacaccgcgtgcaagtccctcctgggcttggaggagaagaagcacgcggaagccccagctggggagaaccctccccgaggccccggcgacgcgagggcgggcagcgggaaggctaagccccgccaggagtctcccagcagcgcgtccgcactcgcagaatgggcttccattcggtccagaatcctgaagaacgcagagagtgacccgcgcagcagcgagagggaccagttgaggcccggtgatgagtccactcccaggggccggtgtgattcccgcgggaaccaacggaagactccgccagtcaatgcaaagttctctattatgcctgcctggcagaaattttccgatggtggcacggagacctccaaacagagcacggaagctgaaagcatacgaaaaagacccatgctgggacccagcgaagagacagccccccagcctcctcctgctggtgttcgcgagctcgggaagggtccggagaagtcggagatgcaccgggagcccgcagacaccaccgagggatgcaaatttgccaaagacctcccgtctttccttgtcccaagccttccttaccctccgcagaaagtggtggcccacacagagttcacgacctcgtcggacagcgagactgcaaacgggatagcaaagccagaccctgtgatgccaggtggagaggaaaaagcctcaccgtttggaataaaattgagaaggaccaactattccttgcgcttcaactgcgaccaacaggcagaacagaagaagaagaagaggcacagcagcaccggagacagcgcggatgcagggccgcctgcagcggggagcgctcgtggagagaaagagatggagggtgtggccctcaagcatggtccatccctcccccaagagcggaagcaagccccttccacccggagggactccgctgaaccttccagcagccgctctgttcctgtggcccaccctgggcctccaccggccagcagccagaccccggctccggagcacgacaaggcagcaaacaaaatgccactggcacaaaagccagcactggctcccaagcccaccagtcagaccccaccagcatccccactttccaaactgagcaggccctacttggtagagctgctgtctcgccgagcggggaggccggacccagagccaagtgagccgtccaaggaggaccaggagagcagtgaccgccggccaccctcgcccccaggccccgaggaaaggaagggacagaagagggacgaggaggaagaggcgacagagaggaaacctgcttccccacctctgcctgccactcagcaagagaaaccttctcaaacacccgaggccgggaggaaagagaagccgatgcttcagagcagacactccttagatggctccaaacttacagagaaagtggaaactgctcagccgctgtggataacgttagcactgcaaaagcaaaaggggtttcgggagcagcaggcgacgcgggaggagagaaagcaagccagagaggccaaacaggcagaaaagctctccaaagaaaatgtcagtgtcagcgtgcagcctggaagcagcagtgtcagcagagcaggttccctgcacaagtccactgctctgccagaagagaagaggcccgagactgcagtgtccaggcttgagcgcagagaacagctgaaaaaggccaatactcttcctacgtctgtgacagtggagatctccgactcggctcccccagcgccgctggtaaaagaagtcaccaagaggttttccaccccggatgctgcccccgtgtcaacagaaccagcctggctggctttggccaaaaggaaagcaaaggcttggagcgactgtccacagattattaagtaaagagtgactctcacccatccctactgccagttattggctcctctcttgccctttttatttatttattttttatatggggtaaagaaatcaagctagggaaaagaagcatgttttataggctccaaaataatgtttagaaactgaactggtggtgttcattgtaaagagtggatttgcacaaccctaggtcctggtgcctcgagctcctcctagttctcaagagaaaattccgtccacaggaccacatgaagcaaaatctctaagctaagaactcgtgagagcctgccatgcccatttcatggccttgcacacacacccacccacacaccattcagaacatgtacttttgccaacctttggtaatggttttttgattctatgcactaattttctttgtccaaaacatttactctaccatatgtctgggaatgtttatcctttctacagtaatggtgaaaggatcatatctagctaaaagcaagaacacccattctcctgaatgcagtgagtaattgggaatcacaaggaacattctggcacccaactgtgcccatcttagttttcatgagttttccccactctgaagctgtaacccagaaggcacatccattcacatttttaccgcactgtggattcatagtgtggggccctgttattccaataccctccttaaggacatgtgaagcatttggcccagttggctcccagggaacattttaatttaatgtagtgaagaaagacaattctagatcagagctacaagttcactttctgtctctgagaatctccatctagggcagtagttcttatgatgtgtaggc

SEQ ID NO: 145933 - DNA, 4117 bp, Homo sapiens
  Payload ID: 8937
  Gene Symbol: KIAA1211
  Gene Name: KIAA1211
  ENST ID: ENST00000541073
  CDS Start-End: 149-3829
ccgtcgttggggaagaagagttactctcaccagagtgtcagcaatgggaccttctcttcggatgaggagaccctggaagacaatctaaggtccttcaactattctatgggaacccgggcattttcccatgacagtatttttatccctgatgggggagcagaaagtgagcagacagttcaagcaatgtcacaggacaacatcctgggcaaagtcaaaactcttcagtcgactaagcagtatgttcctgcaacagttgggcaagaatatcaagtttgggcagcggtcacccaatgccattcccatgaataaggcaaacagtggagaggctagcttagaagaggatctgttcctgaccagtcccatggaaattgtgactcagcaggacatcgtcctctcagacgcagagaacaagtccagtgatacgccaagttctctaagtcctctgaatctccctggagctggaagtgagatggaagagaaggttgctcccgttaaaccgtctcggccaaaaaggcacttctcttctgctggcaccatcgaaagtgtcaacttagatgccatccccctggccatcgctcgcctggacaacagtgccgccaagcacaagctggctgttaagccaaaaaaacagagggtgtcaaagaagcacaggcgccttgcccaggatccacaacatgagcaaggcggccttgagagtcggccctgcctggaccagaacggacacccaggcgaggacaagccaacgtggcacgaagaggaacccaatccgctggattccgaggaagagagaagacgccaagaagactactggcgagaactggaggccaagtgcaagcggcaaaaggcggaagcagccgagaagagacgcctagaggagcagaggctgcaggcgctggagaggaggctttgggaagagaacagaaggcaggagctcttggaggaggagggcgaggggcaggagccgcctctagaggcggaaagggcgccgcgggaagagcagcagcggagcctggaagcgccaggttgggaggacgcggagcggagggagcgtgaggagcgcgagcgcctggaggcggaggaggagcgaaggcgtctgcaggcccaggcccaagcggaggagaggcggcggctggaggaggacgccaggctggaggagcggaggcggcaggaggaggaggaaggaagatgcgcggaggagctcaaaaggcaggaggaggaggaggctgagggatgggaagagctggaacagcaggaggcggaggtgcaggggccgcccgaggcgttggaggagactggggagggccggcggggcgcggaggaggaggatctgggggaagaggaggaggagggccaggcgcacctggaggactggagggggcagctcagtgagcttctgaacgactttgaggagaggctcgaagaccaggaacgcctgaaacccgaaggacaaagagaacactccgaggagccaggtatttgcgaggagcagaacccagaggccgagcggcgaagagagcagcagggaaggagcggggatttccagggggccgatcgtcctgggcccgaggaaaagagagaagaaggggacacggagcctctcctgaaacaagaggggccggtggaagccgcgcagcctccggtggagaggaaagaagccgccgcccttgaacaaggccgcaaggtggaggagctgcggtggcaggaggtggacgagagacagaccatgccccggccctacacgttccaggtgtcctccggagggaagcagattctctttcccaaagtcaacctgagccccgtgacgcccgcaaaggacacggggctcaccgctgctccccaggaaccaaaggcccccaaagccagcccagtccagcacgccctaccgtcgtccctgagcgttccccacaccgccattctggtcacgggcgcgcagctctgtggcccggcagtcaacctgagccagatcaaggacaccgcgtgcaagtccctcctgggcttggaggagaagaagcacgcggaagccccagctggggagaaccctccccgaggccccggcgacgcgagggcgggcagcgggaaggctaagccccgccaggagtctcccagcagcgcgtccgcactcgcagaatgggcttccattcggtccagaatcctgaagaacgcagagagtgacccgcgcagcagcgagagggaccagttgaggcccggtgatgagtccactcccaggggccggtgtgattcccgcgggaaccaacggaagactccgccagtcaatgcaaagttctctattatgcctgcctggcagaaattttccgatggtggcacggagacctccaaacagagcacggaagctgaaagcatacgaaaaagacccatgctgggacccagcgaagagacagccccccagcctcctcctgctggtgttcgcgagctcgggaagggtccggagaagtcggagatgcaccgggagcccgcagacaccaccgagggatgcaaatttgccaaagacctcccgtctttccttgtcccaagccttccttaccctccgcagaaagtggtggcccacacagagttcacgacctcgtcggacagcgagactgcaaacgggatagcaaagccagaccctgtgatgccaggtggagaggaaaaagcctcaccgtttggaataaaattgagaaggaccaactattccttgcgcttcaactgcgaccaacaggcagaacagaagaagaagaagaggcacagcagcaccggagacagcgcggatgcagggccgcctgcagcggggagcgctcgtggagagaaagagatggagggtgtggccctcaagcatggtccatccctcccccaagagcggaagcaagccccttccacccggagggactccgctgaaccttccagcagccgctctgttcctgtggcccaccctgggcctccaccggccagcagccagaccccggctccggagcacgacaaggcagcaaacaaaatgccactggcacaaaagccagcactggctcccaagcccaccagtcagaccccaccagcatccccactttccaaactgagcaggccctacttggtagagctgctgtctcgccgagcggggaggccggacccagagccaagtgagccgtccaaggaggaccaggagagcagtgaccgccggccaccctcgcccccaggccccgaggaaaggaagggacagaagagggacgaggaggaagaggcgacagagaggaaacctgcttccccacctctgcctgccactcagcaagagaaaccttctcaaacacccgaggccgggaggaaagagaagccgatgcttcagagcagacactccttagatggctccaaacttacagagaaagtggaaactgctcagccgctgtggataacgttagcactgcaaaagcaaaaggggtttcgggagcagcaggcgacgcgggaggagagaaagcaagccagagaggccaaacaggcagaaaagctctccaaagaaaatgtcagtgtcagcgtgcagcctggaagcagcagtgtcagcagagcaggttccctgcacaagtccactgctctgccagaagagaagaggcccgagactgcagtgtccaggcttgagcgcagagaacagctgaaaaaggccaatactcttcctacgtctgtgacagtggagatctccgactcggctcccccagcgccgctggtaaaagaagtcaccaagaggttttccaccccggatgctgcccccgtgtcaacagaaccagcctggctggctttggccaaaaggaaagcaaaggcttggagcgactgtccacagattattaagtaaagagtgactctcacccatccctactgccagttattggctcctctcttgccctttttatttatttattttttatatggggtaaagaaatcaagctagggaaaagaagcatgttttataggctccaaaataatgtttagaaactgaactggtggtgttcattgtaaagagtggatttgcacaaccctaggtcctggtgcctcgagctcctcctagttctcaagagaaaattccgtccacaggaccacatgaagcaaaatctctaagctaagaactcgtgagagcctgcca

SEQ ID NO: 145934 - DNA, 278 bp, Homo sapiens
  Payload ID: 8937
  Gene Symbol: KIAA1211
  Gene Name: KIAA1211
  ENST ID: ENST00000514330
  CDS Start-End: 1-257
ctcaaacacccgaggccgggaggaaagagaagccgatgcttcagagcagacactccttagatggctccaaacttacagagaaagtggaaactgctcagccgctgtggataacgttagcactgcaaaagcaaaaggggtttcgggagcagcaggcgacgcgggaggagagaaagcaagccagagaggccaaacaggcagaaaagctctccaaagaaaattggagatctccgactcggctcccccagcgccgctggtaaaagaagtcaccaagaggtttt

SEQ ID NO: 145935 - DNA, 830 bp, Homo sapiens
  Payload ID: 8937
  Gene Symbol: KIAA1211
  Gene Name: KIAA1211
  ENST ID: ENST00000629263
  CDS Start-End: 720-830
gaccacgccgcgcggggccgggcgcgcagtgccgcgcggtggcggcagtggggagagcaatggaggccacggccgactgagaggcgggtgcgctgctggtgctgctgccgcggcggctgctgatgcggaggctgccgcgcgcagtgccgccgagtccgccgcccgcccgggaccgccggtcgccggccagccgctctgccagccggagcgccaggcggggacctcagcttacaagagcagtgattcccaggctttctcagcaatgtaccccatttcctgacatttacagctgaaggtgaagtttcccttttgcaaggagaaaattttggtggagaattatccaacaagaaaaagacctgtggctattaagatagacaagaagaagggaggcaaattccagccttttaaaaagttgtttggcaaaaggaaaaagaaagacccttcgttgttccgggtgccgtcgttggggaagaagagttactctcaccagagtgtcagcaatgggaccttctcttcggatgaggagaccctggaagacaatctaagatttgcatgttacttaataaattctggttggcaagacttactgggacaaaactgatagtgacagctcagctggagaaaggctcttccaattaaaagttctgcagtgccttctgtcttggatcctatacaaataagtaactgtctttgtgttctcacggtccttcaactattctatgggaacccgggcattttcccatgacagtatttttatccctgatgggggagcagaaagtgagcagacagttcaagcaatgtcacaggacaacatcctgggcaaagtcaaa

SEQ ID NO: 145936 - DNA, 3907 bp, Homo sapiens
  Payload ID: 8938
  Gene Symbol: KIAA1211L
  Gene Name: KIAA1211-like
  Uniprot ID: Q6NV74
  ENST ID: ENST00000397899
  CDS Start-End: 333-3221
aggggagctgagcggcgtccgcccccgccgagccgagcggagccgagcgaagccggcgcgcctgcagctgggagctgggagctgggagcgcgccgggcgcagggccgggccggccgcgggagggtagtgtcagcgcccgcgtccagctcttcggccgcagacccgggctgtctggaggccgcgcggccacctgctgcgtcgccccggctttgggctggggctagacgcgcaccgcggcgggagcagccccggctcgccgcaccccgcggaaggtgcccttctctgcgcgtctcgccgagcccgggccacgctcctgtcccagcgagcttgacatgatttccacaagggtgatggacattaagcttcgggaggctgcagaaggccttggggaggacagcacaggaaagaaaaaatctaaattcaaaacttttaagaagttttttgggaagaagaagagaaaagaatcgccgtcgtccacaggaagtagcacctggaaacaaagtcagacgaggaatgaggtcattgccatcgaatccgggccagtgggctacgactccgaggatgagctggaggagtcgaggggcacgctgggcagccgggccctttctcacgacagtattttcattcctgagtccggacaggacgctactcggcctgtgcgggtgttttcccaagaaaatgtgtgtgatcggattaaagctctgcagttaaaaatacagtgtaatgtgaaaatggggccaccacctcctccaggggggcttcctgccaagcggggagaggatgccggcatgagctctgaggacgacgggctgcccaggagccccccagagatgtctctgctgcacgacgtgggtcctggtaccaccataaaggtctctgtcgtgtctccagaccacgtgagcgacagcaccgtctctgcccggatctcagacaacagcctggcaccagtggctgacttcagttatcctgcagaatcctcctcctgcctggacaactctgcagctaagcacaagctccaggtcaagccccgcaaccagcggtcgagtaagatgaggcggctctcatcgcgcgctcagtctgaatccctgagcgacctgacgtgcaccccagaggaggaggaaaacgaggagaagccacttttggaagtcagcccagaagagcgccccagctctgggcagcaggacgtggcgccagacagaggccctgagcctgggccaccggcgcccttgccgccacccggaggggcccgtgccagacgcgcccgcctgcagcactcctccgcgctcacggccagcgtggaggaggggggcgtccccggggaggacccctcaagccgcccggccaccccggagctcgccgagcccgagtcggcccccactctccgcgtggagcccccgtccccgccggagggccccccgaatcccggtcccgacggcggaaagcaggatggggaggcgccccccgcaggcccgtgtgccccggccacggacaaggcggaggaggtggtctgtgctcccgaagacgtcgcgagcccgtttcccaccgccatccctgagggggacacgactccccccgagactgaccccgccgccacctcagaggcgccctctgctcgcgacgggccagaacgcagtgtcccgaaggaagcggagccgacgccgcccgtgctcccggatgaggagaaggggcccccagggccggcgcctgagcccgagagagaagcggagacggagcccgagagaggagcggggaccgagcccgagagaattgggaccgagccctccacggcgcccgccccgagcccgccggcgcccaagagctgcctgaaacaccggcccgcggccgccagcgagggccccgccgcgtccccgccgcttgccgctgcggagtctcccccggtggagcccggccccggttccctcgacgcagaggccgccgccccggagcgccccaaggccgagcgagccgaggcgccaccggcgggcgccgagagggcggcgccagagcggaaggcggagaggggcggtgccgagctgcgaggcgcgaagaagttctcggtgtcctcgtgccgagcgcggcctcgtccgggcgtctcccgcccgctggaacgggccagcggccgcctgcccctcgcgaggagcggcccggtctggaggagcgaggcggctcttgacgacctccagggtctccccgagccccagcacgcgaaacctggccctcggaagctggcggagcgcggccctcaggactcgggggacagggcggccagcccggccgggccgcgcaagagccctcaggaggcggccgccgcgcccggcacgagagagccctgcccagccgcccaggagccggccccgagtgaggacagaaaccccttccccgtcaagctccggtccacctccctctcgctcaaatacagggatggcgcctctcaggaggtgaagggtgtgaagaggtacagtgccgaggtccggttagaaaggtcgctgaccgtgctcccgaaggaggagaagtgtcccctcgggacggcccccgcccttcgaggcaccagggcccccagcgaccaaggaaaggggaaggcccggccccccgagccgctcagctccaagccgcccctgccccggaagccgcttctgcagagcttcacgctcccgcaccagcccgcgccccccgacgccggcccgggagagcgggaacccaggaaggagcccaggacggcggagaaaaggccgctgcgcaggggagctgaaaagagtctgccgcctgcagcaacagggcctggagctgatgggcagcctgcgccaccctggatcaccgtcactcggcagaagcggagggggaccttggaccagccacccaaccaggaagacaagcctggggcacggaccctgaagtctgaaccaggaaagcaagccaaggtgcccgagagaggccaggagcctgtgaagcaagctgactttgttcgcagcaagtctttcctgataacccctgtgaagcccgctgtggaccggaagcagggggcaaagctcaacttcaaggaggggctgcaaagaggaatctcattgtcccatcagaacttggctcagtctgcagtgatgatggagaaggaactgcatcagctgaagagagccagttatgccagtacagatcagccatcctggatggaacttgccagaaagaaatctcaagcttggagtgacatgccccagattataaaataggtgggcagtgtgctgataaagcatgtccactaccctgacaagccacttagttaaaaactgccagtgtattgtggcaaacaaactgtgaaacttaaagattgattttatcatcaagttatgacgaacttggggaagaggaaggaaccaggcaaaacaaagaggataaacacacagccatactcctgggccagagggcccagaaacaagaacaacattgaaaaagtccaggaaccagttcctgtgcccaaaggtacgaatgtgtcttttcgaattcccttgataaagaagcctcagacaaggaagaaaatagaaatgaaattggacacataaataggacacccagcaaaggccagaagagaagcccttctaggagaagggacatctgtgcttccagctgagatcagcccatgtctctggtcgctctcttgcctgtggatcctgtcttctttcatgtttactacgaggcatgacattcatggcaaaacagggatgccgtttccaagagcagctataaaacaatctgttttcctaaagacagccactctgagaaggagatgaaggaacacggcagggttcatcaattcatagactgtttccaaaaataatttttaaacttttccactaggcatctgtgtctttaaccactgcacaatgcattgcctgtttaataaaaggtttcaaacatg

SEQ ID NO: 145937 - DNA, 921 bp, Homo sapiens
  Payload ID: 8938
  Gene Symbol: KIAA1211L
  Gene Name: KIAA1211-like
  ENST ID: ENST00000428096
  CDS Start-End: 340-921
cgcgcctgcagctgggagctgggagctgggagcgcgccgggcgcagggccgggccggccgcgggagggtagtgtcagcgcccgcgtccagctcttcggccgcagacccgggctgtctggaggccgcgcggccacctgctgcgtcgccccggctttgggctggggctagacgcgcaccgcggcgggagcagccccggctcgccgcaccccgcggaaggtgcccttctctgcgcgtctcgccgagcccgggccacgctcctgtcccagcagaagtcactgattttctgcatactccatgtaatgaatctggtatgctgagataaggacacctgtgactgagatgatttctttggcgtccgtgcaagataaaagcgagcttgacatgatttccacaagggtgatggacattaagcttcgggaggctgcagaaggccttggggaggacagcacaggaaagaaaaaatctaaattcaaaacttttaagaagttttttgggaagaagaagagaaaagaatcgccgtcgtccacaggaagtagcacctggaaacaaagtcagacgaggaatgaggtcattgccatcgaatccgggccagtgggctacgactccgaggatgagctggaggagtcgaggggcacgctgggcagccgggccctttctcacgacagtattttcattcctgagtccggacaggacgctactcggcctgtgcgggtgttttcccaagaaaatgtgtgtgatcggattaaagctctgcagttaaaaatacagtgtaatgtgaaaatggggccaccacctcctccaggggggcttcctgccaagcggggagaggatgccggcatgagctctgaggacgacgggctgcccaggagccccccagagatgtctctgctgcacgacgtgggtcctggtaccaccataaag

SEQ ID NO: 145938 - DNA, 735 bp, Homo sapiens
  Payload ID: 8938
  Gene Symbol: KIAA1211L
  Gene Name: KIAA1211-like
  ENST ID: ENST00000415261
  CDS Start-End: 200-735
gtcgacaggctatccacaggctgtgggatgggagaaactgtggagccatccagctgtgtggccaggaaggatggctagcctctcccctgccagactactcactgcagggacagggcaggcatttgccagaagtcactgattttctgcatactccatgtaatgaatctggtatgctgagataaggacacctgtgactgagatgatttctttggcgtccgtgcaagataaaagcgagcttgacatgatttccacaagggtgatggacattaagcttcgggaggctgcagaaggccttggggaggacagcacaggaaagaaaaaatctaaattcaaaacttttaagaagttttttgggaagaagaagagaaaagaatcgccgtcgtccacaggaagtagcacctggaaacaaagtcagacgaggaatgaggtcattgccatcgaatccgggccagtgggctacgactccgaggatgagctggaggagtcgaggggcacgctgggcagccgggccctttctcacgacagtattttcattcctgagtccggacaggacgctactcggcctgtgcgggtgttttcccaagaaaatgtgtgtgatcggattaaagctctgcagttaaaaatacagtgtaatgtgaaaatggggccaccacctcctccaggggggcttcctgccaagcggggagaggatgccggcatgagctctgaggacgacgggctgcccaggagcccccc

SEQ ID NO: 145939 - DNA, 1017 bp, Homo sapiens
  Payload ID: 8938
  Gene Symbol: KIAA1211L
  Gene Name: KIAA1211-like
  ENST ID: ENST00000423771
  CDS Start-End: 212-1017
tctgctgtgtgcctgtgcacccgcccaaggagctcacggggcacaggagggctgggcttggcagaagccccacttcctcctggcgcacgggtacttctgtgagagatggggacaagggctcttgatcagcaaccagtggtgacccgtgggccctaggccactcagaggaaagggaggcccactcttctccctgctgctagcttccaggaggatgagagagctggaggctcacagcacactcaggaggatggctgccttttaccagtgcatcaggcctgaccccagcgagcttgacatgatttccacaagggtgatggacattaagcttcgggaggctgcagaaggccttggggaggacagcacaggaaagaaaaaatctaaattcaaaacttttaagaagttttttgggaagaagaagagaaaagaatcgccgtcgtccacaggaagtagcacctggaaacaaagtcagacgaggaatgaggtcattgccatcgaatccgggccagtgggctacgactccgaggatgagctggaggagtcgaggggcacgctgggcagccgggccctttctcacgacagtattttcattcctgagtccggacaggacgctactcggcctgtgcgggtgttttcccaagaaaatgtgtgtgatcggattaaagctctgcagttaaaaatacagtgtaatgtgaaaatggggccaccacctcctccaggggggcttcctgccaagcggggagaggatgccggcatgagctctgaggacgacgggctgcccaggagccccccagagatgtctctgctgcacgacgtgggtcctggtaccaccataaaggtctctgtcgtgtctccagaccacgtgagcgacagcaccgtctctgcccggatctcagacaacagcctggcaccagtggctgacttcagttatcctgcagaatcctcctcctgcctggacaactctgcagctaagcacaagctccaggtcaagccccgcaaccagcggtcgagtaagatgag

SEQ ID NO: 145940 - DNA, 742 bp, Homo sapiens
  Payload ID: 8938
  Gene Symbol: KIAA1211L
  Gene Name: KIAA1211-like
  ENST ID: ENST00000420294
  CDS Start-End: 631-742
aggggagctgagcggcgtccgcccccgccgagccgagcggagccgagcgaagccggcgcgcctgcagctgggagctgggagctgggagcgcgccgggcgcagggccgggccggccgcgggagggtagtgtcagcgcccgcgtccagctcttcggccgcagacccgggctgtctggaggccgcgcggccacctgctgcgtcgccccggctttgggctggggctagacgcgcaccgcggcgggagcagccccggctcgccgcaccccgcggaaggtgcccttctctgcgcgtctcgccgagcccgggccacgctcctgtcccaggttttaactccatgattgtgtgctatgagtatatggctgcatgtctcaagaaattcactggctttaaaatgtgggcttagctactgccagtatgatttgatgaaagcggatagaggtctcagatccacccccggattccaccgtcaggcccaaggacggacccctggccattgactgatgccaagtgggtgcctggcagcagccttccttcccatccctgcttctggacgcctcagccaagtcactgattttctgcatactccatgtaatgaatctggtatgctgagataaggacacctgtgactgagatgatttctttggcgtccgtgcaagataaaagcgagcttgacatgatttccacaagggtgatggacattaagcttcgggaggctgcagaaggccttggggaggacagcacag

SEQ ID NO: 145941 - DNA, 3861 bp, Homo sapiens
  Payload ID: 8938
  Gene Symbol: KIAA1211L
  Gene Name: KIAA1211-like
  ENST ID: ENST00000612523
  CDS Start-End: 307-2127
gagcgaagccggcgcgcctgcagctgggagctgggagctgggagcgcgccgggcgcagggccgggccggccgcgggagggtagtgtcagcgcccgcgtccagctcttcggccgcagacccgggctgtctggaggccgcgcggccacctgctgcgtcgccccggctttgggctggggctagacgcgcaccgcggcgggagcagccccggctcgccgcaccccgcggaaggtgcccttctctgcgcgtctcgccgagcccgggccacgctcctgtcccagcgagcttgacatgatttccacaagggtgatggacattaagcttcgggaggctgcagaaggccttggggaggacagcacaggaaagaaaaaatctaaattcaaaacttttaagaagttttttgggaagaagaagagaaaagaatcgccgtcgtccacaggaagtagcacctggaaacaaagtcagacgaggaatgaggtcattgccatcgaatccgggccagtgggctacgactccgaggatgagctggaggagtcgaggggcacgctgggcagccgggccctttctcacgacagtattttcattcctgagtccggacaggacgctactcggcctgtgcgggtgttttcccaagaaaatgtgtgtgatcggattaaagctctgcagttaaaaatacagtgtaatgtgaaaatggggccaccacctcctccaggggggcttcctgccaagcggggagaggatgccggcatgagctctgaggacgacgggctgcccaggagccccccagagatgtctctgctgcacgacgtgggtcctggtaccaccataaaggtctctgtcgtgtctccagaccacgtgagcgacagcaccgtctctgcccggatctcagacaacagcctggcaccagtggctgacttcagttatcctgcagaatcctcctcctgcctggacaactctgcagctaagcacaagctccaggtcaagccccgcaaccagcggtcgagtaagatgaggcggctctcatcgcgcgctcagtctgaatccctgagcgacctgacgtgcaccccagaggaggaggaaaacgaggagaagccacttttggaagtcagcccagaagagcgccccagctctgggcagcaggacgtggcgccagacagaggccctgagcctgggccaccggcgcccttgccgccacccggaggggcccgtgccagacgcgcccgcctgcagcactcctccgcgctcacggccagcgtggaggaggggggcgtccccggggaggacccctcaagccgcccggccaccccggagctcgccgagcccgagtcggcccccactctccgcgtggagcccccgtccccgccggagggccccccgaatcccggtcccgacggcggaaagcaggatggggaggcgccccccgcaggcccgtgtgccccggccacggacaaggcggaggaggtggtctgtgctcccgaagacgtcgcgagcccgtttcccaccgccatccctgagggggacacgactccccccgagactgaccccgccgccacctcagaggcgccctctgctcgcgacgggccagaacgcagtgtcccgaaggaagcggagccgacgccgcccgtgctcccggatgaggagaaggggcccccagggccggcgcctgagcccgagagagaagcggagacggagcccgagagaggagcggggaccgagcccgagagaattgggaccgagccctccacggcgcccgccccgagcccgccggcgcccaagagctgcctgaaacaccggcccgcggccgccagcgagggccgccgcgtccccgccgcttgccgctgcggagtctcccccggtggagcccggccccggttccctcgacgcagaggccgccgccccggagcgccccaaggccgagcgagccgaggcgccaccggcgggcgccgagagggcggcgccagagcggaaggcggagaggggcggtgccgagctgcgaggcgcgaagaagttctcggtgtcctcgtgccgagcgcggcctcgtccgggcgtctcccgcccgctggaacgggccagcggccgcctgcccctcgcgaggagcggcccggtctggaggagcgaggcggctcttgacgacctccagggtctccccgagccccagcacgcgaaacctggccctcggaagctggcggagcgcggccctcaggactcgggggacagggcggccagcccggccgggccgcgcaagagccctcaggaggcggccgccgcgcccggcacgagagagccctgcccagccgcccaggagccggccccgagtgaggacagaaaccccttccccgtcaagctccggtccacctccctctcgctcaaatacagggatggcgcctctcaggaggtgaagggtgtgaagaggtacagtgccgaggtccggttagaaaggtcgctgaccgtgctcccgaaggaggagaagtgtcccctcgggacggcccccgcccttcgaggcaccagggcccccagcgaccaaggaaaggggaaggcccggccccccgagccgctcagctccaagccgcccctgccccggaagccgcttctgcagagcttcacgctcccgcaccagcccgcgccccccgacgccggcccgggagagcgggaacccaggaaggagcccaggacggcggagaaaaggccgctgcgcaggggagctgaaaagagtctgccgcctgcagcaacagggcctggagctgatgggcagcctgcgccaccctggatcaccgtcactcggcagaagcggagggggaccttggaccagccacccaaccaggaagacaagcctggggcacggaccctgaagtctgaaccaggaaagcaagccaaggtgcccgagagaggccaggagcctgtgaagcaagctgactttgttcgcagcaagtctttcctgataacccctgtgaagcccgctgtggaccggaagcagggggcaaagctcaacttcaaggaggggctgcaaagaggaatctcattgtcccatcagaacttggctcagtctgcagtgatgatggagaaggaactgcatcagctgaagagagccagttatgccagtacagatcagccatcctggatggaacttgccagaaagaaatctcaagcttggagtgacatgccccagattataaaataggtgggcagtgtgctgataaagcatgtccactaccctgacaagccacttagttaaaaactgccagtgtattgtggcaaacaaactgtgaaacttaaagattgattttatcatcaagttatgacgaacttggggaagaggaaggaaccaggcaaaacaaagaggataaacacacagccatactcctgggccagagggcccagaaacaagaacaacattgaaaaagtccaggaaccagttcctgtgcccaaaggtacgaatgtgtcttttcgaattcccttgataaagaagcctcagacaaggaagaaaatagaaatgaaattggacacataaataggacacccagcaaaggccagaagagaagcccttctaggagaagggacatctgtgcttccagctgagatcagcccatgtctctggtcgctctcttgcctgtggatcctgtcttctttcatgtttactacgaggcatgacattcatggcaaaacagggatgccgtttccaagagcagctataaaacaatctgttttcctaaagacagccactctgagaaggagatgaaggaacacggcagggttcatcaattcatagactgtttccaaaaataatttttaaacttttccactaggcatctgtgtctttaaccactgcacaatgcattgcctgtttaataaaaggtttcaaacatg

SEQ ID NO: 145942 - DNA, 3281 bp, Homo sapiens
  Payload ID: 8939
  Gene Symbol: KIAA1217
  Gene Name: KIAA1217
  Uniprot ID: Q5T5P2
  ENST ID: ENST00000307544
  CDS Start-End: 333-3131
acacatggaagaaacatttctcgttagttcagcattggttttagttatgctgatttccgggacaggaaaaatgccttcctactcagaattaactttcatagagtagaaacaaaacctctgaatgtccgtgaaatagttttaacaagagtggatactgctcctttaaaccacatattttgactaaaagcttccttctgtaaaaaacccaaggcttgcatttagtcaccatgaagacaggcaaagctgaaagcattggagagaggggtggtttcgaggtctctgcaagtctagaaagtttcttctagaaaagaaaggctcacggaaaatgtaagatgcagagagaacttgtttatgcaagaggagatggccctggggcccctcgccccggatctactgctcatccaccccatgcgattccaaattccccaccgtctactccagtgccccattccatgcccccctccccgtccagaattccttatgggggcacccgctccatggttgttcctggcaatgccaccatccccagggacagaatctccagcctgccagtctccagacccatctctccaagcccaagcgccattttagaaagaagagatgtcaagcctgatgaagacatgagtggcaaaaacattgcaatgtacagaaatgagggtttctatgctgatccttacctttatcacgagggacggatgagcatagcctcatcccatggtggacacccactggatgtccccgaccacatcattgcatatcaccgcaccgccatccggtcagcgagtgcttattgtaacccctcaatgcaagcggaaatgcatatggaacaatcactgtacagacagaaatcaaggaaatatccggatagccatttgcctacactgggctccaaaacaccccctgcctctcctcacagagtcagtgacctgaggatgatagacatgcacgctcactataatgcccacggcccccctcacaccatgcagccagaccgggcctctccgagccgccaggcctttaaaaaggagccaggcaccttggtgtatatagaaaagccacggagcgctgcaggattatccagccttgtagacctcggccctcctctaatggagaagcaagtttttgcctacagcacggcgacaatacccaaagacagagagaccagcgagaaaatgatgaaaaccacagccaacaggaaccacacagatagtgcaggaacgccccatgtgtctggtgggaagatgctcagtgctctggagtccacggtgcctcccagccagcctccacctgtgggcacctcagccatccacatgagcctgcttgagatgaggcggagcgtggcggaactcaggctccagctccagcagatgcggcagctccagctgcagaaccaggagttgctgagggcaatgatgaagaaggccgagctggaaatcagtggcaaagtgatggaaacaatgaagagactggaggatcccgtgcagcgacagcgcgtcctagtggagcaagagagacaaaaatatcttcatgaggaagagaagatcgtcaagaagttgtgcgagttggaagactttgttgaagacttgaagaaggactccacggcagccagccgattggttactctgaaagacgtggaagacggggctttcctcctgcgtcaagtgggagaggctgtagctaccctgaaaggagaatttccaaccttacaaaacaagatgcgagccatcctgcgcatagaagtggaggccgtgcggtttctgaaggaggagccacacaagctggacagtctcctgaagcgtgtgcgcagcatgacagacgtcctgaccatgctgcggagacatgtcactgatgggctcctgaaaggcacggacgcagcccaagccgcacagtacatggctatggaaaaggccacagccgcagaagtcctgaagagtcaggaggaggcagcccacacctccggccagcccttccacagcacaggtgcccctggcgatgcgaagtcggaagtggtgcctttgtccggcatgatggttcgccacgcgcagagctcccctgtggtcatccagccctcccagcactccgtggccctgctgaaccctgctcagaacttgcctcacgtggccagctccccagccgtcccccaggaagcaacctccactctgcagatgtcgcaggctccgcagtccccacagatacccatgaatgggtctgccatgcagagcttgttcattgaagaaatccacagtgtgagtgccaagaacagggcagtgtctatcgagaaagcagaaaagaaatgggaggaaaaaaggcaaaatctggatcactataatgggaaagagtttgagaagctcctagaagaagctcaggccaatatcatgaagtcaataccaaatctggagatgccgccagccacaggcccactgccaaggggagatgccccagtggacaaggtggaactttcagaagattctccaaattcggaacaggacttggaaaagctggggggaaagtcgccccctcctcctccgccacctcctcgtcgaagctacctgccaggatcgggactcaccaccacgaggtcaggcgatgtggtctacaccggcagaaaggagaacatcaccgctaaggcaagcagtgaagatgctggaccaagcccacagaccagagctacaaaatatccagcagaggagcctgcttcagcctggaccccatccccaccgcctgtcaccacctcctcctcaaaggatgaggaggaagaagaagaagaaggagacaaaataatggcagaactccaggcattccagaagtgttcctttatggatgtaaattcaaacagtcatgctgagccatcccgggctgacagtcacgttaaagacactaggtcgggcgccacagtgccacccaaggagaagaagaatttggaatttttccatgaagatgtacggaaatctgatgttgaatatgaaaatggcccccaaatggaattccaaaagggctccagcggggccccacagacgagcaggatgcctgtccccatgagtgccaagaacagacccggaaccctggacaaacccggcaagcagtccaaactgcaggatccccgccaatatcgtcaggtagttttaccttaaacccacttttggatggacgctatttcagttaagcaagtcactgacttagtttataccaaatattgtgctttctttgtaagataacggtttacatagacatcctggatctgggggcatgaagaaagtctaaataaacctttgttacacttt

SEQ ID NO: 145943 - DNA, 7383 bp, Homo sapiens
  Payload ID: 8939
  Gene Symbol: KIAA1217
  Gene Name: KIAA1217
  Uniprot ID: Q5T5P2
  ENST ID: ENST00000376451
  CDS Start-End: 261-4658
atgccagtgtcagcttctctccgaaaactgggtaatacgaaatggtctttattggttgtgaacactcgagctgagaaacattttaggatctttgtgtcttttgtgatgattttgtttctgaagaggaagctgtctaaaatattcaagtgtgcaaccaaggatttagatgaagccagcaaacaaaggaatcatgtaatcaggacctgagcgaatgtgcttactcacggcgttagttacacaggtgatttccttaagaaaaaatgcagagagaacttgtttatgcaagaggagatggccctggggcccctcgccccggatctactgctcatccaccccatgcgattccaaattccccaccgtctactccagtgccccattccatgcccccctccccgtccagaattccttatgggggcacccgctccatggttgttcctggcaatgccaccatccccagggacagaatctccagcctgccagtctccagacccatctctccaagcccaagcgccattttagaaagaagagatgtcaagcctgatgaagacatgagtggcaaaaacattgcaatgtacagaaatgagggtttctatgctgatccttacctttatcacgagggacggatgagcatagcctcatcccatggtggacacccactggatgtccccgaccacatcattgcatatcaccgcaccgccatccggtcagcgagtgcttattgtaacccctcaatgcaagcggaaatgcatatggaacaatcactgtacagacagaaatcaaggaaatatccggatagccatttgcctacactgggctccaaaacaccccctgcctctcctcacagagtcagtgacctgaggatgatagacatgcacgctcactataatgcccacggcccccctcacaccatgcagccagaccgggcctctccgagccgccaggcctttaaaaaggagccaggcaccttggtgtatatagaaaagccacggagcgctgcaggattatccagccttgtagacctcggccctcctctaatggagaagcaagtttttgcctacagcacggcgacaatacccaaagacagagagaccagcgagaaaatgatgaaaaccacagccaacaggaaccacacagatagtgcaggaacgccccatgtgtctggtgggaagatgctcagtgctctggagtccacggtgcctcccagccagcctccacctgtgggcacctcagccatccacatgagcctgcttgagatgaggcggagcgtggcggaactcaggctccagctccagcagatgcggcagctccagctgcagaaccaggagttgctgagggcaatgatgaagaaggccgagctggaaatcagtggcaaagtgatggaaacaatgaagagactggaggatcccgtgcagcgacagcgcgtcctagtggagcaagagagacaaaaatatcttcatgaggaagagaagatcgtcaagaagttgtgcgagttggaagactttgttgaagacttgaagaaggactccacggcagccagccgattggttactctgaaagacgtggaagacggggctttcctcctgcgtcaagtgggagaggctgtagctaccctgaaaggagaatttccaaccttacaaaacaagatgcgagccatcctgcgcatagaagtggaggccgtgcggtttctgaaggaggagccacacaagctggacagtctcctgaagcgtgtgcgcagcatgacagacgtcctgaccatgctgcggagacatgtcactgatgggctcctgaaaggcacggacgcagcccaagccgcacagtacatggctatggaaaaggccacagccgcagaagtcctgaagagtcaggaggaggcagcccacacctccggccagcccttccacagcacaggtgcccctggcgatgcgaagtcggaagtggtgcctttgtccggcatgatggttcgccacgcgcagagctcccctgtggtcatccagccctcccagcactccgtggccctgctgaaccctgctcagaacttgcctcacgtggccagctccccagccgtcccccaggaagcaacctccactctgcagatgtcgcaggctccgcagtccccacagatacccatgaatgggtctgccatgcagagcttgttcattgaagaaatccacagtgtgagtgccaagaacagggcagtgtctatcgagaaagcagaaaagaaatgggaggaaaaaaggcaaaatctggatcactataatgggaaagagtttgagaagctcctagaagaagctcaggccaatatcatgaagtcaataccaaatctggagatgccgccagccacaggcccactgccaaggggagatgccccagtggacaaggtggaactttcagaagattctccaaattcggaacaggacttggaaaagctggggggaaagtcgccccctcctcctccgccacctcctcgtcgaagctacctgccaggatcgggactcaccaccacgaggtcaggcgatgtggtctacaccggcagaaaggagaacatcaccgctaaggcaagcagtgaagatgctggaccaagcccacagaccagagctacaaaatatccagcagaggagcctgcttcagcctggaccccatccccaccgcctgtcaccacctcctcctcaaaggatgaggaggaagaagaagaagaaggagacaaaataatggcagaactccaggcattccagaagtgttcctttatggatgtaaattcaaacagtcatgctgagccatcccgggctgacagtcacgttaaagacactaggtcgggcgccacagtgccacccaaggagaagaagaatttggaatttttccatgaagatgtacggaaatctgatgttgaatatgaaaatggcccccaaatggaattccaaaaggttaccacaggggctgtaagacctagtgaccctcctaagtgggaaagaggaatggagaatagtatttctgatgcatcaagaacatcagaatataaaactgagatcataatgaaggaaaattccatatccaatatgagtttactcagagacagtagaaactattcccaggaaactgtgcctaaggccagtttcggtttctctggcattagtccattagaagatgaaataaacaaagggtctaaaatctcaggcctgcaatactctatacctgacaccgagaaccagacgctgaattacggaaagacaaaggagatggaaaagcaaaatacggataagtgtcacgtttcctctcacactagactaacagaatcaagcgtgcatgattttaaaacagaagatcaagaggttatcacgacagattttggccaagttgttctaagacccaaggaggcaaggcatgctaacgtgaaccctaatgaggatggagaatcaagttcaagttctcccactgaagaaaatgcagccactgacaatattgccttcatgattaccgaaaccactgtccaggttctttccagtggggaggtgcatgatattgttagccaaaagggagaagacatacagacggttaatatcgatgccagaaaagagatgaccccccgacaagaagggactgacaatgaggatccagtcgtgtgcctggacaagaaaccagtgatcatcattttcgatgagcccatggacatccggtctgcctataagagactttcaactatctttgaggaatgtgatgaggaattagagagaatgatgatggaggaaaagatagaggaggaggaagaggaggaaaatggggattctgtagtccagaataataacacttcccagatgtctcataagaaggtggccccaggcaatcttagaaccggacaacaggtggaaacaaagtcacagccacactccctggccacagagaccagaaacccaggaggacaggaaatgaacagaacggagctgaacaagttcagccacgtggattctccaaattcggaatgcaagggtgaggacgcgaccgatgaccagtttgaaagccccaagaaaaagtttaaattcaaattccctaagaagcaactcgccgctctcactcaagccattcgcaccggaactaaaacagggaagaagactttgcaagtggtagtctatgaagaagaggaagaggatggcaccctgaaacagcacaaagaagccaagcgcttcgaaatcgctaggtctcaacctgaagacacccctgaaaacacagtgaggaggcaagagcagcccagcatcgagagtacatctccgatttcaagaactgatgaaattagaaaaaacacctacagaacattggatagcctggagcagaccattaaacagctcgaaaatacaatcagtgaaatgagtcccaaagccctagttgatacctcatgttcttccaacagagattctgttgcaagttcatcccacatagcccaagaggcctctccccgacccttgctagttccggatgaaggtcccactgccctagagccccctacgtcgataccttcagcttcacgtaagggctccagcggggccccacagacgagcaggatgcctgtccccatgagtgccaagaacagacccggaaccctggacaaacccggcaagcagtccaaactgcaggatccccgccaatatcgtcaggtagttttaccttaaacccacttttggatggacgctatttcagttaagcaagtcactgacttagtttataccaaatattgtgctttctttgtaagataacggtttacatagacatcctggatctgggggcatgaagaaagtctaaataaacctttgttacacttttttaccacgcttttgcatgcttgcaataaaacatcttttactttgtgactccaaactccaaattttaactgttaacacacggtgccagaccaggtggcttttctttggtgaatgtagtgtttcatctgaacacctcgggaagcagagacaaaccaacctgtggttgaactgcccttaacgtcaccactactaacgtctatgttgactgtattgtgttagaagcacattaacactccgtcacaatgcccgacccccaccccagtaattatccagacgcatggcccacctggcacacaggaaatggtagagctggaatgatgggactcctctcacaaatgtattcttcctttcctcctttcccgtccatcctttgctatgtacatggggggtttctaccaggtccagtagagcacaacaagacttagctcaggccttgaactgtgtttggttggttttctttgattgaattattctcagaagggctgtgttgccaggccctgtgggttgatcatgtgaccgcctttctgacaaaatgtctcccgccatctttatttgcaggctaatggaagtgctaagaaatctggtggggactttaagcctacttccccctccttacctgcttctaagattccagccctttctcccagctctgggaaaagcagttctctgccctcttctagtggtgacagctctaacctccctaatccacctgctactaaaccatcgattgcttctaaccctctcagcccccaaacaggaccacctgctcactctgcctccctcatcccttctgtctctaatggctctttgaagtttcagagcctcactcatacaggtaaaggtcaccatctttcattctcaccgcagagtcaaaatggccgagcaccccctcctttgtcattttcctcctcccctccttctcctgcctcctccgtctcactgaatcaaggtgccaagggcaccaggaccatccatactcccagcctcaccagctacaaggcacagaatggaagttcaagcaaagccaccccatccacagcaaaagaaacctcttaaaggtcaaatcctattaggcacaagtcggagttacatttaaaaaaaattaacagtctacaacaactgttttcacaagagaatgtaacatattgctgtatcgtttgaggcttaatgctaaatatgtgctaaatactggattaatagatttcagtaaagctcgttcgttttgtttggttttctttttacctagttgctatagtgtctacagtctatactcaatacctataaaatgcagtaagcatgtgttacagaaagaggttctggtgggagagaaaggtgcgtgtgagacaggagaattgtcttaagcatataaaacatgtatgattccagaattttagtatgttttgtataaaactatttttcattacggagactagaagtgaacagagaattacacaagtgtgactatacaaattgtaaaacagatactataatatttccttttattttagtgttatttagctttattacagatttctatttttgtcaaaacttcatggttcctttcaagatcttttttgccaaaacattttgatactatagcattgtacatttgaaagtagtgttctagactataaaaccaatgaacttctacatgagccctacagacaggcatgtgtagaaggcaatttatcaaacctattgcactgccatgaaaagtgtgtataataatttgctagcccaagcaagctagttttctttgcttgcttcttttctttcttttttccttccttttttttttttttttcttttttaacatgttgagattctctagttgttttctttggcgtatctaaccccttcttttgttttctgagacctggtaacccacgctcttgcattgtggattttaaaatgtatactctgtacggttctgtaaaccgaaaaacttttgtaaatatataaatatacatagacataaaaatactgtatgtgacagcacatagagtagttttcccacaccaaagttaatttttatgcatgctttaaaagtatatatcgggaccggcagaaatggaagtatccatacatttttaaaaagcaacaagtttgcacagctagagtgtttttgtaaataaatgtatttgtataacacagtcatgtaatatacagaactataagcagagactttgcaaaactaaataaagggctgcatgcttattattttttgtaccttgtcactataactacttcctagtcaaagaacgaaatgtaactgttaccgagttaaatgtttttccgctttgagggatgtaaccacatccactcagaggacactacttttctgaaagctctggggtgactaatgatgagttcctaataaattaattgcaagtgtggtgccttggatgtggcctgttggctcgctttcttctctgtggcttatcaaggtgtagatgacagaaagcaaacctggatacagagtttccaccctcagttcctggaggggctcttattattttctctctttttaaaaaacttccagtagaagtaaagtggaaataaaatgtctttatca

SEQ ID NO: 145944 - DNA, 6052 bp, Homo sapiens
  Payload ID: 8939
  Gene Symbol: KIAA1217
  Gene Name: KIAA1217
  Uniprot ID: Q5T5P2
  ENST ID: ENST00000376452
  CDS Start-End: 404-4528
agagcctcggtggtttgcagcagtggaaccaggcaggcccagttgtgggtaggagaggccgtcacctgttgaggcctcccccccacacccccgcatcgccctgccctggcagagcccagcccccagtccccggagagcgcgcctgaggacggacggacggacggacggacagacctagggacggagggccaggggcaggggagatccaagaggccccgcgctggaatgcagttttctcgggcgagggagactttgcaccggagtggaaaatagtttggggtggggtttcgcaccgtcccctcctccccagccccgggccccctcccaggcgctttctgggagcttttagaactgcgctctgaagtttccagagagcgaggagcttttgcggcaggcagagacaatggaagaaaatgaaagccagaaatgtgagccgtgccttccttactcagcagacagaagacagatgcaggaacaaggcaaaggcaatctgcatgtaacatcaccagaagatgcagaatgccgcagaaccaaggaacgcctttctaatggaaacagtcgtggttcagtttccaagtcttcccgcaatatcccaaggagacacaccctaggggggccccgaagttccaaggaaatactgggaatgcaaacatctgagatggatcggaagagagaagcgttcctagaacatctgaagcagaagtacccccaccacgcctctgcaatcatgggtcaccaagagaggctgagagaccagacaaggagccccaaactgtctcacagtcctcaaccacccagtctgggtgacccggtcgagcatttatcagagacgtccgctgattctttggaagccatgtctgagggggatgctccaacccctttttccagaggcagccggactcgtgcgagccttcctgtggtgaggtcaaccaaccagacgaaagaaagatctctgggggttctctatctccagtatggagatgaaaccaagcagctcaggatgccgaatgaaatcacaagtgcagacacaatccgtgctctcttcgtaagtgcctttccacagcagctcaccatgaaaatgctggaatcgcccagtgtcgccatttacatcaaagatgaaagcagaaatgtctattatgaattaaatgatgtaaggaacattcaagacagatcactcctcaaagtgtacaacaaggatcctgcacatgcgtttaatcacacaccaaaaactatgaatggagacatgaggatgcagagagaacttgtttatgcaagaggagatggccctggggcccctcgccccggatctactgctcatccaccccatgcgattccaaattccccaccgtctactccagtgccccattccatgcccccctccccgtccagaattccttatgggggcacccgctccatggttgttcctggcaatgccaccatccccagggacagaatctccagcctgccagtctccagacccatctctccaagcccaagcgccattttagaaagaagagatgtcaagcctgatgaagacatgagtggcaaaaacattgcaatgtacagaaatgagggtttctatgctgatccttacctttatcacgagggacggatgagcatagcctcatcccatggtggacacccactggatgtccccgaccacatcattgcatatcaccgcaccgccatccggtcagcgagtgcttattgtaacccctcaatgcaagcggaaatgcatatggaacaatcactgtacagacagaaatcaaggaaatatccggatagccatttgcctacactgggctccaaaacaccccctgcctctcctcacagagtcagtgacctgaggatgatagacatgcacgctcactataatgcccacggcccccctcacaccatgcagccagaccgggcctctccgagccgccaggcctttaaaaaggagccaggcaccttggtgtatatagaaaagccacggagcgctgcaggattatccagccttgtagacctcggccctcctctaatggagaagcaagtttttgcctacagcacggcgacaatacccaaagacagagagaccagcgagaaaatgatgaaaaccacagccaacaggaaccacacagatagtgcaggaacgccccatgtgtctggtgggaagatgctcagtgctctggagtccacggtgcctcccagccagcctccacctgtgggcacctcagccatccacatgagcctgcttgagatgaggcggagcgtggcggaactcaggctccagctccagcagatgcggcagctccagctgcagaaccaggagttgctgagggcaatgatgaagaaggccgagctggaaatcagtggcaaagtgatggaaacaatgaagagactggaggatcccgtgcagcgacagcgcgtcctagtggagcaagagagacaaaaatatcttcatgaggaagagaagatcgtcaagaagttgtgcgagttggaagactttgttgaagacttgaagaaggactccacggcagccagccgattggttactctgaaagacgtggaagacggggctttcctcctgcgtcaagtgggagaggctgtagctaccctgaaaggagaatttccaaccttacaaaacaagatgcgagccatcctgcgcatagaagtggaggccgtgcggtttctgaaggaggagccacacaagctggacagtctcctgaagcgtgtgcgcagcatgacagacgtcctgaccatgctgcggagacatgtcactgatgggctcctgaaaggcacggacgcagcccaagccgcacagtacatggctatggaaaaggccacagccgcagaagtcctgaagagtcaggaggaggcagcccacacctccggccagcccttccacagcacaggtgcccctggcgatgcgaagtcggaagtggtgcctttgtccggcatgatggttcgccacgcgcagagctcccctgtggtcatccagccctcccagcactccgtggccctgctgaaccctgctcagaacttgcctcacgtggccagctccccagccgtcccccaggaagcaacctccactctgcagatgtcgcaggctccgcagtccccacagatacccatgaatgggtctgccatgcagagcttgttcattgaagaaatccacagtgtgagtgccaagaacagggcagtgtctatcgagaaagcagaaaagaaatgggaggaaaaaaggcaaaatctggatcactataatgggaaagagtttgagaagctcctagaagaagctcaggccaatatcatgaagtcaataccaaatctggagatgccgccagccacaggcccactgccaaggggagatgccccagtggacaaggtggaactttcagattctccaaattcggaacaggacttggaaaagctggggggaaagtcgccccctcctcctccgccacctcctcgtcgaagctacctgccaggatcgggactcaccaccacgaggtcaggcgatgtggtctacaccggcagaaaggagaacatcaccgctaaggcaagcagtgaagatgctggaccaagcccacagaccagagctacaaaatatccagcagaggagcctgcttcagcctggaccccatccccaccgcctgtcaccacctcctcctcaaaggatgaggaggaagaagaagaagaaggagacaaaataatggcagaactccaggcattccagaagtgttcctttatggatgtaaattcaaacagtcatgctgagccatcccgggctgacagtcacgttaaagacactaggtcgggcgccacagtgccacccaaggagaagaagaatttggaatttttccatgaagatgtacggaaatctgatgttgaatatgaaaatggcccccaaatggaattccaaaagggctccagcggggccccacagacgagcaggatgcctgtccccatgagtgccaagaacagacccggaaccctggacaaacccggcaagcagtccaaactgcaggatccccgccaatatcgtcaggctaatggaagtgctaagaaatctggtggggactttaagcctacttccccctccttacctgcttctaagattccagccctttctcccagctctgggaaaagcagttctctgccctcttctagtggtgacagctctaacctccctaatccacctgctactaaaccatcgattgcttctaaccctctcagcccccaaacaggaccacctgctcactctgcctccctcatcccttctgtctctaatggctctttgaagtttcagagcctcactcatacaggtaaaggtcaccatctttcattctcaccgcagagtcaaaatggccgagcaccccctcctttgtcattttcctcctcccctccttctcctgcctcctccgtctcactgaatcaaggtgccaagggcaccaggaccatccatactcccagcctcaccagctacaaggcacagaatggaagttcaagcaaagccaccccatccacagcaaaagaaacctcttaaaggtcaaatcctattaggcacaagtcggagttacatttaaaaaaaattaacagtctacaacaactgttttcacaagagaatgtaacatattgctgtatcgtttgaggcttaatgctaaatatgtgctaaatactggattaatagatttcagtaaagctcgttcgttttgtttggttttctttttacctagttgctatagtgtctacagtctatactcaatacctataaaatgcagtaagcatgtgttacagaaagaggttctggtgggagagaaaggtgcgtgtgagacaggagaattgtcttaagcatataaaacatgtatgattccagaattttagtatgttttgtataaaactatttttcattacggagactagaagtgaacagagaattacacaagtgtgactatacaaattgtaaaacagatactataatatttccttttattttagtgttatttagctttattacagatttctatttttgtcaaaacttcatggttcctttcaagatcttttttgccaaaacattttgatactatagcattgtacatttgaaagtagtgttctagactataaaaccaatgaacttctacatgagccctacagacaggcatgtgtagaaggcaatttatcaaacctattgcactgccatgaaaagtgtgtataataatttgctagcccaagcaagctagttttctttgcttgcttcttttctttcttttttccttccttttttttttttttttcttttttaacatgttgagattctctagttgttttctttggcgtatctaaccccttcttttgttttctgagacctggtaacccacgctcttgcattgtggattttaaaatgtatactctgtacggttctgtaaaccgaaaaacttttgtaaatatataaatatacatagacataaaaatactgtatgtgacagcacatagagtagttttcccacaccaaagttaatttttatgcatgctttaaaagtatatatcgggaccggcagaaatggaagtatccatacatttttaaaaagcaacaagtttgcacagctagagtgtttttgtaaataaatgtatttgtataacacagtcatgtaatatacagaactataagcagagactttgcaaaactaaataaagggctgcatgcttattattttttgtaccttgtcactataactacttcctagtcaaagaacgaaatgtaactgttaccgagttaaatgtttttccgctttgagggatgtaaccacatccactcagaggacactacttttctgaaagctctggggtgactaatgatgagttcctaataaattaattgcaagtgtggtgccttggatgtggcctgttggctcgctttcttctctgtggcttatcaaggtgtagatgacagaaagcaaacctggatacagagtttccaccctcagttcctggaggggctcttattattttctctctttttaaaaaacttccagtagaagtaaagtggaaataaaatgtctttatcacttgg

SEQ ID NO: 145945 - DNA, 7381 bp, Homo sapiens
  Payload ID: 8939
  Gene Symbol: KIAA1217
  Gene Name: KIAA1217
  Uniprot ID: Q5T5P2
  ENST ID: ENST00000376454
  CDS Start-End: 31-5862
agcgaggagcttttgcggcaggcagagacaatggaagaaaatgaaagccagaaatgtgagccgtgccttccttactcagcagacagaagacagatgcaggaacaaggcaaaggcaatctgcatgtaacatcaccagaagatgcagaatgccgcagaaccaaggaacgcctttctaatggaaacagtcgtggttcagtttccaagtcttcccgcaatatcccaaggagacacaccctaggggggccccgaagttccaaggaaatactgggaatgcaaacatctgagatggatcggaagagagaagcgttcctagaacatctgaagcagaagtacccccaccacgcctctgcaatcatgggtcaccaagagaggctgagagaccagacaaggagccccaaactgtctcacagtcctcaaccacccagtctgggtgacccggtcgagcatttatcagagacgtccgctgattctttggaagccatgtctgagggggatgctccaacccctttttccagaggcagccggactcgtgcgagccttcctgtggtgaggtcaaccaaccagacgaaagaaagatctctgggggttctctatctccagtatggagatgaaaccaagcagctcaggatgccgaatgaaatcacaagtgcagacacaatccgtgctctcttcgtaagtgcctttccacagcagctcaccatgaaaatgctggaatcgcccagtgtcgccatttacatcaaagatgaaagcagaaatgtctattatgaattaaatgatgtaaggaacattcaagacagatcactcctcaaagtgtacaacaaggatcctgcacatgcgtttaatcacacaccaaaaactatgaatggagacatgaggatgcagagagaacttgtttatgcaagaggagatggccctggggcccctcgccccggatctactgctcatccaccccatgcgattccaaattccccaccgtctactccagtgccccattccatgcccccctccccgtccagaattccttatgggggcacccgctccatggttgttcctggcaatgccaccatccccagggacagaatctccagcctgccagtctccagacccatctctccaagcccaagcgccattttagaaagaagagatgtcaagcctgatgaagacatgagtggcaaaaacattgcaatgtacagaaatgagggtttctatgctgatccttacctttatcacgagggacggatgagcatagcctcatcccatggtggacacccactggatgtccccgaccacatcattgcatatcaccgcaccgccatccggtcagcgagtgcttattgtaacccctcaatgcaagcggaaatgcatatggaacaatcactgtacagacagaaatcaaggaaatatccggatagccatttgcctacactgggctccaaaacaccccctgcctctcctcacagagtcagtgacctgaggatgatagacatgcacgctcactataatgcccacggcccccctcacaccatgcagccagaccgggcctctccgagccgccaggcctttaaaaaggagccaggcaccttggtgtatatagaaaagccacggagcgctgcaggattatccagccttgtagacctcggccctcctctaatggagaagcaagtttttgcctacagcacggcgacaatacccaaagacagagagaccagagagaggatgcaagccatggagaaacagattgccagtttaactggccttgttcagtctgcgctttttaaagggcccattacaagttatagcaaagatgcgtctagcgagaaaatgatgaaaaccacagccaacaggaaccacacagatagtgcaggaacgccccatgtgtctggtgggaagatgctcagtgctctggagtccacggtgcctcccagccagcctccacctgtgggcacctcagccatccacatgagcctgcttgagatgaggcggagcgtggcggaactcaggctccagctccagcagatgcggcagctccagctgcagaaccaggagttgctgagggcaatgatgaagaaggccgagctggaaatcagtggcaaagtgatggaaacaatgaagagactggaggatcccgtgcagcgacagcgcgtcctagtggagcaagagagacaaaaatatcttcatgaggaagagaagatcgtcaagaagttgtgcgagttggaagactttgttgaagacttgaagaaggactccacggcagccagccgattggttactctgaaagacgtggaagacggggctttcctcctgcgtcaagtgggagaggctgtagctaccctgaaaggagaatttccaaccttacaaaacaagatgcgagccatcctgcgcatagaagtggaggccgtgcggtttctgaaggaggagccacacaagctggacagtctcctgaagcgtgtgcgcagcatgacagacgtcctgaccatgctgcggagacatgtcactgatgggctcctgaaaggcacggacgcagcccaagccgcacagtacatggctatggaaaaggccacagccgcagaagtcctgaagagtcaggaggaggcagcccacacctccggccagcccttccacagcacaggtgcccctggcgatgcgaagtcggaagtggtgcctttgtccggcatgatggttcgccacgcgcagagctcccctgtggtcatccagccctcccagcactccgtggccctgctgaaccctgctcagaacttgcctcacgtggccagctccccagccgtcccccaggaagcaacctccactctgcagatgtcgcaggctccgcagtccccacagatacccatgaatgggtctgccatgcagagcttgttcattgaagaaatccacagtgtgagtgccaagaacagggcagtgtctatcgagaaagcagaaaagaaatgggaggaaaaaaggcaaaatctggatcactataatgggaaagagtttgagaagctcctagaagaagctcaggccaatatcatgaagtcaataccaaatctggagatgccgccagccacaggcccactgccaaggggagatgccccagtggacaaggtggaactttcagaagattctccaaattcggaacaggacttggaaaagctggggggaaagtcgccccctcctcctccgccacctcctcgtcgaagctacctgccaggatcgggactcaccaccacgaggtcaggcgatgtggtctacaccggcagaaaggagaacatcaccgctaaggcaagcagtgaagatgctggaccaagcccacagaccagagctacaaaatatccagcagaggagcctgcttcagcctggaccccatccccaccgcctgtcaccacctcctcctcaaaggatgaggaggaagaagaagaagaaggagacaaaataatggcagaactccaggcattccagaagtgttcctttatggatgtaaattcaaacagtcatgctgagccatcccgggctgacagtcacgttaaagacactaggtcgggcgccacagtgccacccaaggagaagaagaatttggaatttttccatgaagatgtacggaaatctgatgttgaatatgaaaatggcccccaaatggaattccaaaaggttaccacaggggctgtaagacctagtgaccctcctaagtgggaaagaggaatggagaatagtatttctgatgcatcaagaacatcagaatataaaactgagatcataatgaaggaaaattccatatccaatatgagtttactcagagacagtagaaactattcccaggaaactgtgcctaaggccagtttcggtttctctggcattagtccattagaagatgaaataaacaaagggtctaaaatctcaggcctgcaatactctatacctgacaccgagaaccagacgctgaattacggaaagacaaaggagatggaaaagcaaaatacggataagtgtcacgtttcctctcacactagactaacagaatcaagcgtgcatgattttaaaacagaagatcaagaggttatcacgacagattttggccaagttgttctaagacccaaggaggcaaggcatgctaacgtgaaccctaatgaggatggagaatcaagttcaagttctcccactgaagaaaatgcagccactgacaatattgccttcatgattaccgaaaccactgtccaggttctttccagtggggaggtgcatgatattgttagccaaaagggagaagacatacagacggttaatatcgatgccagaaaagagatgaccccccgacaagaagggactgacaatgaggatccagtcgtgtgcctggacaagaaaccagtgatcatcattttcgatgagcccatggacatccggtctgcctataagagactttcaactatctttgaggaatgtgatgaggaattagagagaatgatgatggaggaaaagatagaggaggaggaagaggaggaaaatggggattctgtagtccagaataataacacttcccagatgtctcataagaaggtggccccaggcaatcttagaaccggacaacaggtggaaacaaagtcacagccacactccctggccacagagaccagaaacccaggaggacaggaaatgaacagaacggagctgaacaagttcagccacgtggattctccaaattcggaatgcaagggtgaggacgcgaccgatgaccagtttgaaagccccaagaaaaagtttaaattcaaattccctaagaagcaactcgccgctctcactcaagccattcgcaccggaactaaaacagggaagaagactttgcaagtggtagtctatgaagaagaggaagaggatggcaccctgaaacagcacaaagaagccaagcgcttcgaaatcgctaggtctcaacctgaagacacccctgaaaacacagtgaggaggcaagagcagcccagcatcgagagtacatctccgatttcaagaactgatgaaattagaaaaaacacctacagaacattggatagcctggagcagaccattaaacagctcgaaaatacaatcagtgaaatgagtcccaaagccctagttgatacctcatgttcttccaacagagattctgttgcaagttcatcccacatagcccaagaggcctctccccgacccttgctagttccggatgaaggtcccactgccctagagccccctacgtcgataccttcagcttcacgtaagggctccagcggggccccacagacgagcaggatgcctgtccccatgagtgccaagaacagacccggaaccctggacaaacccggcaagcagtccaaactgcaggatccccgccaatatcgtcaggctaatggaagtgctaagaaatctggtggggactttaagcctacttccccctccttacctgcttctaagattccagccctttctcccagctctgggaaaagcagttctctgccctcttctagtggtgacagctctaacctccctaatccacctgctactaaaccatcgattgcttctaaccctctcagcccccaaacaggaccacctgctcactctgcctccctcatcccttctgtctctaatggctctttgaagtttcagagcctcactcatacaggtaaaggtcaccatctttcattctcaccgcagagtcaaaatggccgagcaccccctcctttgtcattttcctcctcccctccttctcctgcctcctccgtctcactgaatcaaggtgccaagggcaccaggaccatccatactcccagcctcaccagctacaaggcacagaatggaagttcaagcaaagccaccccatccacagcaaaagaaacctcttaaaggtcaaatcctattaggcacaagtcggagttacatttaaaaaaaattaacagtctacaacaactgttttcacaagagaatgtaacatattgctgtatcgtttgaggcttaatgctaaatatgtgctaaatactggattaatagatttcagtaaagctcgttcgttttgtttggttttctttttacctagttgctatagtgtctacagtctatactcaatacctataaaatgcagtaagcatgtgttacagaaagaggttctggtgggagagaaaggtgcgtgtgagacaggagaattgtcttaagcatataaaacatgtatgattccagaattttagtatgttttgtataaaactatttttcattacggagactagaagtgaacagagaattacacaagtgtgactatacaaattgtaaaacagatactataatatttccttttattttagtgttatttagctttattacagatttctatttttgtcaaaacttcatggttcctttcaagatcttttttgccaaaacattttgatactatagcattgtacatttgaaagtagtgttctagactataaaaccaatgaacttctacatgagccctacagacaggcatgtgtagaaggcaatttatcaaacctattgcactgccatgaaaagtgtgtataataatttgctagcccaagcaagctagttttctttgcttgcttcttttctttcttttttccttccttttttttttttttttcttttttaacatgttgagattctctagttgttttctttggcgtatctaaccccttcttttgttttctgagacctggtaacccacgctcttgcattgtggattttaaaatgtatactctgtacggttctgtaaaccgaaaaacttttgtaaatatataaatatacatagacataaaaatactgtatgtgacagcacatagagtagttttcccacaccaaagttaatttttatgcatgctttaaaagtatatatcgggaccggcagaaatggaagtatccatacatttttaaaaagcaacaagtttgcacagctagagtgtttttgtaaataaatgtatttgtataacacagtcatgtaatatacagaactataagcagagactttgcaaaactaaataaagggctgcatgcttattattttttgtaccttgtcactataactacttcctagtcaaagaacgaaatgtaactgttaccgagttaaatgtttttccgctttgagggatgtaaccacatccactcagaggacactacttttctgaaagctctggggtgactaatgatgagttcctaataaattaattgcaagtgtggtgccttggatgtggcctgttggctcgctttcttctctgtggcttatcaaggtgtagatgacagaaagcaaacctggatacagagtttccaccctcagttcctggaggggctcttattattttctctctttttaaaaaacttccagtagaagtaaagtggaaataaaatgtctttatca

SEQ ID NO: 145946 - DNA, 3203 bp, Homo sapiens
  Payload ID: 8939
  Gene Symbol: KIAA1217
  Gene Name: KIAA1217
  ENST ID: ENST00000376456
  CDS Start-End: 404-3203
agagcctcggtggtttgcagcagtggaaccaggcaggcccagttgtgggtaggagaggccgtcacctgttgaggcctcccccccacacccccgcatcgccctgccctggcagagcccagcccccagtccccggagagcgcgcctgaggacggacggacggacggacggacagacctagggacggagggccaggggcaggggagatccaagaggccccgcgctggaatgcagttttctcgggcgagggagactttgcaccggagtggaaaatagtttggggtggggtttcgcaccgtcccctcctccccagccccgggccccctcccaggcgctttctgggagcttttagaactgcgctctgaagtttccagagagcgaggagcttttgcggcaggcagagacaatggaagaaaatgaaagccagaaatgtgagccgtgccttccttactcagcagacagaagacagatgcaggaacaaggcaaaggcaatctgcatgtaacatcaccagaagatgcagaatgccgcagaaccaaggaacgcctttctaatggaaacagtcgtggttcagtttccaagtcttcccgcaatatcccaaggagacacaccctaggggggccccgaagttccaaggaaatactgggaatgcaaacatctgagatggatcggaagagagaagcgttcctagaacatctgaagcagaagtacccccaccacgcctctgcaatcatgggtcaccaagagaggctgagagaccagacaaggagccccaaactgtctcacagtcctcaaccacccagtctgggtgacccggtcgagcatttatcagagacgtccgctgattctttggaagccatgtctgagggggatgctccaacccctttttccagaggcagccggactcgtgcgagccttcctgtggtgaggtcaaccaaccagacgaaagaaagatctctgggggttctctatctccagtatggagatgaaaccaagcagctcaggatgccgaatgaaatcacaagtgcagacacaatccgtgctctcttcgtaagtgcctttccacagcagctcaccatgaaaatgctggaatcgcccagtgtcgccatttacatcaaagatgaaagcagaaatgtctattatgaattaaatgatgtaaggaacattcaagacagatcactcctcaaagtgtacaacaaggatcctgcacatgcgtttaatcacacaccaaaaactatgaatggagacatgaggatgcagagagaacttgtttatgcaagaggagatggccctggggcccctcgccccggatctactgctcatccaccccatgcgattccaaattccccaccgtctactccagtgccccattccatgcccccctccccgtccagaattccttatgggggcacccgctccatggttgttcctggcaatgccaccatccccagggacagaatctccagcctgccagtctccagacccatctctccaagcccaagcgccattttagaaagaagagatgtcaagcctgatgaagacatgagtggcaaaaacattgcaatgtacagaaatgagggtttctatgctgatccttacctttatcacgagggacggatgagcatagcctcatcccatggtggacacccactggatgtccccgaccacatcattgcatatcaccgcaccgccatccggtcagcgagtgcttattgtaacccctcaatgcaagcggaaatgcatatggaacaatcactgtacagacagaaatcaaggaaatatccggatagccatttgcctacactgggctccaaaacaccccctgcctctcctcacagagtcagtgacctgaggatgatagacatgcacgctcactataatgcccacggcccccctcacaccatgcagccagaccgggcctctccgagccgccaggcctttaaaaaggagccaggcaccttggtgtatatagaaaagccacggagcgctgcaggattatccagccttgtagacctcggccctcctctaatggagaagcaagtttttgcctacagcacggcgacaatacccaaagacagagagaccagcgagaaaatgatgaaaaccacagccaacaggaaccacacagatagtgcaggaacgccccatgtgtctggtgggaagatgctcagtgctctggagtccacggtgcctcccagccagcctccacctgtgggcacctcagccatccacatgagcctgcttgagatgaggcggagcgtggcggaactcaggctccagctccagcagatgcggcagctccagctgcagaaccaggagttgctgagggcaatgatgaagaaggccgagctggaaatcagtggcaaagtgatggaaacaatgaagagactggaggatcccgtgcagcgacagcgcgtcctagtggagcaagagagacaaaaatatcttcatgaggaagagaagatcgtcaagaagttgtgcgagttggaagactttgttgaagacttgaagaaggactccacggcagccagccgattggttactctgaaagacgtggaagacggggctttcctcctgcgtcaagtgggagaggctgtagctaccctgaaaggagaatttccaaccttacaaaacaagatgcgagccatcctgcgcatagaagtggaggccgtgcggtttctgaaggaggagccacacaagctggacagtctcctgaagcgtgtgcgcagcatgacagacgtcctgaccatgctgcggagacatgtcactgatgggctcctgaaaggcacggacgcagcccaagccgcacagtacatggctatggaaaaggccacagccgcagaagtcctgaagagtcaggaggaggcagcccacacctccggccagcccttccacagcacaggtgcccctggcgatgcgaagtcggaagtggtgcctttgtccggcatgatggttcgccacgcgcagagctcccctgtggtcatccagccctcccagcactccgtggccctgctgaaccctgctcagaacttgcctcacgtggccagctccccagccgtcccccaggaagcaacctccactctgcagatgtcgcaggctccgcagtccccacagatacccatgaatgggtctgccatgcagagcttgttcattgaagaaatccacagtgtgagtgccaagaacagggcagtgtctatcgagaaagcag

SEQ ID NO: 145947 - DNA, 6123 bp, Homo sapiens
  Payload ID: 8939
  Gene Symbol: KIAA1217
  Gene Name: KIAA1217
  Uniprot ID: Q5T5P2
  ENST ID: ENST00000376462
  CDS Start-End: 810-4604
ggagagggctgcgcgcttctcgccaagcaagcgggaggcgcactggggccgccgccgttcccgcgctcctccctctcctctgcacccactgtcacgctacccgcccgcgggggagcctcgagagcctccaggtgaattgaaagtcgtttccgggggaggacggagagggtgctgcagtcctggcatgccctgaaactgcaagtcgggcagaaacgacccggcggaggagcagggcgcgcagcgccctgcgcagcatccccgggctgccagaagaggccaccactcggctggcagccgcgagcggcggccgaacctcggccccagactcgggcccccggcacgctcgcccgggagataccccttccccctcttgcgcatttcgcagctgcgctggtgtggggcatgagagcgaggtggctccaggtctccgcggagcagctgccagtgggagagcgaggagaggcgagggggcggcagcctcggcccgaaacggagatcctggggtcctaaatttgtggccgattgcactgtgtcctggagacggagtggaaccacagcccagagcccctgggaatcatccctgaaagactgcattacttctccatggagtcttcctcctcctgcttattttctttttggaacaaggcaaaggcaatctgcatgtaacatcaccagaagatgcagaatgccgcagaaccaaggaacgcctttctaatggaaacagtcgtggttcagtttccaagtcttcccgcaatatcccaaggagacacaccctaggggggccccgaagttccaaggaaatactgggaatgcaaacatctgagatggatcggaagagagaagcgttcctagaacatctgaagcagaagtacccccaccacgcctctgcaatcatgggtcaccaagagaggctgagagaccagacaaggagccccaaactgtctcacagtcctcaaccacccagtctgggtgacccggtcgagcatttatcagagacgtccgctgattctttggaagccatgtctgagggggatgctccaacccctttttccagaggcagccggactcgtgcgagccttcctgtggtgaggtcaaccaaccagacgaaagaaagatctctgggggttctctatctccagtatggagatgaaaccaagcagctcaggatgccgaatgaaatcacaagtgcagacacaatccgtgctctcttcgtaagtgcctttccacagcagctcaccatgaaaatgctggaatcgcccagtgtcgccatttacatcaaagatgaaagcagaaatgtctattatgaattaaatgatgtaaggaacattcaagacagatcactcctcaaagtgtacaacaaggatcctgcacatgcgtttaatcacacaccaaaaactatgaatggagacatgaggatgcagagagaacttgtttatgcaagaggagatggccctggggcccctcgccccggatctactgctcatccaccccatgcgattccaaattccccaccgtctactccagtgccccattccatgcccccctccccgtccagaattccttatgggggcacccgctccatggttgttcctggcaatgccaccatccccagggacagaatctccagcctgccagtctccagacccatctctccaagcccaagcgccattttagaaagaagagatgtcaagcctgatgaagacatgagtggcaaaaacattgcaatgtacagaaatgagggtttctatgctgatccttacctttatcacgagggacggatgagcatagcctcatcccatggtggacacccactggatgtccccgaccacatcattgcatatcaccgcaccgccatccggtcagcgagtgcttattgtaacccctcaatgcaagcggaaatgcatatggaacaatcactgtacagacagaaatcaaggaaatatccggatagccatttgcctacactgggctccaaaacaccccctgcctctcctcacagagtcagtgacctgaggatgatagacatgcacgctcactataatgcccacggcccccctcacaccatgcagccagaccgggcctctccgagccgccaggcctttaaaaaggagccaggcaccttggtgtatatagaaaagccacggagcgctgcaggattatccagccttgtagacctcggccctcctctaatggagaagcaagtttttgcctacagcacggcgacaatacccaaagacagagagaccagagagaggatgcaagccatggagaaacagattgccagtttaactggccttgttcagtctgcgctttttaaagggcccattacaagttatagcaaagatgcgtctagcgagaaaatgatgaaaaccacagccaacaggaaccacacagatagtgcaggaacgccccatgtgtctggtgggaagatgctcagtgctctggagtccacggtgcctcccagccagcctccacctgtgggcacctcagccatccacatgagcctgcttgagatgaggcggagcgtggcggaactcaggctccagctccagcagatgcggcagctccagctgcagaaccaggagttgctgagggcaatgatgaagaaggccgagctggaaatcagtggcaaagtgatggaaacaatgaagagactggaggatcccgtgcagcgacagcgcgtcctagtggagcaagagagacaaaaatatcttcatgaggaagagaagatcgtcaagaagttgtgcgagttggaagactttgttgaagacttgaagaaggactccacggcagccagccgattggttactctgaaagacgtggaagacggggctttcctcctgcgtcaagtgggagaggctgtagctaccctgaaaggagaatttccaaccttacaaaacaagatgcgagccatcctgcgcatagaagtggaggccgtgcggtttctgaaggaggagccacacaagctggacagtctcctgaagcgtgtgcgcagcatgacagacgtcctgaccatgctgcggagacatgtcactgatgggctcctgaaaggcacggacgcagcccaagccgcacagtacatggctatggaaaaggccacagccgcagaagtcctgaagagtcaggaggaggcagcccacacctccggccagcccttccacagcacaggtgcccctggcgatgcgaagtcggaagtggtgcctttgtccggcatgatggttcgccacgcgcagagctcccctgtggtcatccagccctcccagcactccgtggccctgctgaaccctgctcagaacttgcctcacgtggccagctccccagccgtcccccaggaagcaacctccactctgcagatgtcgcaggctccgcagtccccacagatacccatgaatgggtctgccatgcagagcttgttcattgaagaaatccacagtgtgagtgccaagaacagggcagtgtctatcgagaaagcagaaaagaaatgggaggaaaaaaggcaaaatctggatcactataatgggaaagagtttgagaagctcctagaagaagctcaggccaatatcatgaagtcaataccaaatctggagatgccgccagccacaggcccactgccaaggggagatgccccagtggacaaggtggaactttcagaagattctccaaattcggaacaggacttggaaaagctggggggaaagtcgccccctcctcctccgccacctcctcgtcgaagctacctgccaggatcgggactcaccaccacgaggtcaggcgatgtggtctacaccggcagaaaggagaacatcaccgctaaggcaagcagtgaagatgctggaccaagcccacagaccagagctacaaaatatccagcagaggagcctgcttcagcctggaccccatccccaccgcctgtcaccacctcctcctcaaaggatgaggaggaagaagaagaagaaggagacaaaataatggcagaactccagggctccagcggggccccacagacgagcaggatgcctgtccccatgagtgccaagaacagacccggaaccctggacaaacccggcaagcagtccaaactgcaggatccccgccaatatcgtcaggctaatggaagtgctaagaaatctggtggggactttaagcctacttccccctccttacctgcttctaagattccagccctttctcccagctctgggaaaagcagttctctgccctcttctagtggtgacagctctaacctccctaatccacctgctactaaaccatcgattgcttctaaccctctcagcccccaaacaggaccacctgctcactctgcctccctcatcccttctgtctctaatggctctttgaagtttcagagcctcactcatacaggtaaaggtcaccatctttcattctcaccgcagagtcaaaatggccgagcaccccctcctttgtcattttcctcctcccctccttctcctgcctcctccgtctcactgaatcaaggtgccaagggcaccaggaccatccatactcccagcctcaccagctacaaggcacagaatggaagttcaagcaaagccaccccatccacagcaaaagaaacctcttaaaggtcaaatcctattaggcacaagtcggagttacatttaaaaaaaattaacagtctacaacaactgttttcacaagagaatgtaacatattgctgtatcgtttgaggcttaatgctaaatatgtgctaaatactggattaatagatttcagtaaagctcgttcgttttgtttggttttctttttacctagttgctatagtgtctacagtctatactcaatacctataaaatgcagtaagcatgtgttacagaaagaggttctggtgggagagaaaggtgcgtgtgagacaggagaattgtcttaagcatataaaacatgtatgattccagaattttagtatgttttgtataaaactatttttcattacggagactagaagtgaacagagaattacacaagtgtgactatacaaattgtaaaacagatactataatatttccttttattttagtgttatttagctttattacagatttctatttttgtcaaaacttcatggttcctttcaagatcttttttgccaaaacattttgatactatagcattgtacatttgaaagtagtgttctagactataaaaccaatgaacttctacatgagccctacagacaggcatgtgtagaaggcaatttatcaaacctattgcactgccatgaaaagtgtgtataataatttgctagcccaagcaagctagttttctttgcttgcttcttttctttcttttttccttccttttttttttttttttcttttttaacatgttgagattctctagttgttttctttggcgtatctaaccccttcttttgttttctgagacctggtaacccacgctcttgcattgtggattttaaaatgtatactctgtacggttctgtaaaccgaaaaacttttgtaaatatataaatatacatagacataaaaatactgtatgtgacagcacatagagtagttttcccacaccaaagttaatttttatgcatgctttaaaagtatatatcgggaccggcagaaatggaagtatccatacatttttaaaaagcaacaagtttgcacagctagagtgtttttgtaaataaatgtatttgtataacacagtcatgtaatatacagaactataagcagagactttgcaaaactaaataaagggctgcatgcttattattttttgtaccttgtcactataactacttcctagtcaaagaacgaaatgtaactgttaccgagttaaatgtttttccgctttgagggatgtaaccacatccactcagaggacactacttttctgaaagctctggggtgactaatgatgagttcctaataaattaattgcaagtgtggtgccttggatgtggcctgttggctcgctttcttctctgtggcttatcaaggtgtagatgacagaaagcaaacctggatacagagtttccaccctcagttcctggaggggctcttattattttctctctttttaaaaaacttccagtagaagtaaagtggaaataaaatgtctttatca

SEQ ID NO: 145948 - DNA, 5706 bp, Homo sapiens
  Payload ID: 8939
  Gene Symbol: KIAA1217
  Gene Name: KIAA1217
  Uniprot ID: Q5T5P2
  ENST ID: ENST00000396445
  CDS Start-End: 261-2981
atgccagtgtcagcttctctccgaaaactgggtaatacgaaatggtctttattggttgtgaacactcgagctgagaaacattttaggatctttgtgtcttttgtgatgattttgtttctgaagaggaagctgtctaaaatattcaagtgtgcaaccaaggatttagatgaagccagcaaacaaaggaatcatgtaatcaggacctgagcgaatgtgcttactcacggcgttagttacacaggtgatttccttaagaaaaaatgcagagagaacttgtttatgcaagaggagatggccctggggcccctcgccccggatctactgctcatccaccccatgcgattccaaattccccaccgtctactccagtgccccattccatgcccccctccccgtccagaattccttatgggggcacccgctccatggttgttcctggcaatgccaccatccccagggacagaatctccagcctgccagtctccagacccatctctccaagcccaagcgccattttagaaagaagagatgtcaagcctgatgaagacatgagtggcaaaaacattgcaatgtacagaaatgagggtttctatgctgatccttacctttatcacgagggacggatgagcatagcctcatcccatggtggacacccactggatgtccccgaccacatcattgcatatcaccgcaccgccatccggtcagcgagtgcttattgtaacccctcaatgcaagcggaaatgcatatggaacaatcactgtacagacagaaatcaaggaaatatccggatagccatttgcctacactgggctccaaaacaccccctgcctctcctcacagagtcagtgacctgaggatgatagacatgcacgctcactataatgcccacggcccccctcacaccatgcagccagaccgggcctctccgagccgccaggcctttaaaaaggagccaggcaccttggtgtatatagaaaagccacggagcgctgcaggattatccagccttgtagacctcggccctcctctaatggagaagcaagtttttgcctacagcacggcgacaatacccaaagacagagagaccagcgagaaaatgatgaaaaccacagccaacaggaaccacacagatagtgcaggaacgccccatgtgtctggtgggaagatgctcagtgctctggagtccacggtgcctcccagccagcctccacctgtgggcacctcagccatccacatgagcctgcttgagatgaggcggagcgtggcggaactcaggctccagctccagcagatgcggcagctccagctgcagaaccaggagttgctgagggcaatgatgaagaaggccgagctggaaatcagtggcaaagtgatggaaacaatgaagagactggaggatcccgtgcagcgacagcgcgtcctagtggagcaagagagacaaaaatatcttcatgaggaagagaagatcgtcaagaagttgtgcgagttggaagactttgttgaagacttgaagaaggactccacggcagccagccgattggttactctgaaagacgtggaagacggggctttcctcctgcgtcaagtgggagaggctgtagctaccctgaaaggagaatttccaaccttacaaaacaagatgcgagccatcctgcgcatagaagtggaggccgtgcggtttctgaaggaggagccacacaagctggacagtctcctgaagcgtgtgcgcagcatgacagacgtcctgaccatgctgcggagacatgtcactgatgggctcctgaaaggcacggacgcagcccaagccgcacagtacatggctatggaaaaggccacagccgcagaagtcctgaagagtcaggaggaggcagcccacacctccggccagcccttccacagcacaggtgcccctggcgatgcgaagtcggaagtggtgcctttgtccggcatgatggttcgccacgcgcagagctcccctgtggtcatccagccctcccagcactccgtggccctgctgaaccctgctcagaacttgcctcacgtggccagctccccagccgtcccccaggaagcaacctccactctgcagatgtcgcaggctccgcagtccccacagatacccatgaatgggtctgccatgcagagcttgttcattgaagaaatccacagtgtgagtgccaagaacagggcagtgtctatcgagaaagcagaaaagaaatgggaggaaaaaaggcaaaatctggatcactataatgggaaagagtttgagaagctcctagaagaagctcaggccaatatcatgaagtcaataccaaatctggagatgccgccagccacaggcccactgccaaggggagatgccccagtggacaaggtggaactttcagaagattctccaaattcggaacaggacttggaaaagctggggggaaagtcgccccctcctcctccgccacctcctcgtcgaagctacctgccaggatcgggactcaccaccacgaggtcaggcgatgtggtctacaccggcagaaaggagaacatcaccgctaaggcaagcagtgaagatgctggaccaagcccacagaccagagctacaaaatatccagcagaggagcctgcttcagcctggaccccatccccaccgcctgtcaccacctcctcctcaaaggatgaggaggaagaagaagaagaaggagacaaaataatggcagaactccaggcattccagaagtgttcctttatggatgtaaattcaaacagtcatgctgagccatcccgggctgacagtcacgttaaagacactaggtcgggcgccacagtgccacccaaggagaagaagggctccagcggggccccacagacgagcaggatgcctgtccccatgagtgccaagaacagacccggaaccctggacaaacccggcaagcagtccaaactgcaggatccccgccaatatcgtcaggtagttttaccttaaacccacttttggatggacgctatttcagttaagcaagtcactgacttagtttataccaaatattgtgctttctttgtaagataacggtttacatagacatcctggatctgggggcatgaagaaagtctaaataaacctttgttacacttttttaccacgcttttgcatgcttgcaataaaacatcttttactttgtgactccaaactccaaattttaactgttaacacacggtgccagaccaggtggcttttctttggtgaatgtagtgtttcatctgaacacctcgggaagcagagacaaaccaacctgtggttgaactgcccttaacgtcaccactactaacgtctatgttgactgtattgtgttagaagcacattaacactccgtcacaatgcccgacccccaccccagtaattatccagacgcatggcccacctggcacacaggaaatggtagagctggaatgatgggactcctctcacaaatgtattcttcctttcctcctttcccgtccatcctttgctatgtacatggggggtttctaccaggtccagtagagcacaacaagacttagctcaggccttgaactgtgtttggttggttttctttgattgaattattctcagaagggctgtgttgccaggccctgtgggttgatcatgtgaccgcctttctgacaaaatgtctcccgccatctttatttgcaggctaatggaagtgctaagaaatctggtggggactttaagcctacttccccctccttacctgcttctaagattccagccctttctcccagctctgggaaaagcagttctctgccctcttctagtggtgacagctctaacctccctaatccacctgctactaaaccatcgattgcttctaaccctctcagcccccaaacaggaccacctgctcactctgcctccctcatcccttctgtctctaatggctctttgaagtttcagagcctcactcatacaggtaaaggtcaccatctttcattctcaccgcagagtcaaaatggccgagcaccccctcctttgtcattttcctcctcccctccttctcctgcctcctccgtctcactgaatcaaggtgccaagggcaccaggaccatccatactcccagcctcaccagctacaaggcacagaatggaagttcaagcaaagccaccccatccacagcaaaagaaacctcttaaaggtcaaatcctattaggcacaagtcggagttacatttaaaaaaaattaacagtctacaacaactgttttcacaagagaatgtaacatattgctgtatcgtttgaggcttaatgctaaatatgtgctaaatactggattaatagatttcagtaaagctcgttcgttttgtttggttttctttttacctagttgctatagtgtctacagtctatactcaatacctataaaatgcagtaagcatgtgttacagaaagaggttctggtgggagagaaaggtgcgtgtgagacaggagaattgtcttaagcatataaaacatgtatgattccagaattttagtatgttttgtataaaactatttttcattacggagactagaagtgaacagagaattacacaagtgtgactatacaaattgtaaaacagatactataatatttccttttattttagtgttatttagctttattacagatttctatttttgtcaaaacttcatggttcctttcaagatcttttttgccaaaacattttgatactatagcattgtacatttgaaagtagtgttctagactataaaaccaatgaacttctacatgagccctacagacaggcatgtgtagaaggcaatttatcaaacctattgcactgccatgaaaagtgtgtataataatttgctagcccaagcaagctagttttctttgcttgcttcttttctttcttttttccttccttttttttttttttttcttttttaacatgttgagattctctagttgttttctttggcgtatctaaccccttcttttgttttctgagacctggtaacccacgctcttgcattgtggattttaaaatgtatactctgtacggttctgtaaaccgaaaaacttttgtaaatatataaatatacatagacataaaaatactgtatgtgacagcacatagagtagttttcccacaccaaagttaatttttatgcatgctttaaaagtatatatcgggaccggcagaaatggaagtatccatacatttttaaaaagcaacaagtttgcacagctagagtgtttttgtaaataaatgtatttgtataacacagtcatgtaatatacagaactataagcagagactttgcaaaactaaataaagggctgcatgcttattattttttgtaccttgtcactataactacttcctagtcaaagaacgaaatgtaactgttaccgagttaaatgtttttccgctttgagggatgtaaccacatccactcagaggacactacttttctgaaagctctggggtgactaatgatgagttcctaataaattaattgcaagtgtggtgccttggatgtggcctgttggctcgctttcttctctgtggcttatcaaggtgtagatgacagaaagcaaacctggatacagagtttccaccctcagttcctggaggggctcttattattttctctctttttaaaaaacttccagtagaagtaaagtggaaataaaatgtctttatca

SEQ ID NO: 145949 - DNA, 3059 bp, Homo sapiens
  Payload ID: 8939
  Gene Symbol: KIAA1217
  Gene Name: KIAA1217
  Uniprot ID: Q5T5P2
  ENST ID: ENST00000396446
  CDS Start-End: 261-2861
atgccagtgtcagcttctctccgaaaactgggtaatacgaaatggtctttattggttgtgaacactcgagctgagaaacattttaggatctttgtgtcttttgtgatgattttgtttctgaagaggaagctgtctaaaatattcaagtgtgcaaccaaggatttagatgaagccagcaaacaaaggaatcatgtaatcaggacctgagcgaatgtgcttactcacggcgttagttacacaggtgatttccttaagaaaaaatgcagagagaacttgtttatgcaagaggagatggccctggggcccctcgccccggatctactgctcatccaccccatgcgattccaaattccccaccgtctactccagtgccccattccatgcccccctccccgtccagaattccttatgggggcacccgctccatggttgttcctggcaatgccaccatccccagggacagaatctccagcctgccagtctccagacccatctctccaagcccaagcgccattttagaaagaagagatgtcaagcctgatgaagacatgagtggcaaaaacattgcaatgtacagaaatgagggtttctatgctgatccttacctttatcacgagggacggatgagcatagcctcatcccatggtggacacccactggatgtccccgaccacatcattgcatatcaccgcaccgccatccggtcagcgagtgcttattgtaacccctcaatgcaagcggaaatgcatatggaacaatcactgtacagacagaaatcaaggaaatatccggatagccatttgcctacactgggctccaaaacaccccctgcctctcctcacagagtcagtgacctgaggatgatagacatgcacgctcactataatgcccacggcccccctcacaccatgcagccagaccgggcctctccgagccgccaggcctttaaaaaggagccaggcaccttggtgtatatagaaaagccacggagcgctgcaggattatccagccttgtagacctcggccctcctctaatggagaagcaagtttttgcctacagcacggcgacaatacccaaagacagagagaccagcgagaaaatgatgaaaaccacagccaacaggaaccacacagatagtgcaggaacgccccatgtgtctggtgggaagatgctcagtgctctggagtccacggtgcctcccagccagcctccacctgtgggcacctcagccatccacatgagcctgcttgagatgaggcggagcgtggcggaactcaggctccagctccagcagatgcggcagctccagctgcagaaccaggagttgctgagggcaatgatgaagaaggccgagctggaaatcagtggcaaagtgatggaaacaatgaagagactggaggatcccgtgcagcgacagcgcgtcctagtggagcaagagagacaaaaatatcttcatgaggaagagaagatcgtcaagaagttgtgcgagttggaagactttgttgaagacttgaagaaggactccacggcagccagccgattggttactctgaaagacgtggaagacggggctttcctcctgcgtcaagtgggagaggctgtagctaccctgaaaggagaatttccaaccttacaaaacaagatgcgagccatcctgcgcatagaagtggaggccgtgcggtttctgaaggaggagccacacaagctggacagtctcctgaagcgtgtgcgcagcatgacagacgtcctgaccatgctgcggagacatgtcactgatgggctcctgaaaggcacggacgcagcccaagccgcacagtacatggctatggaaaaggccacagccgcagaagtcctgaagagtcaggaggaggcagcccacacctccggccagcccttccacagcacaggtgcccctggcgatgcgaagtcggaagtggtgcctttgtccggcatgatggttcgccacgcgcagagctcccctgtggtcatccagccctcccagcactccgtggccctgctgaaccctgctcagaacttgcctcacgtggccagctccccagccgtcccccaggaagcaacctccactctgcagatgtcgcaggctccgcagtccccacagatacccatgaatgggtctgccatgcagagcttgttcattgaagaaatccacagtgtgagtgccaagaacagggcagtgtctatcgagaaagcagaaaagaaatgggaggaaaaaaggcaaaatctggatcactataatgggaaagagtttgagaagctcctagaagaagctcaggccaatatcatgaagtcaataccaaatctggagatgccgccagccacaggcccactgccaaggggagatgccccagtggacaaggtggaactttcagaagattctccaaattcggaacaggacttggaaaagctggggggaaagtcgccccctcctcctccgccacctcctcgtcgaagctacctgccaggatcgggactcaccaccacgaggtcaggcgatgtggtctacaccggcagaaaggagaacatcaccgctaaggcaagcagtgaagatgctggaccaagcccacagaccagagctacaaaatatccagcagaggagcctgcttcagcctggaccccatccccaccgcctgtcaccacctcctcctcaaaggatgaggaggaagaagaagaagaaggagacaaaataatggcagaactccagggctccagcggggccccacagacgagcaggatgcctgtccccatgagtgccaagaacagacccggaaccctggacaaacccggcaagcagtccaaactgcaggatccccgccaatatcgtcaggtagttttaccttaaacccacttttggatggacgctatttcagttaagcaagtcactgacttagtttataccaaatattgtgctttctttgtaagataacggtttacatagacatcctggatctgggggcatgaagaaagtctaaataaacctttgttacacttttttaccacgcttttgcatgcttgcaataaaacatcttttactttgtga

SEQ ID NO: 145950 - DNA, 5962 bp, Homo sapiens
  Payload ID: 8939
  Gene Symbol: KIAA1217
  Gene Name: KIAA1217
  Uniprot ID: Q5T5P2
  ENST ID: ENST00000430453
  CDS Start-End: 644-4438
agagcctcggtggtttgcagcagtggaaccaggcaggcccagttgtgggtaggagaggccgtcacctgttgaggcctcccccccacacccccgcatcgccctgccctggcagagcccagcccccagtccccggagagcgcgcctgaggacggacggacggacggacggacagacctagggacggagggccaggggcaggggagatccaagaggccccgcgctggaatgcagttttctcgggcgagggagactttgcaccggagtggaaaatagtttggggtggggtttcgcaccgtcccctcctccccagccccgggccccctcccaggcgctttctgggagcttttagaactgcgctctgaagtttccagagagcgaggagcttttgcggcaggcagagacaatggaagaaaatgaaagccagaaatgtgagccgtgccttccttactcagcagacagaagacagatgcaggaacaaggcaaaggcaatctgcatgtaacatcaccagaagatgcagaatgccgcagaaccaaggaacgcctttctaatggaaacagtcgtggttcagtttccaagtcttcccgcaatatcccaaggagacacaccctaggggggccccgaagttccaaggaaatactgggaatgcaaacatctgagatggatcggaagagagaagcgttcctagaacatctgaagcagaagtacccccaccacgcctctgcaatcatgggtcaccaagagaggctgagagaccagacaaggagccccaaactgtctcacagtcctcaaccacccagtctgggtgacccggtcgagcatttatcagagacgtccgctgattctttggaagccatgtctgagggggatgctccaacccctttttccagaggcagccggactcgtgcgagccttcctgtggtgaggtcaaccaaccagacgaaagaaagatctctgggggttctctatctccagtatggagatgaaaccaagcagctcaggatgccgaatgaaatcacaagtgcagacacaatccgtgctctcttcgtaagtgcctttccacagcagctcaccatgaaaatgctggaatcgcccagtgtcgccatttacatcaaagatgaaagcagaaatgtctattatgaattaaatgatgtaaggaacattcaagacagatcactcctcaaagtgtacaacaaggatcctgcacatgcgtttaatcacacaccaaaaactatgaatggagacatgaggatgcagagagaacttgtttatgcaagaggagatggccctggggcccctcgccccggatctactgctcatccaccccatgcgattccaaattccccaccgtctactccagtgccccattccatgcccccctccccgtccagaattccttatgggggcacccgctccatggttgttcctggcaatgccaccatccccagggacagaatctccagcctgccagtctccagacccatctctccaagcccaagcgccattttagaaagaagagatgtcaagcctgatgaagacatgagtggcaaaaacattgcaatgtacagaaatgagggtttctatgctgatccttacctttatcacgagggacggatgagcatagcctcatcccatggtggacacccactggatgtccccgaccacatcattgcatatcaccgcaccgccatccggtcagcgagtgcttattgtaacccctcaatgcaagcggaaatgcatatggaacaatcactgtacagacagaaatcaaggaaatatccggatagccatttgcctacactgggctccaaaacaccccctgcctctcctcacagagtcagtgacctgaggatgatagacatgcacgctcactataatgcccacggcccccctcacaccatgcagccagaccgggcctctccgagccgccaggcctttaaaaaggagccaggcaccttggtgtatatagaaaagccacggagcgctgcaggattatccagccttgtagacctcggccctcctctaatggagaagcaagtttttgcctacagcacggcgacaatacccaaagacagagagaccagagagaggatgcaagccatggagaaacagattgccagtttaactggccttgttcagtctgcgctttttaaagggcccattacaagttatagcaaagatgcgtctagcgagaaaatgatgaaaaccacagccaacaggaaccacacagatagtgcaggaacgccccatgtgtctggtgggaagatgctcagtgctctggagtccacggtgcctcccagccagcctccacctgtgggcacctcagccatccacatgagcctgcttgagatgaggcggagcgtggcggaactcaggctccagctccagcagatgcggcagctccagctgcagaaccaggagttgctgagggcaatgatgaagaaggccgagctggaaatcagtggcaaagtgatggaaacaatgaagagactggaggatcccgtgcagcgacagcgcgtcctagtggagcaagagagacaaaaatatcttcatgaggaagagaagatcgtcaagaagttgtgcgagttggaagactttgttgaagacttgaagaaggactccacggcagccagccgattggttactctgaaagacgtggaagacggggctttcctcctgcgtcaagtgggagaggctgtagctaccctgaaaggagaatttccaaccttacaaaacaagatgcgagccatcctgcgcatagaagtggaggccgtgcggtttctgaaggaggagccacacaagctggacagtctcctgaagcgtgtgcgcagcatgacagacgtcctgaccatgctgcggagacatgtcactgatgggctcctgaaaggcacggacgcagcccaagccgcacagtacatggctatggaaaaggccacagccgcagaagtcctgaagagtcaggaggaggcagcccacacctccggccagcccttccacagcacaggtgcccctggcgatgcgaagtcggaagtggtgcctttgtccggcatgatggttcgccacgcgcagagctcccctgtggtcatccagccctcccagcactccgtggccctgctgaaccctgctcagaacttgcctcacgtggccagctccccagccgtcccccaggaagcaacctccactctgcagatgtcgcaggctccgcagtccccacagatacccatgaatgggtctgccatgcagagcttgttcattgaagaaatccacagtgtgagtgccaagaacagggcagtgtctatcgagaaagcagaaaagaaatgggaggaaaaaaggcaaaatctggatcactataatgggaaagagtttgagaagctcctagaagaagctcaggccaatatcatgaagtcaataccaaatctggagatgccgccagccacaggcccactgccaaggggagatgccccagtggacaaggtggaactttcagaagattctccaaattcggaacaggacttggaaaagctggggggaaagtcgccccctcctcctccgccacctcctcgtcgaagctacctgccaggatcgggactcaccaccacgaggtcaggcgatgtggtctacaccggcagaaaggagaacatcaccgctaaggcaagcagtgaagatgctggaccaagcccacagaccagagctacaaaatatccagcagaggagcctgcttcagcctggaccccatccccaccgcctgtcaccacctcctcctcaaaggatgaggaggaagaagaagaagaaggagacaaaataatggcagaactccagggctccagcggggccccacagacgagcaggatgcctgtccccatgagtgccaagaacagacccggaaccctggacaaacccggcaagcagtccaaactgcaggatccccgccaatatcgtcaggctaatggaagtgctaagaaatctggtggggactttaagcctacttccccctccttacctgcttctaagattccagccctttctcccagctctgggaaaagcagttctctgccctcttctagtggtgacagctctaacctccctaatccacctgctactaaaccatcgattgcttctaaccctctcagcccccaaacaggaccacctgctcactctgcctccctcatcccttctgtctctaatggctctttgaagtttcagagcctcactcatacaggtaaaggtcaccatctttcattctcaccgcagagtcaaaatggccgagcaccccctcctttgtcattttcctcctcccctccttctcctgcctcctccgtctcactgaatcaaggtgccaagggcaccaggaccatccatactcccagcctcaccagctacaaggcacagaatggaagttcaagcaaagccaccccatccacagcaaaagaaacctcttaaaggtcaaatcctattaggcacaagtcggagttacatttaaaaaaaattaacagtctacaacaactgttttcacaagagaatgtaacatattgctgtatcgtttgaggcttaatgctaaatatgtgctaaatactggattaatagatttcagtaaagctcgttcgttttgtttggttttctttttacctagttgctatagtgtctacagtctatactcaatacctataaaatgcagtaagcatgtgttacagaaagaggttctggtgggagagaaaggtgcgtgtgagacaggagaattgtcttaagcatataaaacatgtatgattccagaattttagtatgttttgtataaaactatttttcattacggagactagaagtgaacagagaattacacaagtgtgactatacaaattgtaaaacagatactataatatttccttttattttagtgttatttagctttattacagatttctatttttgtcaaaacttcatggttcctttcaagatcttttttgccaaaacattttgatactatagcattgtacatttgaaagtagtgttctagactataaaaccaatgaacttctacatgagccctacagacaggcatgtgtagaaggcaatttatcaaacctattgcactgccatgaaaagtgtgtataataatttgctagcccaagcaagctagttttctttgcttgcttcttttctttcttttttccttccttttttttttttttttcttttttaacatgttgagattctctagttgttttctttggcgtatctaaccccttcttttgttttctgagacctggtaacccacgctcttgcattgtggattttaaaatgtatactctgtacggttctgtaaaccgaaaaacttttgtaaatatataaatatacatagacataaaaatactgtatgtgacagcacatagagtagttttcccacaccaaagttaatttttatgcatgctttaaaagtatatatcgggaccggcagaaatggaagtatccatacatttttaaaaagcaacaagtttgcacagctagagtgtttttgtaaataaatgtatttgtataacacagtcatgtaatatacagaactataagcagagactttgcaaaactaaataaagggctgcatgcttattattttttgtaccttgtcactataactacttcctagtcaaagaacgaaatgtaactgttaccgagttaaatgtttttccgctttgagggatgtaaccacatccactcagaggacactacttttctgaaagctctggggtgactaatgatgagttcctaataaattaattgcaagtgtggtgccttggatgtggcctgttggctcgctttcttctctgtggcttatcaaggtgtagatgacagaaagcaaacctggatacagagtttccaccctcagttcctggaggggctcttattattttctctctttttaaaaaacttccagtagaagtaaagtggaaataaaatgtctttatcacttgg

SEQ ID NO: 145951 - DNA, 5977 bp, Homo sapiens
  Payload ID: 8939
  Gene Symbol: KIAA1217
  Gene Name: KIAA1217
  Uniprot ID: Q5T5P2
  ENST ID: ENST00000458595
  CDS Start-End: 404-4453
agagcctcggtggtttgcagcagtggaaccaggcaggcccagttgtgggtaggagaggccgtcacctgttgaggcctcccccccacacccccgcatcgccctgccctggcagagcccagcccccagtccccggagagcgcgcctgaggacggacggacggacggacggacagacctagggacggagggccaggggcaggggagatccaagaggccccgcgctggaatgcagttttctcgggcgagggagactttgcaccggagtggaaaatagtttggggtggggtttcgcaccgtcccctcctccccagccccgggccccctcccaggcgctttctgggagcttttagaactgcgctctgaagtttccagagagcgaggagcttttgcggcaggcagagacaatggaagaaaatgaaagccagaaatgtgagccgtgccttccttactcagcagacagaagacagatgcaggaacaaggcaaaggcaatctgcatgtaacatcaccagaagatgcagaatgccgcagaaccaaggaacgcctttctaatggaaacagtcgtggttcagtttccaagtcttcccgcaatatcccaaggagacacaccctaggggggccccgaagttccaaggaaatactgggaatgcaaacatctgagatggatcggaagagagaagcgttcctagaacatctgaagcagaagtacccccaccacgcctctgcaatcatgggtcaccaagagaggctgagagaccagacaaggagccccaaactgtctcacagtcctcaaccacccagtctgggtgacccggtcgagcatttatcagagacgtccgctgattctttggaagccatgtctgagggggatgctccaacccctttttccagaggcagccggactcgtgcgagccttcctgtggtgaggtcaaccaaccagacgaaagaaagatctctgggggttctctatctccagtatggagatgaaaccaagcagctcaggatgccgaatgaaatcacaagtgcagacacaatccgtgctctcttcgtaagtgcctttccacagcagctcaccatgaaaatgctggaatcgcccagtgtcgccatttacatcaaagatgaaagcagaaatgtctattatgaattaaatgatgtaaggaacattcaagacagatcactcctcaaagtgtacaacaaggatcctgcacatgcgtttaatcacacaccaaaaactatgaatggagacatgaggatgcagagagaacttgtttatgcaagaggagatggccctggggcccctcgccccggatctactgctcatccaccccatgcgattccaaattccccaccgtctactccagtgccccattccatgcccccctccccgtccagaattccttatgggggcacccgctccatggttgttcctggcaatgccaccatccccagggacagaatctccagcctgccagtctccagacccatctctccaagcccaagcgccattttagaaagaagagatgtcaagcctgatgaagacatgagtggcaaaaacattgcaatgtacagaaatgagggtttctatgctgatccttacctttatcacgagggacggatgagcatagcctcatcccatggtggacacccactggatgtccccgaccacatcattgcatatcaccgcaccgccatccggtcagcgagtgcttattgtaacccctcaatgcaagcggaaatgcatatggaacaatcactgtacagacagaaatcaaggaaatatccggatagccatttgcctacactgggctccaaaacaccccctgcctctcctcacagagtcagtgacctgaggatgatagacatgcacgctcactataatgcccacggcccccctcacaccatgcagccagaccgggcctctccgagccgccaggcctttaaaaaggagccaggcaccttggtgtatatagaaaagccacggagcgctgcaggattatccagccttgtagacctcggccctcctctaatggagaagcaagtttttgcctacagcacggcgacaatacccaaagacagagagaccagcgagaaaatgatgaaaaccacagccaacaggaaccacacagatagtgcaggaacgccccatgtgtctggtgggaagatgctcagtgctctggagtccacggtgcctcccagccagcctccacctgtgggcacctcagccatccacatgagcctgcttgagatgaggcggagcgtggcggaactcaggctccagctccagcagatgcggcagctccagctgcagaaccaggagttgctgagggcaatgatgaagaaggccgagctggaaatcagtggcaaagtgatggaaacaatgaagagactggaggatcccgtgcagcgacagcgcgtcctagtggagcaagagagacaaaaatatcttcatgaggaagagaagatcgtcaagaagttgtgcgagttggaagactttgttgaagacttgaagaaggactccacggcagccagccgattggttactctgaaagacgtggaagacggggctttcctcctgcgtcaagtgggagaggctgtagctaccctgaaaggagaatttccaaccttacaaaacaagatgcgagccatcctgcgcatagaagtggaggccgtgcggtttctgaaggaggagccacacaagctggacagtctcctgaagcgtgtgcgcagcatgacagacgtcctgaccatgctgcggagacatgtcactgatgggctcctgaaaggcacggacgcagcccaagccgcacagtacatggctatggaaaaggccacagccgcagaagtcctgaagagtcaggaggaggcagcccacacctccggccagcccttccacagcacaggtgcccctggcgatgcgaagtcggaagtggtgcctttgtccggcatgatggttcgccacgcgcagagctcccctgtggtcatccagccctcccagcactccgtggccctgctgaaccctgctcagaacttgcctcacgtggccagctccccagccgtcccccaggaagcaacctccactctgcagatgtcgcaggctccgcagtccccacagatacccatgaatgggtctgccatgcagagcttgttcattgaagaaatccacagtgtgagtgccaagaacagggcagtgtctatcgagaaagcagaaaagaaatgggaggaaaaaaggcaaaatctggatcactataatgggaaagagtttgagaagctcctagaagaagctcaggccaatatcatgaagtcaataccaaatctggagatgccgccagccacaggcccactgccaaggggagatgccccagtggacaaggtggaactttcagaagattctccaaattcggaacaggacttggaaaagctggggggaaagtcgccccctcctcctccgccacctcctcgtcgaagctacctgccaggatcgggactcaccaccacgaggtcaggcgatgtggtctacaccggcagaaaggagaacatcaccgctaaggcaagcagtgaagatgctggaccaagcccacagaccagagctacaaaatatccagcagaggagcctgcttcagcctggaccccatccccaccgcctgtcaccacctcctcctcaaaggatgaggaggaagaagaagaagaaggagacaaaataatggcagaactccaggcattccagaagtgttcctttatggatgtaaattcaaacagtcatgctgagccatcccgggctgacagtcacgttaaagacactaggtcgggcgccacagtgccacccaaggagaagaagggctccagcggggccccacagacgagcaggatgcctgtccccatgagtgccaagaacagacccggaaccctggacaaacccggcaagcagtccaaactgcaggatccccgccaatatcgtcaggctaatggaagtgctaagaaatctggtggggactttaagcctacttccccctccttacctgcttctaagattccagccctttctcccagctctgggaaaagcagttctctgccctcttctagtggtgacagctctaacctccctaatccacctgctactaaaccatcgattgcttctaaccctctcagcccccaaacaggaccacctgctcactctgcctccctcatcccttctgtctctaatggctctttgaagtttcagagcctcactcatacaggtaaaggtcaccatctttcattctcaccgcagagtcaaaatggccgagcaccccctcctttgtcattttcctcctcccctccttctcctgcctcctccgtctcactgaatcaaggtgccaagggcaccaggaccatccatactcccagcctcaccagctacaaggcacagaatggaagttcaagcaaagccaccccatccacagcaaaagaaacctcttaaaggtcaaatcctattaggcacaagtcggagttacatttaaaaaaaattaacagtctacaacaactgttttcacaagagaatgtaacatattgctgtatcgtttgaggcttaatgctaaatatgtgctaaatactggattaatagatttcagtaaagctcgttcgttttgtttggttttctttttacctagttgctatagtgtctacagtctatactcaatacctataaaatgcagtaagcatgtgttacagaaagaggttctggtgggagagaaaggtgcgtgtgagacaggagaattgtcttaagcatataaaacatgtatgattccagaattttagtatgttttgtataaaactatttttcattacggagactagaagtgaacagagaattacacaagtgtgactatacaaattgtaaaacagatactataatatttccttttattttagtgttatttagctttattacagatttctatttttgtcaaaacttcatggttcctttcaagatcttttttgccaaaacattttgatactatagcattgtacatttgaaagtagtgttctagactataaaaccaatgaacttctacatgagccctacagacaggcatgtgtagaaggcaatttatcaaacctattgcactgccatgaaaagtgtgtataataatttgctagcccaagcaagctagttttctttgcttgcttcttttctttcttttttccttccttttttttttttttttcttttttaacatgttgagattctctagttgttttctttggcgtatctaaccccttcttttgttttctgagacctggtaacccacgctcttgcattgtggattttaaaatgtatactctgtacggttctgtaaaccgaaaaacttttgtaaatatataaatatacatagacataaaaatactgtatgtgacagcacatagagtagttttcccacaccaaagttaatttttatgcatgctttaaaagtatatatcgggaccggcagaaatggaagtatccatacatttttaaaaagcaacaagtttgcacagctagagtgtttttgtaaataaatgtatttgtataacacagtcatgtaatatacagaactataagcagagactttgcaaaactaaataaagggctgcatgcttattattttttgtaccttgtcactataactacttcctagtcaaagaacgaaatgtaactgttaccgagttaaatgtttttccgctttgagggatgtaaccacatccactcagaggacactacttttctgaaagctctggggtgactaatgatgagttcctaataaattaattgcaagtgtggtgccttggatgtggcctgttggctcgctttcttctctgtggcttatcaaggtgtagatgacagaaagcaaacctggatacagagtttccaccctcagttcctggaggggctcttattattttctctctttttaaaaaacttccagtagaagtaaagtggaaataaaatgtctttatcacttgg

SEQ ID NO: 145952 - DNA, 2589 bp, Homo sapiens
  Payload ID: 8939
  Gene Symbol: KIAA1217
  Gene Name: KIAA1217
  ENST ID: ENST00000438429
  CDS Start-End: 240-2589
aaaagaaaacagcccagacatggaggggggttttacctgacagctccgaaggaagaccctggagtccgttccagacaaaaacttccagaagaattagattttctgctttaactgccgcctcacctgtggagctctgggtacagacaaggagccccaaactgtctcacagtcctcaaccacccagtctgggtgacccggtcgagcatttatcagagacgtccgctgattctttggaagccatgtctgagggggatgctccaacccctttttccagaggcagccggactcgtgcgagccttcctgtggtgaggtcaaccaaccagacgaaagaaagatctctgggggttctctatctccagtatggagatgaaaccaagcagctcaggatgccgaatgaaatcacaagtgcagacacaatccgtgctctcttcgtaagtgcctttccacagcagctcaccatgaaaatgctggaatcgcccagtgtcgccatttacatcaaagatgaaagcagaaatgtctattatgaattaaatgatgtaaggaacattcaagacagatcactcctcaaagtgtacaacaaggatcctgcacatgcgtttaatcacacaccaaaaactatgaatggagacatgaggatgcagagagaacttgtttatgcaagaggagatggccctggggcccctcgccccggatctactgctcatccaccccatgcgattccaaattccccaccgtctactccagtgccccattccatgcccccctccccgtccagaattccttatgggggcacccgctccatggttgttcctggcaatgccaccatccccagggacagaatctccagcctgccagtctccagacccatctctccaagcccaagcgccattttagaaagaagagatgtcaagcctgatgaagacatgagtggcaaaaacattgcaatgtacagaaatgagggtttctatgctgatccttacctttatcacgagggacggatgagcatagcctcatcccatggtggacacccactggatgtccccgaccacatcattgcatatcaccgcaccgccatccggtcagcgagtgcttattgtaacccctcaatgcaagcggaaatgcatatggaacaatcactgtacagacagaaatcaaggaaatatccggatagccatttgcctacactgggctccaaaacaccccctgcctctcctcacagagtcagtgacctgaggatgatagacatgcacgctcactataatgcccacggcccccctcacaccatgcagccagaccgggcctctccgagccgccaggcctttaaaaaggagccaggcaccttggtgtatatagaaaagccacggagcgctgcaggattatccagccttgtagacctcggccctcctctaatggagaagcaagtttttgcctacagcacggcgacaatacccaaagacagagagaccagcgagaaaatgatgaaaaccacagccaacaggaaccacacagatagtgcaggaacgccccatgtgtctggtgggaagatgctcagtgctctggagtccacggtgcctcccagccagcctccacctgtgggcacctcagccatccacatgagcctgcttgagatgaggcggagcgtggcggaactcaggctccagctccagcagatgcggcagctccagctgcagaaccaggagttgctgagggcaatgatgaagaaggccgagctggaaatcagtggcaaagtgatggaaacaatgaagagactggaggatcccgtgcagcgacagcgcgtcctagtggagcaagagagacaaaaatatcttcatgaggaagagaagatcgtcaagaagttgtgcgagttggaagactttgttgaagacttgaagaaggactccacggcagccagccgattggttactctgaaagacgtggaagacggggctttcctcctgcgtcaagtgggagaggctgtagctaccctgaaaggagaatttccaaccttacaaaacaagatgcgagccatcctgcgcatagaagtggaggccgtgcggtttctgaaggaggagccacacaagctggacagtctcctgaagcgtgtgcgcagcatgacagacgtcctgaccatgctgcggagacatgtcactgatgggctcctgaaaggcacggacgcagcccaagccgcacagtacatggctatggaaaaggccacagccgcagaagtcctgaagagtcaggaggaggcagcccacacctccggccagcccttccacagcacaggtgcccctggcgatgcgaagtcggaagtggtgcctttgtccggcatgatggttcgccacgcgcagagctcccctgtggtcatccagccctcccagcactccgtggccctgctgaaccctgctcagaacttgcctcacgtggccagctccccagccgtcccccaggaagcaacctccactctgcagatgtcgcaggctccgcagtccccacagatacccatgaatgggtctgccatgcagagcttgttcattgaagaaatccacagtgtgagtgccaagaacagggcagtgtctatcgagaaagcag

SEQ ID NO: 145953 - DNA, 568 bp, Homo sapiens
  Payload ID: 8939
  Gene Symbol: KIAA1217
  Gene Name: KIAA1217
  ENST ID: ENST00000635504
  CDS Start-End: 28-568
gaggagcttttgcggcaggcagagacaatggaagaaaatgaaagccagaaatgtgagccgtgccttccttactcagcagacagaagacagatgcaggaacaaggcaaaggcaatctgcatgtaacatcaccagaagatgcagaatgccgcagaaccaaggaacgcctttctaatggaaacagtcgtggttcagtttccaagtcttcccgcaatatcccaaggagacacaccctaggggggccccgaagttccaaggaaatactgggaatgcaaacatctgagatggatcggaagagagaagcgttcctagaacatctgaagcagaagtacccccaccacgcctctgcaatcatgggtcaccaagagaggctgagagaccaggctttgaagggcatgctgatctctcttcaggcagaacttgacattcaaagacaaggagccccaaactgtctcacagtcctcaaccacccagtctgggtgacccggtcgagcatttatcagagacgtccgctgattctttggaagccatgtctgagggggatgctccaacccctttttccagaggcag

SEQ ID NO: 145954 - DNA, 1358 bp, Homo sapiens
  Payload ID: 8939
  Gene Symbol: KIAA1217
  Gene Name: KIAA1217
  ENST ID: ENST00000635163
  CDS Start-End: 1-1358
gagacaaaataatggcagaactccaggcattccagaagtgttcctttatggatgtaaattcaaacagtcatgctgagccatcccgggctgacagtcacgttaaagacactaggtcgggcgccacagtgccacccaaggagaagaagggcatttttggcagttggagaacaaagcaatccaagaatttggaatttttccatgaagatgtacggaaatctgatgttgaatatgaaaatggcccccaaatggaattccaaaaggttaccacaggggctgtaagacctagtgaccctcctaagtgggaaagaggaatggagaatagtatttctgatgcatcaagaacatcagaatataaaactgagatcataatgaaggaaaattccatatccaatatgagtttactcagagacagtagaaactattcccaggaaactgtgcctaaggccagtttcggtttctctggcattagtccattagaagatgaaataaacaaagggtctaaaatctcaggcctgcaatactctatacctgacaccgagaaccagacgctgaattacggaaagacaaaggagatggaaaagcaaaatacggataagtgtcacgtttcctctcacactagactaacagaatcaagcgtgcatgattttaaaacagaagatcaagaggttatcacgacagattttggccaagttgttctaagacccaaggaggcaaggcatgctaacgtgaaccctaatgaggatggagaatcaagttcaagttctcccactgaagaaaatgcagccactgacaatattgccttcatgattaccgaaaccactgtccaggttctttccagtggggaggtgcatgatattgttagccaaaagggagaagacatacagacggttaatatcgatgccagaaaagagatgaccccccgacaagaagggactgacaatgaggatccagtcgtgtgcctggacaagaaaccagtgatcatcattttcgatgagcccatggacatccggtctgcctataagagactttcaactatctttgaggaatgtgatgaggaattagagagaatgatgatggaggaaaagatagaggaggaggaagaggaggaaaatggggattctgtagtccagaataataacacttcccagatgtctcataagaaggtggccccaggcaatcttagaaccggacaacaggtggaaacaaagtcacagccacactccctggccacagagaccagaaacccaggaggacaggaaatgaacagaacggagctgaacaagttcagccacgtggattctccaaattcggaatgcaagggtgaggacgcgaccgatgaccagtttgaaagccccaag

SEQ ID NO: 145955 - DNA, 6034 bp, Homo sapiens
  Payload ID: 8940
  Gene Symbol: KIAA1257
  Gene Name: KIAA1257
  Uniprot ID: Q9ULG3
  ENST ID: ENST00000265068
  CDS Start-End: 169-1398
gggcctgcggccctccctgcaccggcggacgctcctctcagtcttggagtctcttcgcccaggtggctgtggatccggtacgggagttgccgccgcggtccaactccccgctgccgcccagcgcatccgctcgcaggagcgccggcggccagcagtgcgctctgcagcatgtcgctacatgcctgggagtgggaagaggaccccgcaagcatagagcccatctcctccatcactagcttttaccagtccacgagcgagtgtgacgtggaggaacacctgaaggccaaggccagggcccaggagtctgactctgaccgcccgtgcagcagcatcgagtcctcatctgagcctgccagcactttcagctccgacgtgccccacgtggtcccctgcaaattcaccatctcactggccttccctgtgaatatgggtcagaagggaaaatatgcaagtttgattgaaaaatataagaaacaccctaaaacagacagttctgttacaaagatgcgtcgtttttaccacattgagtatttccttctgccggacgatgaagaacctaaaaaagttgacatattgctatttccaatggtggccaaagtattcctggagtcaggagtaaagactgtgaagccgtggcacgaaggtgacaaagcctgggtgtcgtgggagcagacttttaatatcactgtgacaaaggaattattaaagaaaataaatttccacaaaatcaccttgaggctctggaacactaaagacaagatgtcaagaaaagtcagatattaccgattaaagactgccggcttcacagacgacgtgggagcttttcataagtcagaagtgagacatttggttttaaatcagagaaaattatctgaacagggcattgagaataccaacattgtcagagaagagtcgaaccaggaacatccgccaggaaaacaagaaaaaacagaaaaacacccaaagtctttgcaaggttctcaccaagcagagcccgaaacttcttccaagaacagtgaggaatatgagaagtccctcaaaatggacgattcttccacgattcaatggagtgtttcaagaacaccaaccatttctttggcaggagcaagcatgatggagatcaaggaattaattgagagtgaatcacttagcagcttaacaaacatattagacagacaaaggtctcaaattaaagggaaagattcagagggaagaaggaaaatccagaggagacataagaagcccctggcagaagaagaggcagaccccacgctgacaggccccaggaagcagagcgctttctccatccagctggccgtcatgccgctccttgccggtacccactgcttgccctgttcccagcagctcctgcttgtcttgtggccagaacggccataagcggatgctcctaatgacaaccctgctgcgtgccacctcatttcatcctcacagccacctcaggaaactcaggggaattggcttcatagtacagggggaaacaaaggcccagagagggtagctaccttgcctgagatcacacagctaggaaatgtgaagcctggacttgaacccagctctgtttgattccaaaatccaaggaagcctatgggaatattaaatgtcatcattgtgtttgttaagaagatgctgcttttaataaatgctttcctacagatttttacaaaaacatctagtaaagggaatgaggaaagggaaccctttttgactgagcccctctgggtgcaggcacttcccgtgtgacacatcacttacttctcagaccaaattctgacccactcagccaacctgtggtgtggtggtggctgtggtggttatcatagttaccatttttttcagtgaggaaaagaactcaaagaggttaagtaactttcctaatcccacacagctcagtggccaaacagggatttaattattttgctttataagatctaccacaatttatgaactggactttatacatactggtaaatcataactaaatattatatcaatatgttttgatgattgaaagctcagcatatattttggtaaaattatgttgctttgttccaaaaaagagtaatatggggtgaactccccccctttttttttctttttagagaaaattcagactttgttcgtttttttgccatcacgtgtcttgtgcgccctctcctggctactctgcagaagcgcgtgcgttggtcttttctgagctggaaccagcattcatagagaagggggcaaaaaccccgtaagtcagagcctccagttcagttccacaggtgccagtcgtcatcctcctctcgcgctcttgggttggtgtcaattcagtttgagaaagtgctattaacttttcagtttgcactttttttttttttgagatagggtcttgctctctcacccaggctggagtgtaagtgacatgatcatagctcactccagcctgaagcaagcctcccgcctctgccacccgcatagctaagactacaggtgcacaccaccacacctggctattttttttattttctgtagagacaaggtcttgctatgttgcccaggctggtctcaaactcctggtcacaagtaatcctcctgcttcagcctctcagagttctagaattacaggcatgagctgccgcatttggcagtttgcagttttaaatgactttttgaaaatgatacttcacctacagcttgtccttcctgatcaccttcactttctcgtagcatcagaacctcttgagaggcaacagtgacagagagtaaactttcagagggtcttaccccaccccacgctccagcctgaccctccagcatacctattgcacacagtagctttgagcgaacgcctttgctagctgcttccttcgtcctacagtcccaaggaggaacccatgatcctcctgggggagcgtaccatgggacctgccccgctttggattttactgtgagaggaaaaagaagttcaaccatttgggcctgcctggcatgactgtttccagcagaatgaagccaggacatggtcccctctctcttttttttttttcgagatggagtcttgctctgtcgcccaggctggagtgcagtggcgcgatctcggctcactacagcctctgcccccccaggtttaagcaattctcctgcttcaacctctagagtagctgggattacaggcgcatgccaccatgccaggctaatttttgtattttttgtagagatggggtttcacaattttggccaggctggtcttgaactcctgacctcgtgattgtcttacatgtccgtgtgaagagaccaaacaggctttgtgtaagtaacaaggctgtttatttcacctgggtgcaggcaggctgagtctgaaaagagagtcagcaaagggtggtgggattatcattagttcttacaggttttgggataggcagtggagttaagagcaatgttttgggggcagggggtggatctcacaaagtacattctcaagggtggggagaattacaaaaaaaccttcttaagggtgggggagattataaagaaccttcttaagtgtgggggagattacaaagtacattgatagttagggtggggcagaaacaaatcacaatggtggaatgtcatcagttaaggctattttcacttcttttgtggatcttcagttgcttcaggccatctggatgtatacatgcaggtcactggggatatgatggcttagcttgggctcagaggcctgacagtgatccacctgcctcagcctcccaaagtgctgggattacaggcgtgagctaccgcactggacctagcctcccctctctataacctgccccgtcatgtacaatgctgtacagtgcaggggttcacatgtaagaactttggtgaccaaaacactttgatcatggctcagccacttaccagcaagttacctactttctctgagtctcactttcctcctctgtgaaatgggggtgattactcctacctcagagcgttgttttaaggatcacaggagctgacgtgtgtaaactgctagcacagtgggacccagggggtgcaggtgtggaggcagcagctgtcctgaggccatgtgtgtgggccgctccattatacccatgacatagcctatggtcatcgacagagaacgggtcagctcagcaggccagttgtatgtctggttttgccagaaactaatagcataagattatttactgtaagcccagcataattatttttggtaatcatcttcaatttcaaattaggccatagatcatgtatgtataccttattagtaaatattggttggctagtaacccagtaagattctagaaagattctgtgtctgggaatgagctcttattttaaaaggatagtattgcatagcggaggggccccacttagcccaacagaactggtttggatgctggttctacaacgtattttctaagagaccttggatgattgcgtcagaactctgggcctcatttcccccatctgtaatgtggagatgacagcaaccacacaaggttaaggatgaaatgacattagcgcatgtttgggactggctgttggaggagcacaaacattcccttacaccattccactcttaaccagggctcttaactcagggggcttgtgtctgctggggacacttggctgtgtgtggaggcattttggttggcacgactgagagtgggatgccactggcatctagtaagatactgttaaacatgccataatgcacaggactgtcccctgagcaaagaatggtctgccccaactgtcagcagtgtggaggctgtgagcccgcagcctggaattctgttctggtgtatgtctccctgactctgatgatttgagcactttttttttatttttatttttgcaatggggattccttctaccttgagtagtcttttttttttttttgagacggagttttgctcttgttgcccaggctggagtacaatggcgcgatctcagctcaccgcaacctccgcctcccgggttcaagcgattctcctgcattagccttcctgagtagttgggaatacaggcatgcgctaccacgtccggctgattttgtatttttggtagagacgaggtttctccattttggtcaggctggtctcaaactcccgacttcaggtgatccgcctgcctcggcctgccaaactgctgggattataggcgtgagccaccgtacccggcctacccttgggtagtctttcatgtgaaaaggctcacaaaattatagaacacaggcgtaatgggtgacagcttttatgaatcagctttgttaaagaggatcctgcgggagcatgagggctacccccaggagctgtgcacgcctctgttcacagcctgtgcagatggctgtgcacacctggcccgggacttgttttagaagtgcctactctttctgaatgtgagcgacttggcttttacatgccctagaaatacatttacaggcatgttgaaaggaatagactgatctttttgagcaccatctcatatatcatctttcttaatcctttaaacccaaggaaggtggtgtctatccccattttgaagatgaaattgagccttggagactctagcttatcacatgacaaagagtcagatctgggattcaaacccaggtcaatcctgcctccaaaacttgaggtgattttttttgtttatttgttttgttttttccttacctagtacatctctgactggtgaaatacatggataccttttatagaaaaagcattctgggctgggtgtggtggctcacgcctgtaatccctacactttgggaggccgaggcgggtggatcacgaggtcaggagatcgagaacagcctggctaacacggtgaaaccccgtctttactaacaatacaaaaaattagccaggcatgttgtcgggcacctgtagtcccagctacttgggaggctgaggcaggagaatggcgtgaacccaggaggcgtagctagcagtgagccaagaccgtgccactgtactccagcctgggcagcagagcaagactctgtctc

SEQ ID NO: 145956 - DNA, 1632 bp, Homo sapiens
  Payload ID: 8940
  Gene Symbol: KIAA1257
  Gene Name: KIAA1257
  Uniprot ID: Q9ULG3
  ENST ID: ENST00000515659
  CDS Start-End: 494-1387
acaagtagtacttcacatcttgatagaccttgctttgttttgttttcatctgcttacttgaactagcccaccattatgatttcaacttctcctggtattctgtcgatggtgtaagtttcttgtatgggttggaaccccgagagcgcaccaacagacaacacgaggcggtgtggagcaacatgctgtttcaatgaacgccttggtgcaggccggctgaggcctaaaatggcgtcagccccaagtgaggacggggcaaaggttttatagtctcctgtaaacaggaagtgtcctagtctggcgtaactgctacgctgtacccggatggcctctttctcatcttcatgtcttccggccagggtaggtgtattccagccggctctcctcctgcttctgctattttgctggtgcacgctgctgacgtcagaagggaaaatatgcaagtttgattgaaaaatataagaaacaccctaaaacagacagttctgttacaaagatgcgtcgtttttaccacattgagtatttccttctgccggacgatgaagaacctaaaaaagttgacatattgctatttccaatggtggccaaagtattcctggagtcaggagtaaagactgtgaagccgtggcacgaaggtgacaaagcctgggtgtcgtgggagcagacttttaatatcactgtgacaaaggaattattaaagaaaataaatttccacaaaatcaccttgaggctctggaacactaaagacaagatgtcaagaaaagtcagatattaccgattaaagactgccggcttcacagacgacgtgggagcttttcataagtcagaagtgagacatttggttttaaatcagagaaaattatctgaacagggcattgagaataccaacattgtcagagaagagtcgaaccaggaacatccgccaggaaaacaagaaaaaacagaaaaacacccaaagtctttgcaaggttctcaccaagcagagcccgaaacttcttccaagaacagtgaggaatatgagaagtccctcaaaatggacgattcttccacgattcaatggagtgtttcaagaacaccaaccatttctttggcaggagcaagcatgatggagatcaaggaattaattgagagtgaatcacttagcagcttaacaaacatattagacagacaaaggtctcaaattaaagggaaagattcagagggaagaaggaaaatccagaggagacataagaagcccctggcagaagaagaggcagaccccacgctgacaggccccaggaagcagagcgctttctccatccagctggccgtcatgccgctccttgccggtacccactgcttgccctgttcccagcagctcctgcttgtcttgtggccagaacggccataagcggatgctcctaatgacaaccctgctgcgtgccacctcatttcatcctcacagccacctcaggaaactcaggggaattggcttcatagtacagggggaaacaaaggcccagagagggtagctaccttgcctgagatcacacagctaggaaatgtgaagcctggacttgaacccagctctgtttgattccaaaatccaaggaagcctatgggaatattaaatgtcatcattgtgtttgttaagaa

SEQ ID NO: 145957 - DNA, 2408 bp, Homo sapiens
  Payload ID: 8940
  Gene Symbol: KIAA1257
  Gene Name: KIAA1257
  ENST ID: ENST00000511438
  CDS Start-End: 773-1975
agtcttggagtctcttcgcccaggtggctgtggatccggtacgggagttgccgccgcggtccaactccccgctgccgcccagcgcatccgctcgcaggtaccgccagcacctggaggggaaccccgacccctgcccccacctcggccgccgcagcccgggactcttcccgcctcgcctcgatgcgtgttccctcttcggcgtttgcccggcgttccgcctccatgggcctgagctgatgccccgagcccagcacccagtgcacattcatgttctgtcttggggacagggcttgccctccccgacctcgccaggctcctgcacgtgctgcccccggcctggtttgcctctccccaaatagcaaacgcatcttgtgcttaggcgcagcaggcctgcctgagcagacgtcccctctcccgcctggtggctcccgggagctgctcacctggggcaggcattccagaagcccggcgactgactcctggttaggcgaaggaaacggggttgctcgtcgtcgtgcttactgccagccacccttatctgttgttccttcatccattcattctctaagtcgattgagtaccgactgtgtggcaggcagtgaaggagccccggcgttcatctaggagcaggcgggggaagcagggaagagaagggtgggtgcttctgcaggaggccgggcttacctcctggagcagccctggaatacaggcggggacagccttcactttctccctgccaggagcgccggcggccagcagtgcgctctgcagcatgtcgctacatgcctgggagtgggaagaggaccccgcaagcatagagcccatctcctccatcactagcttttaccagtccacgagcgagtgtgacgtggaggaacacctgaaggccaaggccagggcccaggagtctgactctgaccgcccgtgcagcagcatcgagtcctcatctgagcctgccagcactttcagctccgacgtgccccacgtggtcccctgcaaattcaccatctcactggccttccctgtgaatatgggtcagaagggaaaatatgcaagtttgattgaaaaatataagaaacaccctaaaacagacagttctgttacaaagatgcgtcgtttttaccacattgagtatttccttctgccggacgatgaagaacctaaaaaagttgacatattgctatttccaatggtggccaaagtattcctggagtcaggagtaaagactgtgaagccgtggcacgaaggtgacaaagcctgggtgtcgtgggagcagacttttaatatcactgtgacaaaggaattattaaagaaaataaatttccacaaaatcaccttgaggctctggaacactaaagacaagatgtcaagaaaagtcagatattaccgattaaagactgccggcttcacagacgacgtgggagcttttcataagtcagaagtgagacatttggttttaaatcagagaaaattatctgaacagggcattgagaataccaacattgtcagagaagagtcgaaccaggaacatccgccaggaaaacaagaaaaaacagaaaaacacccaaagtctttgcaaggttctcaccaagcagagcccgaaacttcttccaagaacagtgaggaatatgagaagtccctcaaaatggacgattcttccacgattcaatggagtgtttcaagaacaccaaccatttctttggcaggagcaagcatgatggagatcaaggaattaattgagagtgaatcacttagcagcttaacaaacatattagacagacaaaggtctcaaattaaagggaaagattcagagggaagaaggaaaatccagaggagacataagaagcccctggcagaagaagaggcagaccccacgctgacaggccccaggaagcagagcgctttctccatccagctggccgtcatgccgctccttgccgtcaggaagaagaaagggaacagccccatctcctgagcagcacagaccctcccacggccaccgcatggtgaacctgcacagcctcccccacacccgaccacaccctcctcaacaatcaacttcattaaagtgcagcaggacagatggcagcagccaggccctgtgtgaggctgggctgggctcacctcgtggtcgtggttgcggagcccaatgcggatggagcggctggcccgcgacagcacggccgtcatgccatacaggttgatgaggatgttggccacccgcttcagtaccagctgctcctccatgatggtctgggatcacagaggctccaagtggggactcactacctagaccagtcccccacatggtccctccctgggctgcatctttgcctgtcttagtctcctgtgttccttgagaaagtggagtcaataacacctttctcttcaggttgtgggagaacggc

SEQ ID NO: 145958 - DNA, 3442 bp, Homo sapiens
  Payload ID: 8941
  Gene Symbol: KIAA1324
  Gene Name: KIAA1324
  Uniprot ID: Q6UXG2
  ENST ID: ENST00000369939
  CDS Start-End: 184-3225
agaggacagagggaggaggaaggatgggcggtgttggcgtagccgcagggaggtgactgaagcgagcctggcctcttgcatcctccgcctgtgtacctccctcccctttttttccgccttctgccagcagaagcagcagccgcagcacctgagccgctactgccgctcactcaggacaacgctatggctgagcctgggcacagccaccatctctccgccagagtcaggggaagaactgagaggcgcataccccggctgtggcggctgctgctctgggctgggaccgccttccaggtgacccagggaacgggaccggagcttcatgcctgcaaagagtctgagtaccactatgagtacacggcgtgtgacagcacgggttccaggtggagggtcgccgtgccgcataccccgggcctgtgcaccagcctgcctgaccccatcaagggcaccgagtgctccttctcctgcaacgccggggagtttctggatatgaaggaccagtcatgtaagccatgcgctgagggccgctactccctcggcacaggcattcggtttgatgagtgggatgagctgccccatggctttgccagcctctcagccaacatggagctggatgacagtgctgctgagtccaccgggaactgtacttcgtccaagtgggttccccggggcgactacatcgcctccaacacggacgaatgcacagccacactgatgtacgccgtcaacctgaagcaatctggcaccgttaacttcgaatactactatccagactccagcatcatctttgagtttttcgttcagaatgaccagtgccagcccaatgcagatgactccaggtggatgaagaccacagagaaaggatgggaattccacagtgtggagctaaatcgaggcaataatgtcctctattggagaaccacagccttctcagtatggaccaaagtacccaagcctgtgctggtgagaaacattgccataacaggggtggcctacacttcagaatgcttcccctgcaaacctggcacgtatgcagacaagcagggctcctctttctgcaaactttgcccagccaactcttattcaaataaaggagaaacttcttgccaccagtgtgaccctgacaaatactcagagaaaggatcttcttcctgtaacgtgcgcccagcttgcacagacaaagattatttctacacacacacggcctgcgatgccaacggagagacacaactcatgtacaaatgggccaagccgaaaatctgtagcgaggaccttgagggggcagtgaagctgcctgcctctggtgtgaagacccactgcccaccctgcaacccaggcttcttcaaaaccaacaacagcacctgccagccctgcccatatggttcctactccaatggctcagactgtacccgctgccctgcagggactgaacctgctgtgggatttgaatacaaatggtggaacacgctgcccacaaacatggaaacgaccgttctcagtgggatcaacttcgagtacaagggcatgacaggctgggaggtggctggtgatcacatttacacagctgctggagcctcagacaatgacttcatgattctcactctggttgtgccaggatttagacctccgcagtcggtgatggcagacacagagaataaagaggtggccagaatcacatttgtctttgagaccctctgttctgtgaactgtgagctctacttcatggtgggtgtgaattctaggaccaacactcctgtggagacgtggaaaggttccaaaggcaaacagtcctatacctacatcattgaggagaacactaccacgagcttcacctgggccttccagaggaccacttttcatgaggcaagcaggaagtacaccaatgacgttgccaagatctactccatcaatgtcaccaatgttatgaatggtgtggcctcctactgccgtccctgtgccctagaagcctctgatgtgggctcctcctgcacctcttgtcctgctggttactatattgaccgagattcaggaacctgccactcctgccccactaacacaattctgaaagcccaccagccttatggtgtccaggcctgtgtgccctgtggtccagggaccaagaacaacaagatccactctctgtgctacaacgattgcaccttctcacgcaacactccgaccaggactttcaactacaacttctccgctttggcaaacactgtcactcttgctggagggccaagcttcacttccaaagggctgaaatacttccatcactttaccctcagtctctgtggaaaccagggtaggaaaatgtctgtgtgcaccgacaatgtcactgacctccggattcctgagggtgagtcagggttctccaaatctatcacagcctacgtctgccaggcagtcatcatccccccagaggtgacaggctacaaggccggggtttcctcacagcctgtcagccttgctgatcgacttattggggtgacaacagatatgactctggatggaatcacctccccagctgaacttttccacctggagtccttgggaataccggacgtgatcttcttttataggtccaatgatgtgacccagtcctgcagttctgggagatcaaccaccatccgcgtcaggtgcagtccacagaaaactgtccctggaagtttgctgctgccaggaacgtgctcggatgggacctgtgatggctgcaacttccacttcctgtgggagagcgcggctgcttgcccgctctgctcagtggctgactaccatgctatcgtcagcagctgtgtggctgggatccagaagactacttacgtgtggcgagaacccaagctatgctctggtggcatttctctgcctgagcagagagtcaccatctgcaaaaccatagatttctggctgaaagtgggcatctctgcaggcacctgtactgccatcctgctcaccgtcttgacctgctacttttggaaaaagaatcaaaaactagagtacaagtactccaagctggtgatgaatgctactctcaaggactgtgacctgccagcagctgacagctgcgccatcatggaaggcgaggatgtagaggacgacctcatctttaccagcaagaagtcactctttgggaagatcaaatcatttacctccaagaggactcctgatggatttgactcagtgccgctgaagacatcctcaggaggcctagacatggacctgtgagaggcactgcctgcctcacctgcctcctcaccttgcatagcacctttgcaagcctgcggcgatttgggtgccagcatcctgcaacacccactgctggaaatctcttcattgtggccttatcagatgtttgaatttcagatctttttttatagagtacccaaaccctcctttctgcttgcctcaaacctgccaaatatacccacactttgtttgtaaa

SEQ ID NO: 145959 - DNA, 2782 bp, Homo sapiens
  Payload ID: 8941
  Gene Symbol: KIAA1324
  Gene Name: KIAA1324
  ENST ID: ENST00000457623
  CDS Start-End: 78-2782
tttttttccgccttctgccagcagaagcagcagccgcagcacctgagccgctactgccgctcactcaggacaacgctatggctgagcctgggcacagccaccatctctccgccagagtcaggggaagaactgagaggcgcataccccggctgtggcggctgctgctctgggctgggaccgccttccaggtgacccagggaacgggaccggagcttcatgcctgcaaagagtctgagtaccactatgagtacacggcgtgtgacagcacgggttccaggtggagggtcgccgtgccgcataccccgggcctgtgcaccagcctgcctgaccccatcaagggcaccgagtgctccttctcctgcaacgccggggagtttctggatatgaaggaccagtcatgtaagccatgcgctgagggccgctactccctcggcacaggcattcggtttgatgagtgggatgagctgccccatggctttgccagcctctcagccaacatggagctggatgacagtgctgctgagtccaccgggaactgtacttcgtccaagtgggttccccggggcgactacatcgcctccaacacggacgaatgcacagccacactgatgtacgccgtcaacctgaagcaatctggcaccgttaacttcgaatactactatccagactccagcatcatctttgagtttttcgttcagaatgaccagtgccagcccaatgcagatgactccaggtggatgaagaccacagagaaaggatgggaattccacagtgtggagctaaatcgaggcaataatgtcctctattggagaaccacagccttctcagtatggaccaaagtacccaagcctgtgctggtgagaaacattgccataacagagaaaggatcttcttcctgtaacgtgcgcccagcttgcacagacaaagattatttctacacacacacggcctgcgatgccaacggagagacacaactcatgtacaaatgggccaagccgaaaatctgtagcgaggaccttgagggggcagtgaagctgcctgcctctggtgtgaagacccactgcccaccctgcaacccaggcttcttcaaaaccaacaacagcacctgccagccctgcccatatggttcctactccaatggctcagactgtacccgctgccctgcagggactgaacctgctgtgggatttgaatacaaatggtggaacacgctgcccacaaacatggaaacgaccgttctcagtgggatcaacttcgagtacaagggcatgacaggctgggaggtggctggtgatcacatttacacagctgctggagcctcagacaatgacttcatgattctcactctggttgtgccaggatttagacctccgcagtcggtgatggcagacacagagaataaagaggtggccagaatcacatttgtctttgagaccctctgttctgtgaactgtgagctctacttcatggtgggtgtgaattctaggaccaacactcctgtggagacgtggaaaggttccaaaggcaaacagtcctatacctacatcattgaggagaacactaccacgagcttcacctgggccttccagaggaccacttttcatgaggcaagcaggaagtacaccaatgacgttgccaagatctactccatcaatgtcaccaatgttatgaatggtgtggcctcctactgccgtccctgtgccctagaagcctctgatgtgggctcctcctgcacctcttgtcctgctggttactatattgaccgagattcaggaacctgccactcctgccccactaacacaattctgaaagcccaccagccttatggtgtccaggcctgtgtgccctgtggtccagggaccaagaacaacaagatccactctctgtgctacaacgattgcaccttctcacgcaacactccgaccaggactttcaactacaacttctccgctttggcaaacactgtcactcttgctggagggccaagcttcacttccaaagggctgaaatacttccatcactttaccctcagtctctgtggaaaccagggtaggaaaatgtctgtgtgcaccgacaatgtcactgacctccggattcctgagggtgagtcagggttctccaaatctatcacagcctacgtctgccaggcagtcatcatccccccagaggtgacaggctacaaggccggggtttcctcacagcctgtcagccttgctgatcgacttattggggtgacaacagatatgactctggatggaatcacctccccagctgaacttttccacctggagtccttgggaataccggacgtgatcttcttttataggtccaatgatgtgacccagtcctgcagttctgggagatcaaccaccatccgcgtcaggtgcagtccacagaaaactgtccctggaagtttgctgctgccaggaacgtgctcggatgggacctgtgatggctgcaacttccacttcctgtgggagagcgcggctgcttgcccgctctgctcagtggctgactaccatgctatcgtcagcagctgtgtggctgggatccagaagactacttacgtgtggcgagaacccaagctatgctctggtggcatttctctgcctgagcagagagtcaccatctgcaaaaccatagatttctggctgaaagtgggcatctctgcaggcacctgtactgccatcctgctcaccgtcttgacctgctacttttggaaaaagaatcaaaaactagagtacaagtactccaagctggtgatgaatgctactctcaagga

SEQ ID NO: 145960 - DNA, 564 bp, Homo sapiens
  Payload ID: 8941
  Gene Symbol: KIAA1324
  Gene Name: KIAA1324
  ENST ID: ENST00000533147
  CDS Start-End: 291-564
ttctttctctcggttcacacgccacgtgtgcaacatcggagatgctcataaaataacccctggcccgaaagggcagtagaaaacggaaatttgttggctggcttggaggatgcttccactgtgttcttcacacgagccccgggcctgcctgttgggccggttgcgcaccccgggcgcgcgctctcccgcgcccacgccgcgcgcaccagcggcggcggctgccatggcgacccgcagaagcagcagccgcagcacctgagccgctactgccgctcactcaggacaacgctatggctgagcctgggcacagccaccatctctccgccagagtcaggggaagaactgagaggcgcataccccggctgtggcggctgctgctctgggctgggaccgccttccaggtgacccagggaacgggaccggagcttcatgcctgcaaagagtctgagtaccactatgagtacacggcgtgtgacagcacgggttccaggtggagggtcgccgtgccgcataccccgggcctgtgcaccagcctgcctgaccccatcaagggcaccgagtgct

SEQ ID NO: 145961 - DNA, 750 bp, Homo sapiens
  Payload ID: 8941
  Gene Symbol: KIAA1324
  Gene Name: KIAA1324
  ENST ID: ENST00000531664
  CDS Start-End: 136-750
cgcaggtgagctgcagaggcgcgcgtggtccctgccccacccgcgcggagccagagaggaggcggttgtcaaggcgacgtggaagcagcagccgcagcacctgagccgctactgccgctcactcaggacaacgctatggctgagcctgggcacagccaccatctctccgccagagtcaggggaagaactgagaggcgcataccccggctgtggcggctgctgctctgggctgggaccgccttccaggtgacccagggaacgggaccggagcttcatgcctgcaaagagtctgagtaccactatgagtacacggcgtgtgacagcacgggttccaggtggagggtcgccgtgccgcataccccgggcctgtgcaccagcctgcctgaccccatcaagggcaccgagtgctccttctcctgcaacgccggggagtttctggatatgaaggaccagtcatgtaagccatgcgctgagggccgctactccctcggcacaggcattcggtttgatgagtgggatgagctgccccatggctttgccagcctctcagccaacatggagctggatgacagtgctgctgagtccaccgggaactgtacttcgtccaagtgggttccccggggcgactacatcgcctccaacacggacgaatgcacagccacactgatgtacgccgtcaacctgaagcaatctggcaccgttaacttcgaatactactatccagactccagcatcatctttgagtttttc

SEQ ID NO: 145962 - DNA, 3186 bp, Homo sapiens
  Payload ID: 8941
  Gene Symbol: KIAA1324
  Gene Name: KIAA1324
  ENST ID: ENST00000527996
  CDS Start-End: 16-204
actcaggacaacgctatggctgagcctgggcacagccaccatctctccgccagagtcaggggaagaactgagaggcgcataccccggctgtggcggctgctgctctgggctgggaccgccttccaggtgacccagggaacgggaccggagcttcatgcctgcaaagagccttctcctgcaacgccggggagtttctggatatgaaggaccagtcatgtaagccatgcgctgagggccgctactccctcggcacaggcattcggtttgatgagtgggatgagctgccccatggctttgccagcctctcagccaacatggagctggatgacagtgctgctgagtccaccgggaactgtacttcgtccaagtgggttccccggggcgactacatcgcctccaacacggacgaatgcacagccacactgatgtacgccgtcaacctgaagcaatctggcaccgttaacttcgaatactactatccagactccagcatcatctttgagtttttcgttcagaatgaccagtgccagcccaatgcagatgactccaggtggatgaagaccacagagaaaggatgggaattccacagtgtggagctaaatcgaggcaataatgtcctctattggagaaccacagccttctcagtatggaccaaagtacccaagcctgtgctggtgagaaacattgccataacaggggtggcctacacttcagaatgcttcccctgcaaacctggcacgtatgcagacaagcagggctcctctttctgcaaactttgcccagccaactcttattcaaataaaggagaaacttcttgccaccagtgtgaccctgacaaatactcagagaaaggatcttcttcctgtaacgtgcgcccagcttgcacagacaaagattatttctacacacacacggcctgcgatgccaacggagagacacaactcatgtacaaatgggccaagccgaaaatctgtagcgaggaccttgagggggcagtgaagctgcctgcctctggtgtgaagacccactgcccaccctgcaacccaggcttcttcaaaaccaacaacagcacctgccagccctgcccatatggttcctactccaatggctcagactgtacccgctgccctgcagggactgaacctgctgtgggatttgaatacaaatggtggaacacgctgcccacaaacatggaaacgaccgttctcagtgggatcaacttcgagtacaagggcatgacaggctgggaggtggctggtgatcacatttacacagctgctggagcctcagacaatgacttcatgattctcactctggttgtgccaggatttagacctccgcagtcggtgatggcagacacagagaataaagaggtggccagaatcacatttgtctttgagaccctctgttctgtgaactgtgagctctacttcatggtgggtgtgaattctaggaccaacactcctgtggagacgtggaaaggttccaaaggcaaacagtcctatacctacatcattgaggagaacactaccacgagcttcacctgggccttccagaggaccacttttcatgaggcaagcaggaagtacaccaatgacgttgccaagatctactccatcaatgtcaccaatgttatgaatggtgtggcctcctactgccgtccctgtgccctagaagcctctgatgtgggctcctcctgcacctcttgtcctgctggttactatattgaccgagattcaggaacctgccactcctgccccactaacacaattctgaaagcccaccagccttatggtgtccaggcctgtgtgccctgtggtccagggaccaagaacaacaagatccactctctgtgctacaacgattgcaccttctcacgcaacactccgaccaggactttcaactacaacttctccgctttggcaaacactgtcactcttgctggagggccaagcttcacttccaaagggctgaaatacttccatcactttaccctcagtctctgtggaaaccagggtaggaaaatgtctgtgtgcaccgacaatgtcactgacctccggattcctgagggtgagtcagggttctccaaatctatcacagcctacgtctgccaggcagtcatcatccccccagaggtgacaggctacaaggccggggtttcctcacagcctgtcagccttgctgatcgacttattggggtgacaacagatatgactctggatggaatcacctccccagctgaacttttccacctggagtccttgggaataccggacgtgatcttcttttataggtccaatgatgtgacccagtcctgcagttctgggagatcaaccaccatccgcgtcaggtgcagtccacagaaaactgtccctggaagtttgctgctgccaggaacgtgctcggatgggacctgtgatggctgcaacttccacttcctgtgggagagcgcggctgcttgcccgctctgctcagtggctgactaccatgctatcgtcagcagctgtgtggctgggatccagaagactacttacgtgtggcgagaacccaagctatgctctggtggcatttctctgcctgagcagagagtcaccatctgcaaaaccatagatttctggctgaaagtgggcatctctgcaggcacctgtactgccatcctgctcaccgtcttgacctgctacttttggaaaaagaatcaaaaactagagtacaagtactccaagctggtgatgaatgctactctcaaggactgtgacctgccagcagctgacagctgcgccatcatggaaggcgaggatgtagaggacgacctcatctttaccagcaagaagtcactctttgggaagatcaaatcatttacctccaagcagccagctcctgtcaccatctctctttcagaggactcctgatggatttgactcagtgccgctgaagacatcctcaggaggcctagacatggacctgtgagaggcactgcctgcctcacctgcctcctcaccttgcatagcacctttgcaagcctgcggcgatttgggtgccagcatcctgcaacacccactgctggaaatctcttcattgtggccttatcagatgtttgaatttcagatctttttttatagagtacccaaaccctcctttctgcttgcctcaaacctgccaaatatacccacactttgtttgtaaatt

SEQ ID NO: 145963 - DNA, 570 bp, Homo sapiens
  Payload ID: 8941
  Gene Symbol: KIAA1324
  Gene Name: KIAA1324
  ENST ID: ENST00000534476
  CDS Start-End: 114-570
gcgcgcgtggtccctgccccacccgcgcggagccagagaggaggcggttgtcaaggcgacaagcagcagccgcagcacctgagccgctactgccgctcactcaggacaacgctatggctgagcctgggcacagccaccatctctccgccagagtcaggggaagaactgagaggcgcataccccggctgtggcggctgctgctctgggctgggaccgccttccaggtgacccagggaacgggaccggagcttcatgcctgcaaagagtctgagtaccactatgagtacacggcgtgtgacagcacgggttccaggtggagggtcgccgtgccgcataccccgggcctgtgcaccagcctgcctgaccccatcaagggcaccgagtgctccttctcctgcaacgccggggagtttctggatatgaaggaccagtcatgtaagccatgcgctgagggccgctactccctcggcacaggcattcggtttgatgagtgggatgagctgccccatggctttgccagcctctcagccaacatggagctggatgacagtgctgctgagtccaccggga

SEQ ID NO: 145964 - DNA, 492 bp, Homo sapiens
  Payload ID: 8941
  Gene Symbol: KIAA1324
  Gene Name: KIAA1324
  ENST ID: ENST00000527501
  CDS Start-End: 1-249
atcctgctcaccgtcttgacctgctacttttggaaaaagaatcaaaaactagagtacaagtactccaagctggtgatgaatgctactctcaaggactgtgacctgccagcagctgacagctgcgccatcatggaaggcgaggatgtagaggacgacctcatctttaccagcaagaagtcactctttgggaagatcaaatcatttacctccaaggtgtctgggtccagtcctttgggagctgaatcatagttcagtctcagctgttccccactgagcaattctgagctgggagggctggctttgtgtgggtggaggactcctgatggatttgactcagtgccgctgaagacatcctcaggaggcctagacatggacctgtgagaggcactgcctgcctcacctgcctcctcaccttgcatagcacctttgcaagcctgcggcgatttgggtgccagcatcctgcaacacccactgctggaaatctcttcattg

SEQ ID NO: 145965 - DNA, 2903 bp, Homo sapiens
  Payload ID: 8941
  Gene Symbol: KIAA1324
  Gene Name: KIAA1324
  Uniprot ID: Q6UXG2
  ENST ID: ENST00000529753
  CDS Start-End: 30-2810
cgctactgccgctcactcaggacaacgctatggctgagcctgggcacagccaccatctctccgccagagtcaggggaagaactgagaggcgcataccccggctgtggcggctgctgctctgggctgggaccgccttccaggtgacccagggaacgggaccggagcttcatgcctgcaaagagtctgagtaccactatgagtacacggcgtgtgacagcacgggttccaggtggagggtcgccgtgccgcataccccgggcctgtgcaccagcctgcctgaccccatcaagggcaccgagtgctccttctcctgcaacgccggggagtttctggatatgaaggaccagtcatgtaagccatgcgctgagggccgctactccctcggcacaggcattcggtttgatgagtgggatgagctgccccatggctttgccagcctctcagccaacatggagctggatgacagtgctgctgagtccaccgggaactgtacttcgtccaagtgggttccccggggcgactacatcgcctccaacacggacgaatgcacagccacactgatgtacgccgtcaacctgaagcaatctggcaccgttaacttcgaatactactatccagactccagcatcatctttgagtttttcgttcagaatgaccagtgccagcccaatgcagatgactccaggtggatgaagaccacagagaaaggatgggaattccacagtgtggagctaaatcgaggcaataatgtcctctattggagaaccacagccttctcagtatggaccaaagtacccaagcctgtgctgacacaactcatgtacaaatgggccaagccgaaaatctgtagcgaggaccttgagggggcagtgaagctgcctgcctctggtgtgaagacccactgcccaccctgcaacccaggcttcttcaaaaccaacaacagcacctgccagccctgcccatatggttcctactccaatggctcagactgtacccgctgccctgcagggactgaacctgctgtgggatttgaatacaaatggtggaacacgctgcccacaaacatggaaacgaccgttctcagtgggatcaacttcgagtacaagggcatgacaggctgggaggtggctggtgatcacatttacacagctgctggagcctcagacaatgacttcatgattctcactctggttgtgccaggatttagacctccgcagtcggtgatggcagacacagagaataaagaggtggccagaatcacatttgtctttgagaccctctgttctgtgaactgtgagctctacttcatggtgggtgtgaattctaggaccaacactcctgtggagacgtggaaaggttccaaaggcaaacagtcctatacctacatcattgaggagaacactaccacgagcttcacctgggccttccagaggaccacttttcatgaggcaagcaggaagtacaccaatgacgttgccaagatctactccatcaatgtcaccaatgttatgaatggtgtggcctcctactgccgtccctgtgccctagaagcctctgatgtgggctcctcctgcacctcttgtcctgctggttactatattgaccgagattcaggaacctgccactcctgccccactaacacaattctgaaagcccaccagccttatggtgtccaggcctgtgtgccctgtggtccagggaccaagaacaacaagatccactctctgtgctacaacgattgcaccttctcacgcaacactccgaccaggactttcaactacaacttctccgctttggcaaacactgtcactcttgctggagggccaagcttcacttccaaagggctgaaatacttccatcactttaccctcagtctctgtggaaaccagggtaggaaaatgtctgtgtgcaccgacaatgtcactgacctccggattcctgagggtgagtcagggttctccaaatctatcacagcctacgtctgccaggcagtcatcatccccccagaggtgacaggctacaaggccggggtttcctcacagcctgtcagccttgctgatcgacttattggggtgacaacagatatgactctggatggaatcacctccccagctgaacttttccacctggagtccttgggaataccggacgtgatcttcttttataggtccaatgatgtgacccagtcctgcagttctgggagatcaaccaccatccgcgtcaggtgcagtccacagaaaactgtccctggaagtttgctgctgccaggaacgtgctcggatgggacctgtgatggctgcaacttccacttcctgtgggagagcgcggctgcttgcccgctctgctcagtggctgactaccatgctatcgtcagcagctgtgtggctgggatccagaagactacttacgtgtggcgagaacccaagctatgctctggtggcatttctctgcctgagcagagagtcaccatctgcaaaaccatagatttctggctgaaagtgggcatctctgcaggcacctgtactgccatcctgctcaccgtcttgacctgctacttttggaaaaagaatcaaaaactagagtacaagtactccaagctggtgatgaatgctactctcaaggactgtgacctgccagcagctgacagctgcgccatcatggaaggcgaggatgtagaggacgacctcatctttaccagcaagaagtcactctttgggaagatcaaatcatttacctccaagaggactcctgatggatttgactcagtgccgctgaagacatcctcaggaggcctagacatggacctgtgagaggcactgcctgcctcacctgcctcctcaccttgcatagcacctttgcaagcctgcggcgatttgggtgccagcatcctgcaacacccactg

SEQ ID NO: 145966 - DNA, 553 bp, Homo sapiens
  Payload ID: 8941
  Gene Symbol: KIAA1324
  Gene Name: KIAA1324
  ENST ID: ENST00000526264
  CDS Start-End: 87-553
agagaggaggcggttgtcaaggcgacgtggcagaagcagcagccgcagcacctgagccgctactgccgctcactcaggacaacgctatggctgagcctgggcacagccaccatctctccgccagagtcaggggaagaactgagaggcgcataccccggctgtggcggctgctgctctgggctgggaccgccttccaggtgacccagggaacgggaccggagcttcatgcctgcaaagagtctgagtaccactatgagtacacggcgtgtgacagcacgggttccaggtggagggtcgccgtgccgcataccccgggcctgtgcaccagcctgcctgaccccatcaagggcaccgagtgctccttctcctgcaacgccggggagtttctggatatgaaggaccagtcatgtaagccatgcgctgagggccgctactccctcggcacaggcattcggtttgatgagtgggatgagctgccccatggctttgccagcctctcagccaacatggagctggatgacagtgctgctgagtccaccgggaactgtacttc

SEQ ID NO: 145967 - DNA, 3073 bp, Homo sapiens
  Payload ID: 8942
  Gene Symbol: KIAA1324L
  Gene Name: KIAA1324-like
  ENST ID: ENST00000394714
  CDS Start-End: 1-256
ctcttcttggatccctcgtggaaactacatagaatctaatcgtgatgactgcacggtgtctttgatctatgctgtgcaccttaagaagtcaggctatgtcttctttgagtaccagtatgtcgacaacaacatcttctttgagttctttattcaaaatgatcagtgccaggagatggacaccaccactgacaagtgggtaaaacttacagacaatggagaatggggctctcattctgacagctccttaaatgcttgaaggcaattaccaggtaatgctgaaatcaggcacaaacatactctactggagaactacaggcatccttatgggttctaaggcggtcaagcctgtgctggtaaaaaatatcacaattgaaggggtggcgtacacatcagaatgttttccttgcaagccaggcacattcagcaacaaaccaggttcattcaactgccaggtgtgtcccagaaacacctattctgagaaaggagccaaagaatgtataaggtgtaaagacgactctcaattttcagaggaaggatccagtgagtgtacagagcgccctccctgtaccacaaaagactatttccagatccatactccatgtgatgaagaaggaaagacacagataatgtacaagtggatagagcccaaaatctgccgggaggatctcacagatgctattagattgcccccttctggagagaagaaggattgtccgccttgcaaccctggattttataacaatggatcatcttcttgccatccctgtcctcctggaacattttcagatggaaccaaagaatgtagaccatgtccagcaggaacggagcctgcacttggctttgaatataaatggtggaatgtccttcctggcaacatgaaaacttcctgcttcaatgttgggaattcaaagtgcgatggaatgaatggttgggaggtggctggagatcatatccagagtggggctggaggttctgacaatgattacctgatcttaaacttgcatatcccaggatttaaaccaccaacatctatgactggagccacgggttctgaactaggaagaataacatttgtctttgagaccctctgttcagctgactgtgttttgtacttcatggtggatattaatagaaaaagtacaaatgtggtagaatcgtggggtggaaccaaagaaaaacaagcttacacccatatcatcttcaagaatgcaacttttacatttacatgggcattccagagaactaatcagggtcaagataatagacggttcatcaatgacatggtgaagatttattctatcacagccactaatgcagttgatggggtggcgtcctcatgccgtgcctgtgccctcggttctgaacagtcgggttcatcgtgtgtcccctgccctccaggccactacattgagaaagaaaccaaccagtgcaaggaatgtccacctgacacctacctgtccatacatcaggtctatggcaaagaggcttgtattccatgcgggcctgggagtaaaaacaatcaggaccattcggtttgctatagtgactgctttttctaccatgaaaaagaaaatcagagtttgcactatgactttagcaacctcagcagtgtgggctcattaatgaatggccccagcttcacctccaaaggaacaaaatacttccatttcttcaatatcagtttatgtgggcatgaggggaagaagatggctctctgtaccaacaatataacagactttacagtaaaagaaatagtggcagggtcagatgattacacaaatttggtaggggcatttgtatgccagtcaacaattattccttctgaaagtaagggtttccgagcagccttatcatcacaatccatcattctggcagatacattcataggagtcacagttgaaaccacattgaaaaatattaatataaaagaagatatgttcccagttccaacaagccaaataccagatgtgcatttcttttataagtcttctacagcaacaacatcttgtattaatggccgatcaactgctgtgaaaatgaggtgtaatcctactaaatctggagcaggagtgatttcagtccccagcaagtgcccagcaggtacctgtgatgggtgtacgttctatttcctgtgggagagtgctgaagcttgccctctgtgtacggagcatgacttccatgagattgagggagcctgcaagagaggatttcaggaaaccttgtatgtgtggaatgaacctaaatggtgcattaaaggaatttctttgcctgagaaaaagttggcaacctgtgaaacggttgacttttggctgaaggtgggagccggtgtgggagcttttactgccgttttgctggtggctctgacctgctacttctggaaaaagaatcaaaaactggaatacaaatattccaagttagtaatgacgactaactcaaaagagtgtgaactcccggctgcagacagttgtgctatcatggaaggagaagataatgaagaggaagttgtatattccaataaacagtcactactaggaaaactcaaatctttggcaaccaaggaaaaagaagaccattttgaatctgttcaactgaaaacctcaagatccccaaatatatgaagagacagtgctgtagccttgagactaatgaacaaagaaacctgctctagttttacaggaccatattttagggtctgtcctcatacctgtcacattggtgatctcacagaggagggccatgccgctgaaaagggaaggagattgaaacatttgattgccttatcacatggtcaagtaccttgccaaataaaggaaagcaaatgatttgggtctcaactgaagatgaagctcaactcaggaagagatttatctgtatatacacataactgaaaaccaagtttaagcccaccaatgcactgctgatgcatgccatataattaatgggtaacttttattctttatgatgtctacataacaagtgtgatttggaaggcacatgtgagcatatgcattatgatccaatttatgttttttctttgtttatattttggggaaaattaaaatttttttaaggt

SEQ ID NO: 145968 - DNA, 563 bp, Homo sapiens
  Payload ID: 8942
  Gene Symbol: KIAA1324L
  Gene Name: KIAA1324-like
  ENST ID: ENST00000398276
  CDS Start-End: 228-563
acacagtgagggaggcaaaacagtgtggatgcagcagaataaccacaaccaggattttgaactgaataagtaagaaagattatcactttgaatatacggaatgtgatagcagtggctccaggtggagagttgccattccaaattctgcagtggactgctctggcctgcctgacccagtgagaggcaaagaatgcactttctcctgtgcttctggagagtatctagaaatgaagaaccaggtatgcagtaagtgtggtgaaggcacctattccttgggcagtggcatcaaatttgatgaatgggatgaattgccggcaggattttctaacatcgcaacattcatggacactgtggtgggcccttctgacagcaggccagacggctgtaacaactcttcttggatccctcgtggaaactacatagaatctaatcgtgatgactgcacggtgtctttgatctatgctgtgcaccttaagaagtcaggctatgtcttctttgagtaccagtatgtcgacaacaacatcttctttgagttctttattcaaaatgatcagtgccaggag

SEQ ID NO: 145969 - DNA, 567 bp, Homo sapiens
  Payload ID: 8942
  Gene Symbol: KIAA1324L
  Gene Name: KIAA1324-like
  ENST ID: ENST00000427812
  CDS Start-End: 1-239
aagaaaatcagagtttgcactatgactttagcaacctcagcagtgtgggctcattaatgaatggccccagcttcacctccaaaggaacaaaatacttccatttcttcaatatcagtttatgtgggcatgagaagaaaaagactttcaagaggaagcttgtccaaaataaaaaggagacatgcagggccaaatatcagttgataaggggaagaagatggctctctgtaccaacaatataacagactttacagtaaaagaaatagtggcagggtcagatgattacacaaatttggtaggggcatttgtatgccagtcaacaattattccttctgaaagtaagggtttccgagcagccttatcatcacaatccatcattctggcagatacattcataggagtcacagttgaaaccacattgaaaaatattaatataaaagaagatatgttcccagttccaacaagccaaataccagatgtgcatttcttttataagtcttctacagcaacaacatcttgtattaatggccgatcaactgctgtgaaaatgaggtgtaatcctactaaatc

SEQ ID NO: 145970 - DNA, 3527 bp, Homo sapiens
  Payload ID: 8942
  Gene Symbol: KIAA1324L
  Gene Name: KIAA1324-like
  ENST ID: ENST00000444627
  CDS Start-End: 119-2995
cagcgggtgacggagcggcgagacgagcgcacagcagtcgcggcccgggagccggagctgccgccgcaccccgggaaggctgccttgccgccggcccgccgaccgcggccggacgaagatgctgttccgcgcccgggggccggtacggggcaggggctgggggcggccggcggaggctccccgccgcgggcgctcgccgccctggagccccgcctggatttgctgctgggcgctcgccggctgccaggcggcctgggctggggacctgccctcctcctccagccgcccgcttcctccttgccaggagaaagattatcactttgaatatacggaatgtgatagcagtggctccaggtggagagttgccattccaaattctgcagtggactgctctggcctgcctgacccagtgagaggcaaagaatgcactttctcctgtgcttctggagagtatctagaaatgaagaaccaggtatgcagtaagtgtggtgaaggcacctattccttgggcagtggcatcaaatttgatgaatgggatgaattgccggcaggattttctaacatcgcaacattcatggacactgtggtgggcccttctgacagcaggccagacggctgtaacaactcttcttggatccctcgtggaaactacatagaatctaatcgtgatgactgcacggtgtctttgatctatgctgtgcaccttaagaagtcaggctatgtcttctttgagtaccagtatgtcgacaacaacatcttctttgagttctttattcaaaatgatcagtgccaggagatggacaccaccactgacaagtgggtaaaacttacagacaatggagaatggggctctcattctgtaatgctgaaatcaggcacaaacatactctactggagaactacaggcatccttatgggttctaaggcggtcaagcctgtgctggtaaaaaatatcacaattgaaggggtggcgtacacatcagaatgttttccttgcaagccaggcacattcagcaacaaaccaggttcattcaactgccaggtgtgtcccagaaacacctattctgagaaaggagccaaagaatgtataaggtgtaaagacgactctcaattttcagaggaaggatccagtgagtgtacagagcgccctccctgtaccacaaaagactatttccagatccatactccatgtgatgaagaaggaaagacacagataatgtacaagtggatagagcccaaaatctgccgggaggatctcacagatgctattagattgcccccttctggagagaagaaggattgtccgccttgcaaccctggattttataacaatggatcatcttcttgccatccctgtcctcctggaacattttcagatggaaccaaagaatgtagaccatgtccagcaggaacggagcctgcacttggctttgaatataaatggtggaatgtccttcctggcaacatgaaaacttcctgcttcaatgttgggaattcaaagtgcgatggaatgaatggttgggaggtggctggagatcatatccagagtggggctggaggttctgacaatgattacctgatcttaaacttgcatatcccaggatttaaaccaccaacatctatgactggagccacgggttctgaactaggaagaataacatttgtctttgagaccctctgttcagctgactgtgttttgtacttcatggtggatattaatagaaaaagtacaaatgtggtagaatcgtggggtggaaccaaagaaaaacaagcttacacccatatcatcttcaagaatgcaacttttacatttacatgggcattccagagaactaatcagggtcaagatgccactacattgagaaagaaaccaaccagtgcaaggaatgtccacctgacacctacctgtccatacatcaggtctatggcaaagaggcttgtattccatgcgggcctgggagtaaaaacaatcagcaacctcagcagtgtgggctcattaatgaatggccccagcttcacctccaaaggaacaaaatacttccatttcttcaatatcagtttatgtgggcatgaggggaagaagatggctctctgtaccaacaatataacagactttacagtaaaagaaatagtggcagggtcagatgattacacaaatttggtaggggcatttgtatgccagtcaacaattattccttctgaaagtaagggtttccgagcagccttatcatcacaatccatcattctggcagatacattcataggagtcacagttgaaaccacattgaaaaatattaatataaaagaagatatgttcccagttccaacaagccaaataccagatgtgcatttcttttataagtcttctacagcaacaacatcttgtattaatggccgatcaactgctgtgaaaatgaggtgtaatcctactaaatctggagcaggagtgatttcagtccccagcaagtgcccagcaggtacctgtgatgggtgtacgttctatttcctgtgggagagtgctgaagcttgccctctgtgtacggagcatgacttccatgagattgagggagcctgcaagagaggatttcaggaaaccttgtatgtgtggaatgaacctaaatggtgcattaaaggaatttctttgcctgagaaaaagttggcaacctgtgaaacggttgacttttggctgaaggtgggagccggtgtgggagcttttactgccgttttgctggtggctctgacctgctacttctggaaaaagaatcaaaaactggaatacaaatattccaagttagtaatgacgactaactcaaaagagtgtgaactcccggctgcagacagttgtgctatcatggaaggagaagataatgaagaggaagttgtatattccaataaacagtcactactaggaaaactcaaatctttggcaaccaaggaaaaagaagaccattttgaatctgttcaactgaaaacctcaagatccccaaatatatgaagagacagtgctgtagccttgagactaatgaacaaagaaacctgctctagttttacaggaccatattttagggtctgtcctcatacctgtcacattggtgatctcacagaggagggccatgccgctgaaaagggaaggagattgaaacatttgattgccttatcacatggtcaagtaccttgccaaataaaggaaagcaaatgatttgggtctcaactgaagatgaagctcaactcaggaagagatttatctgtatatacacataactgaaaaccaagtttaagcccaccaatgcactgctgatgcatgccatataattaatgggtaacttttattctttatgatgtctacataacaagtgtgatttggaaggcacatgtgagcatatgcattatgatccaatttatgttttttctttgtttatattttggggaaaattaaaatttttttaaggtatatttttcccattatttattttcctgaccttaaaacagcttttctactaaaaaatggtgagcaatgaagacaataa

SEQ ID NO: 145971 - DNA, 3179 bp, Homo sapiens
  Payload ID: 8942
  Gene Symbol: KIAA1324L
  Gene Name: KIAA1324-like
  Uniprot ID: A8MWY0
  ENST ID: ENST00000416314
  CDS Start-End: 197-2785
tcattgacacagtgagggaggcaaaacagtgtggatgcagcagaataaccacaaccaggattttgaactgaataagtaagaaagattatcactttgaatatacggaatgtgatagcagtggctccaggtggagagttgccattccaaattctgcagtggactgctctggcctgcctgacccagtgagaggcaaagaatgcactcttcttggatccctcgtggaaactacatagaatctaatcgtgatgactgcacggtgtctttgatctatgctgtgcaccttaagaagtcaggctatgtcttctttgagtaccagtatgtcgacaacaacatcttctttgagttctttattcaaaatgatcagtgccaggagatggacaccaccactgacaagtgggtaaaacttacagacaatggagaatggggctctcattctgtaatgctgaaatcaggcacaaacatactctactggagaactacaggcatccttatgggttctaaggcggtcaagcctgtgctggtaaaaaatatcacaattgaaggggtggcgtacacatcagaatgttttccttgcaagccaggcacattcagcaacaaaccaggttcattcaactgccaggtgtgtcccagaaacacctattctgagaaaggagccaaagaatgtataaggtgtaaagacgactctcaattttcagaggaaggatccagtgagtgtacagagcgccctccctgtaccacaaaagactatttccagatccatactccatgtgatgaagaaggaaagacacagataatgtacaagtggatagagcccaaaatctgccgggaggatctcacagatgctattagattgcccccttctggagagaagaaggattgtccgccttgcaaccctggattttataacaatggatcatcttcttgccatccctgtcctcctggaacattttcagatggaaccaaagaatgtagaccatgtccagcaggaacggagcctgcacttggctttgaatataaatggtggaatgtccttcctggcaacatgaaaacttcctgcttcaatgttgggaattcaaagtgcgatggaatgaatggttgggaggtggctggagatcatatccagagtggggctggaggttctgacaatgattacctgatcttaaacttgcatatcccaggatttaaaccaccaacatctatgactggagccacgggttctgaactaggaagaataacatttgtctttgagaccctctgttcagctgactgtgttttgtacttcatggtggatattaatagaaaaagtacaaatgtggtagaatcgtggggtggaaccaaagaaaaacaagcttacacccatatcatcttcaagaatgcaacttttacatttacatgggcattccagagaactaatcagggtcaagataatagacggttcatcaatgacatggtgaagatttattctatcacagccactaatgcagttgatggggtggcgtcctcatgccgtgcctgtgccctcggttctgaacagtcgggttcatcgtgtgtcccctgccctccaggccactacattgagaaagaaaccaaccagtgcaaggaatgtccacctgacacctacctgtccatacatcaggtctatggcaaagaggcttgtattccatgcgggcctgggagtaaaaacaatcaggaccattcggtttgctatagtgactgctttttctaccatgaaaaagaaaatcagagtttgcactatgactttagcaacctcagcagtgtgggctcattaatgaatggccccagcttcacctccaaaggaacaaaatacttccatttcttcaatatcagtttatgtgggcatgaggggaagaagatggctctctgtaccaacaatataacagactttacagtaaaagaaatagtggcagggtcagatgattacacaaatttggtaggggcatttgtatgccagtcaacaattattccttctgaaagtaagggtttccgagcagccttatcatcacaatccatcattctggcagatacattcataggagtcacagttgaaaccacattgaaaaatattaatataaaagaagatatgttcccagttccaacaagccaaataccagatgtgcatttcttttataagtcttctacagcaacaacatcttgtattaatggccgatcaactgctgtgaaaatgaggtgtaatcctactaaatctggagcaggagtgatttcagtccccagcaagtgcccagcaggtacctgtgatgggtgtacgttctatttcctgtgggagagtgctgaagcttgccctctgtgtacggagcatgacttccatgagattgagggagcctgcaagagaggatttcaggaaaccttgtatgtgtggaatgaacctaaatggtgcattaaaggaatttctttgcctgagaaaaagttggcaacctgtgaaacggttgacttttggctgaaggtgggagccggtgtgggagcttttactgccgttttgctggtggctctgacctgctacttctggaaaaagaatcaaaaactggaatacaaatattccaagttagtaatgacgactaactcaaaagagtgtgaactcccggctgcagacagttgtgctatcatggaaggagaagataatgaagaggaagttgtatattccaataaacagtcactactaggaaaactcaaatctttggcaaccaaggaaaaagaagaccattttgaatctgttcaactgaaaacctcaagatccccaaatatatgaagagacagtgctgtagccttgagactaatgaacaaagaaacctgctctagttttacaggaccatattttagggtctgtcctcatacctgtcacattggtgatctcacagaggagggccatgccgctgaaaagggaaggagattgaaacatttgattgccttatcacatggtcaagtaccttgccaaataaaggaaagcaaatgatttgggtctcaactgaagatgaagctcaactcaggaagagatttatctgtatatacacataactgaaaaccaagtttaagcccaccaatgcactgctgatgcatgccatataattaatgggtaacttttattctttatgatgtctacataacaagtgtgatttggaaggcacatgtgagcatatgcatta

SEQ ID NO: 145972 - DNA, 2911 bp, Homo sapiens
  Payload ID: 8942
  Gene Symbol: KIAA1324L
  Gene Name: KIAA1324-like
  ENST ID: ENST00000423294
  CDS Start-End: 1-2911
agatgctgttccgcgcccgggggccggtacggggcaggggctgggggcggccggcggaggctccccgccgcgggcgctcgccgccctggagccccgcctggatttgctgctgggcgctcgccggctgccaggcggcctgggctggggacctgccctcctcctccagccgcccgcttcctccttgccaggagctttctcctgtgcttctggagagtatctagaaatgaagaaccaggtatgcagtaagtgtggtgaaggcacctattccttgggcagtggcatcaaatttgatgaatgggatgaattgccggcaggattttctaacatcgcaacattcatggacactgtggtgggcccttctgacagcaggccagacggctgtaacaactcttcttggatccctcgtggaaactacatagaatctaatcgtgatgactgcacggtgtctttgatctatgctgtgcaccttaagaagtcaggctatgtcttctttgagtaccagtatgtcgacaacaacatcttctttgagttctttattcaaaatgatcagtgccaggagatggacaccaccactgacaagtgggtaaaacttacagacaatggagaatggggctctcattctgtaatgctgaaatcaggcacaaacatactctactggagaactacaggcatccttatgggttctaaggcggtcaagcctgtgctggtaaaaaatatcacaattgaaggggtggcgtacacatcagaatgttttccttgcaagccaggcacattcagcaacaaaccaggttcattcaactgccaggtgtgtcccagaaacacctattctgagaaaggagccaaagaatgtataaggtgtaaagacgactctcaattttcagaggaaggatccagtgagtgtacagagcgccctccctgtaccacaaaagactatttccagatccatactccatgtgatgaagaaggaaagacacagataatgtacaagtggatagagcccaaaatctgccgggaggatctcacagatgctattagattgcccccttctggagagaagaaggattgtccgccttgcaaccctggattttataacaatggatcatcttcttgccatccctgtcctcctggaacattttcagatggaaccaaagaatgtagaccatgtccagcaggaacggagcctgcacttggctttgaatataaatggtggaatgtccttcctggcaacatgaaaacttcctgcttcaatgttgggaattcaaagtgcgatggaatgaatggttgggaggtggctggagatcatatccagagtggggctggaggttctgacaatgattacctgatcttaaacttgcatatcccaggatttaaaccaccaacatctatgactggagccacgggttctgaactaggaagaataacatttgtctttgagaccctctgttcagctgactgtgttttgtacttcatggtggatattaatagaaaaagtacaaatgtggtagaatcgtggggtggaaccaaagaaaaacaagcttacacccatatcatcttcaagaatgcaacttttacatttacatgggcattccagagaactaatcagggtcaagataatagacggttcatcaatgacatggtgaagatttattctatcacagccactaatgcagttgatggggtggcgtcctcatgccgtgcctgtgccctcggttctgaacagtcgggttcatcgtgtgtcccctgccctccaggccactacattgagaaagaaaccaaccagtgcaaggaatgtccacctgacacctacctgtccatacatcaggtctatggcaaagaggcttgtattccatgcgggcctgggagtaaaaacaatcaggaccattcggtttgctatagtgactgctttttctaccatgaaaaagaaaatcagagtttgcactatgactttagcaacctcagcagtgtgggctcattaatgaatggccccagcttcacctccaaaggaacaaaatacttccatttcttcaatatcagtttatgtgggcatgaggggaagaagatggctctctgtaccaacaatataacagactttacagtaaaagaaatagtggcagggtcagatgattacacaaatttggtaggggcatttgtatgccagtcaacaattattccttctgaaagtaagggtttccgagcagccttatcatcacaatccatcattctggcagatacattcataggagtcacagttgaaaccacattgaaaaatattaatataaaagaagatatgttcccagttccaacaagccaaataccagatgtgcatttcttttataagtcttctacagcaacaacatcttgtattaatggccgatcaactgctgtgaaaatgaggtgtaatcctactaaatctggagcaggagtgatttcagtccccagcaagtgcccagcaggtacctgtgatgggtgtacgttctatttcctgtgggagagtgctgaagcttgccctctgtgtacggagcatgacttccatgagattgagggagcctgcaagagaggatttcaggaaaccttgtatgtgtggaatgaacctaaatggtgcattaaaggaatttctttgcctgagaaaaagttggcaacctgtgaaacggttgacttttggctgaaggtgggagccggtgtgggagcttttactgccgttttgctggtggctctgacctgctacttctggaaaaagaatcaaaaactggaatacaaatattccaagttagtaatgacgactaactcaaaagagtgtgaactcccggctgcagacagttgtgctatcatggaaggagaagataatgaagaggaagttgtatattccaataaacagtcactactaggaaaactcaaatctttggcaaccaag

SEQ ID NO: 145973 - DNA, 576 bp, Homo sapiens
  Payload ID: 8942
  Gene Symbol: KIAA1324L
  Gene Name: KIAA1324-like
  ENST ID: ENST00000425689
  CDS Start-End: 316-576
gtgctatgcagagaaggtcaaagacaatggccttctcattcctgatgtccgcatggtgatgtggcttgatgtttctattctcacttgtcattgacacagtgagggaggcaaaacagtgtggatgcagcagaataaccacaaccaggattttgaactgaataaaaagattatcactttgaatatacggaatgtgatagcagtggctccaggtggagagttgccattccaaattctgcagtggactgctctggcctgcctgacccagtgagaggcaaagaatgcactttctcctgtgcttctggagagtatctagaaatgaagaaccaggtatgcagtaagtgtggtgaaggcacctattccttgggcagtggcatcaaatttgatgaatgggatgaattgccggcaggattttctaacatcgcaacattcatggacactgtggtgggcccttctgacagcaggccagacggctgtaacaactcttcttggatccctcgtggaaactacatagaatctaatcgtgatgactgcacggtgtctttgatctatgctgtgcaccttaagaagtcaggctat

SEQ ID NO: 145974 - DNA, 6841 bp, Homo sapiens
  Payload ID: 8942
  Gene Symbol: KIAA1324L
  Gene Name: KIAA1324-like
  Uniprot ID: A8MWY0
  ENST ID: ENST00000450689
  CDS Start-End: 187-3276
cgtgacgggagcatcggcgctggctgcccgggccgcgagcgcagcagagctgtcagcgggcggacgggcagcgggtgacggagcggcgagacgagcgcacagcagtcgcggcccgggagccggagctgccgccgcaccccgggaaggctgccttgccgccggcccgccgaccgcggccggacgaagatgctgttccgcgcccgggggccggtacggggcaggggctgggggcggccggcggaggctccccgccgcgggcgctcgccgccctggagccccgcctggatttgctgctgggcgctcgccggctgccaggcggcctgggctggggacctgccctcctcctccagccgcccgcttcctccttgccaggagaaagattatcactttgaatatacggaatgtgatagcagtggctccaggtggagagttgccattccaaattctgcagtggactgctctggcctgcctgacccagtgagaggcaaagaatgcactttctcctgtgcttctggagagtatctagaaatgaagaaccaggtatgcagtaagtgtggtgaaggcacctattccttgggcagtggcatcaaatttgatgaatgggatgaattgccggcaggattttctaacatcgcaacattcatggacactgtggtgggcccttctgacagcaggccagacggctgtaacaactcttcttggatccctcgtggaaactacatagaatctaatcgtgatgactgcacggtgtctttgatctatgctgtgcaccttaagaagtcaggctatgtcttctttgagtaccagtatgtcgacaacaacatcttctttgagttctttattcaaaatgatcagtgccaggagatggacaccaccactgacaagtgggtaaaacttacagacaatggagaatggggctctcattctgtaatgctgaaatcaggcacaaacatactctactggagaactacaggcatccttatgggttctaaggcggtcaagcctgtgctggtaaaaaatatcacaattgaaggggtggcgtacacatcagaatgttttccttgcaagccaggcacattcagcaacaaaccaggttcattcaactgccaggtgtgtcccagaaacacctattctgagaaaggagccaaagaatgtataaggtgtaaagacgactctcaattttcagaggaaggatccagtgagtgtacagagcgccctccctgtaccacaaaagactatttccagatccatactccatgtgatgaagaaggaaagacacagataatgtacaagtggatagagcccaaaatctgccgggaggatctcacagatgctattagattgcccccttctggagagaagaaggattgtccgccttgcaaccctggattttataacaatggatcatcttcttgccatccctgtcctcctggaacattttcagatggaaccaaagaatgtagaccatgtccagcaggaacggagcctgcacttggctttgaatataaatggtggaatgtccttcctggcaacatgaaaacttcctgcttcaatgttgggaattcaaagtgcgatggaatgaatggttgggaggtggctggagatcatatccagagtggggctggaggttctgacaatgattacctgatcttaaacttgcatatcccaggatttaaaccaccaacatctatgactggagccacgggttctgaactaggaagaataacatttgtctttgagaccctctgttcagctgactgtgttttgtacttcatggtggatattaatagaaaaagtacaaatgtggtagaatcgtggggtggaaccaaagaaaaacaagcttacacccatatcatcttcaagaatgcaacttttacatttacatgggcattccagagaactaatcagggtcaagataatagacggttcatcaatgacatggtgaagatttattctatcacagccactaatgcagttgatggggtggcgtcctcatgccgtgcctgtgccctcggttctgaacagtcgggttcatcgtgtgtcccctgccctccaggccactacattgagaaagaaaccaaccagtgcaaggaatgtccacctgacacctacctgtccatacatcaggtctatggcaaagaggcttgtattccatgcgggcctgggagtaaaaacaatcaggaccattcggtttgctatagtgactgctttttctaccatgaaaaagaaaatcagagtttgcactatgactttagcaacctcagcagtgtgggctcattaatgaatggccccagcttcacctccaaaggaacaaaatacttccatttcttcaatatcagtttatgtgggcatgaggggaagaagatggctctctgtaccaacaatataacagactttacagtaaaagaaatagtggcagggtcagatgattacacaaatttggtaggggcatttgtatgccagtcaacaattattccttctgaaagtaagggtttccgagcagccttatcatcacaatccatcattctggcagatacattcataggagtcacagttgaaaccacattgaaaaatattaatataaaagaagatatgttcccagttccaacaagccaaataccagatgtgcatttcttttataagtcttctacagcaacaacatcttgtattaatggccgatcaactgctgtgaaaatgaggtgtaatcctactaaatctggagcaggagtgatttcagtccccagcaagtgcccagcaggtacctgtgatgggtgtacgttctatttcctgtgggagagtgctgaagcttgccctctgtgtacggagcatgacttccatgagattgagggagcctgcaagagaggatttcaggaaaccttgtatgtgtggaatgaacctaaatggtgcattaaaggaatttctttgcctgagaaaaagttggcaacctgtgaaacggttgacttttggctgaaggtgggagccggtgtgggagcttttactgccgttttgctggtggctctgacctgctacttctggaaaaagaatcaaaaactggaatacaaatattccaagttagtaatgacgactaactcaaaagagtgtgaactcccggctgcagacagttgtgctatcatggaaggagaagataatgaagaggaagttgtatattccaataaacagtcactactaggaaaactcaaatctttggcaaccaaggaaaaagaagaccattttgaatctgttcaactgaaaacctcaagatccccaaatatatgaagagacagtgctgtagccttgagactaatgaacaaagaaacctgctctagttttacaggaccatattttagggtctgtcctcatacctgtcacattggtgatctcacagaggagggccatgccgctgaaaagggaaggagattgaaacatttgattgccttatcacatggtcaagtaccttgccaaataaaggaaagcaaatgatttgggtctcaactgaagatgaagctcaactcaggaagagatttatctgtatatacacataactgaaaaccaagtttaagcccaccaatgcactgctgatgcatgccatataattaatgggtaacttttattctttatgatgtctacataacaagtgtgatttggaaggcacatgtgagcatatgcattatgatccaatttatgttttttctttgtttatattttggggaaaattaaaatttttttaaggtatatttttcccattatttattttcctgaccttaaaacagcttttctactaaaaaatggtgagcaatgaagacaataaatttttcatttttccataggttatcttctcttgatttaaatttcaggaagagttagcatgtgcttgggttatctagatttataattgcctttgaaattccatcctcgttggagctggtaagaagggcttgactgaaagtttgaaggaatctaaaaaacaaaaaagtaagaaaggtaacgagaagccctaattctccattaatgcaaactagctgctagtatcatagaagtcaaatgacttaaaacagtttatgtagtgctagaagtataattaaagtaaataggaaagcttgtcaatcaaatcactggcaaaatcatgaagaagagagtgagaaggtttgtctataagtacagatgactgtatgaaatactggggtaatttcatggtctccagaaaatgtcagtgggacttttgttctttgtcaagcaccagaggttatatggttatttttctgctgcaagactttgaggatgttgactttctcagaaactttttaaaaaaataatccaataaggcaggaattcagttttgaaaaattacatataattgtattcataataagaatgtggttatttcataagcagttatgaaagaattattgttcttattcaaaagtgatccagataattgtgatattttctatggtgggctactggtattagcacgacttggatattatttgttgaaggaagtatgaatgaagttggatttgaccaatttcgtgtaaaccttaattgatttaaaactgggaaagaggggggtttcctggccattgctgatctaaggtgctcttatttgtttccaataaacagtaatctttatagaccttaatgcagatttaaaaaaatagttgtgattggctgagagaggcagggcatatatgtagggaaatgatttgccccaagcattccaatgaagtatgacttgtaacttttgtgtctgaaggtggtgtctttatttttgtggaaaatgggagaaaaatgaataattgtgtttatttggctgattggtaatacactagaccattctgttattattgaatgaatgttttgtgtatatctctgctgttgcacatatgagtataggtgaggttgtcattgtttgctctgggattcagggagggagtcactttgcataaacctttttttgcatttaatttcttgaatgttcttataaagaagacattatgttggcattcttcatttttatcctgccaacagagtgcttatgagcatgtctgcattttgatcaaaatttaaacagaagagtgaaaatacatttgaaatgaaccctttcagaggaaccctggcaaagctgtatagactggacagagtgagaaaacttccacagccacctgtcacctttctcctcatcttccactgtgttcaatatgtatgttccaagccatagagataattgggattttctcccaggtagcttctttcttctcctgtcactggactaaaatctctgacatgtcaaaaatgccttaaattttaatgaactctccgaaaatgtagttgatattggagaatttattttatttctaattttagatattaaatatattttgtcagcacagtcccatctttgggaaggaggtgattttttcccttggattccagtggtttgtcattttatttcaagcactgaagaagtatgacagaaagaatattatggggaaaatatttagaccaatcctggctataaaatttcctttagttttatgcctggcctttgcaaagctcagtgaaatgttgaaaggaataaattaatcatgtttctgtgacttttgattgacacttgttccttttcccccctaagtggtagaagaagttatttgttatttttctaaaaggcacaattttgaagccttaactacttcattaagtcaactgttgcctataacatctcttagcactcgtcaaaacgtatttaaatcaattttccaatggatgagaacatgtcttctgtggataaattatattatgtcatttaacaacattgagcattttgatatgtgttcactgaattaaaaaacctgaatttcattattgttgacttttcccctctttagttactagtaatcacatcctttctaggattaaaaatatttcatagtatttttgtgtagatgtctgtccttattttcttcccaaagaaaaaaggttgtttaaattgattatgtggaagaattacttgggtccagtctttagcatctggggtctccaggtccccaggtgggtcatgattgactgcttcttcaagacccatcttgccaactctcacttgatgtctgtcaatagaactacttcctgtggcacatggttatttctaatgggaggctaatgtgtacataatttctctcttcctcatagaaataaatttctctgggggttgctgtgagaggatgacttcattagccatgtttaaagtgagtgtactgctcacgtttatctttgtacactaagagtatgtagagttgatcttcagagaaactaaacctccctcatatctatttatagtaatcatgaatatgattgcagttgacaggcccaactcctaaactgagtttgcccaaagaaaatgtccttagaggagtaaacttttagaaatctcaacacccgactcattcgttggaagctaaaatggaattcatcttcatactaactggctacagattattctcttgctggattttacttttattttaacatttttacatgagttccttttagaatcataaatgaaagaagtaaaactttaagatgggaatgaataattgaaaagagaattatatttactattataattgatattattcgctattatgattacacttgtctagatcagagcccagcaaacattttttttgtaaagggtcagatagtacatagttttggctttgcagggcatgtgggctctattgcatttactcaactctgccattgtagtatgaaagcaaccacatacaaaatgtaaatggatgggcgtggctgcattccaataaaactttatttatggacactgaaa

SEQ ID NO: 145975 - DNA, 4853 bp, Homo sapiens
  Payload ID: 8943
  Gene Symbol: KIAA1328
  Gene Name: KIAA1328
  Uniprot ID: Q86T90
  ENST ID: ENST00000280020
  CDS Start-End: 23-1756
cccgagtggcggttgtttcaagatggcggacgtggcgggcccctcccgccccagtgccgcggcgttctggagccgggacttttctgatgaagaacaatcagtagtatacgttccaggaatttctgctgaaggaaatgtcagatcaagacacaagctgatgagtccaaaagctgatgttaaacttaagacttccagggtgactgatgcttcaatctccatggagtccttaaaaggcacaggagattcagtagatgaacagaattcctgcaggggagaaataaagagtgcatcattgaaggatttatgtcttgaagacaaaagacgcattgcaaacttaattaaagaactggccagagtaagtgaggaaaaggaagtgacagaggaaagactgaaagctgagcaggagtcatttgagaagaagatcaggcagttggaagaacagaatgaactgatcatcaaagaaagggaagctcttcagctacagtatagagaatgccaagaacttctaagcctgtatcagaaatatttatcagaacaacaggagaagctcaccatgtctctctcagaacttggtgctgctagaatgcaggaacagcaggtatccagtagaaaaagcactctccagtgttcatctgtggaactggatggttcctacttgagcatagccagaccacagacctactatcaaaccaagcaaagacctaagtctgcagtccaggattcagcttcagaatcccttatagcatttaggaataattctttgaaaccagtaacccttcatcatcccaaagatgatctagataagataccatcagagaccacaacatgtaattgtgaatctccagggagaaaacctgcagtcccaacagagaaaatgccacaagaagaattgcacatgaaggaatgtccacatcttaagcctactcctagtcaatgctgtggtcatagacttgctgcagatcgtgttcatgacagccatcctacaaacatgacccctcaacatcctaagacacatccagaatcatgcagttattgtcggctttcttgggcatctctggtgcatggtggtggggcactgcaacccattgaaactttgaaaaagcagatctcagaagatagaaagcagcaactgatgcttcagaaaatggaactggaaattgaaaaggagcgccttcagcatctgctggcccagcaggagacaaagcttcttctaaaacagcagcagcttcaccagtctcgactggattacaattgtttattgaagtcaaactgtgatggctggctgcttggaacatcatcatctattaaaaagcaccaagaccccccaaacagtggagagaataggaaggagaggaagacagttgggtttcattcgcatatgaaagatgatgcccagtggtcatgtcaaaagaaagatacatgtagaccccaaagagggacagtgacaggagttagaaaagatgcgtctacatctcctatgccaacaggaagcctaaaggattttgtcaccacagcctcaccatcattacagcacaccacctcccggtatgagacatctttgttggatttggttcagtctctgagcccaaactctgcgcccaaacctcagcgctatccctccagagaagctggggcctggaatcatggtactttccgactcagtcctctaaaatcaacccggaagaagatggggatgcacagaacccctgaagagttggaggagaatcagattctggaagatatatttttcatttgacatattgcaaaattttcttaggaaatttgtgggtttcctcacatactgatctaggattttaaattatttcattgcaaagtaattgtgtctctcctttcacggggacttgtctcactagcatcctgttacgtattgaatatagaaatcattctaacaacccaggttattttcaatcagaccaggcattcgataacacactaagggggtaggaatggaagatggtatcttttatatgctaaacagattagaaaattaacataggatactttctgcgtggtggaaaccattgcatattcagcctcatttcaagagtgtttccttctcaaacttctgctagaaaatgctgactcacttttatatacaagaaaaacctttccactgaaaaatccctctgatttaaaagtaacccctttgaaacataagcagtttcagaaaggcagactctctcatctttctcatcctgttctctcactactacatttctgtaagtggtcctttaattctgaagttggagttggtgcccctgccatcacaaacaacacgagagccaattgtgagtcagtctcagtagccatcagcctggcagctgcccatcccataaccaaagagctcaatgggctggagggtgagacccagccaatccttgggagcaagcagcactaaatcacatcagggagtgattagtcctggggaaattcagtggaggcacaagcctgaagcactcttctaccaatgtttgggtgaccacccctccaatatcccagaatgaataagaacaatccctaggtatttttatttacccaagtgttcagcttattcaccccacccccccaccccccatcacacgtgctcctgtgaactttccatggttatgtctacggaaaatgccactagagagagagtgatgcaagctgctgcaaagctgatgggcttcctctggccctcccttttcctccacgaggattaaaggatacaagctgaccaggcctcacaggtgctctgctcgtggccccaaagaaccatctctacttgccagagtatgttccaccacccaagcagggtctccctactttttctcactggcctcgttttgacccagagaaagcctatggaagttatgcagtgcagacctcatcctgtctgctgtcttttctcccacagagctcttgagatgggtccttcagcttgcagtggtccctagtagcctctcaagctaatggggatgatgatcctggtttagccagagttcaaaactctccagtcattgaaagcaaggggagggtgtgttcccagatgtgtattacttgggaattttatttgatctggagggtgtggctttttttctctcctttttaccaaccccaactaaactgggagtaagacttagtcagtgttggtagacaaagtcataccacccagggcagcctgcatgcagcgagtctgcgtggcttccctgaattactcttttaattaaaactagattatttcaatctagaaaagccttgttgagcagcctccttatccagatagatccaaagctcatgtctcttcaggctgagactggcgctgtcacctccacccagccttctttcacttggggttttttattctttggagtagaaaagaatggagcccactaatattatatttttcttctgaaataaatataaagtcaagactaactagttataatcattcccttaaaaagttggaaaatcattacagattaaaatttctttataaagttcacctctgagagtaaccaaatcggtttcatcccatatcaaaaagcctttggagtgtggagctttctgtggtatggcagaaatgggtggatggcaaactaagagccctcagccattttttcagttaaagttaggttgccagaactttcttttccttgccccctgtgtcatgactagcttaagtgtacttgactcccatagactactcccatgcccacagtcacccattccagactccagtgtccttaaaactctggagtgagaggatgccagaggatcaagaaaaggatcacagtttcttgaagaagcttgtttgcctttagaagaatcgtaaacagagtctaaactaaaggctttttgggggtcacagccacagagtggagttttattgcttctttgcctctccatgaatggccaatttggaaaagcagagatgggctttcagcagaatatcaaccaatacatttttcacatgcaaaactcatcaccagttgcctttttctaacttaatggacattttgttggtgttggtgcaagggcaataggatgtaaatttgtatataatctaatgtcttcattattaattgaatagtacatgttaacattttaatctatttaaatttactttgaaatatatacatacatatgaatgaaaggttgttacagagcctcaaagctgttgcagactatcccaagagaaaggatctggcacaaaggaatctgcctttcctccgtctcaagtctcccacccttgactggttgggatttgctcgtccagcctctagacacttcccaaagcaagactggacacatgccgagggcgttgcggatagtgcctcaccattgcccaccctgctgcccaactcctgtgagagaaaaaccaatcaatgtttacaaaatggaaaaggacacagcatgtcctttgaactccctaagtaaggcccacagttcttgatgcagagaaccaaagtgaatcatagaaaagcttttgctaacagtccgctttccaggaggcaaacttgtgtttatccaaacctgatccccatgatggggacttttctagagcaccccaaatgtcatggggagagagggactctttctgctccctcagagctactcttcacttgtccctgcttccggcaccaagttcataatagagatcttctggccagagaatcaggggagaggagaggcctgatggggcagagctggacgaagtctgctaagagagatggaggctgtggcggactccttccaactcacgatttatcctcagctcagagtgtattttgaatatgagcaaatgtttatgtacgtatgagatttcaagttaataaatcatctctatggct

SEQ ID NO: 145976 - DNA, 1190 bp, Homo sapiens
  Payload ID: 8943
  Gene Symbol: KIAA1328
  Gene Name: KIAA1328
  ENST ID: ENST00000592521
  CDS Start-End: 11-502
ttgtttcaagatggcggacgtggcgggcccctcccgccccagtgccgcggcgttctggagccgggacttttctgatgaagaacaatcagtagtatacgttccaggaatttctgctgaaggaaatgtcagatcaagacacaagctgatgagtccaaaagctgatgttaaacttaagacttccagggtgactgatgcttcaatctccatggagtccttaaaaggcacaggagattcagtagatgaacagaattcctgcaggggagaaataaagagtgcatcattgaaggatttatgtcttgaagacaaaagacgcattgcaaacttaattaaagaactggccagagtaagtgaggaaaaggaagtgacagaggaaagactgaaagctgagcaggagtcatttgagaagaagatcaggcagttggaagaacagaatgaactgatcatcaaagaaagggaagatatccttttgaaagttctcttttttaacgttcaagaagtttgactatttctttttttttttgagacgaaatctcgctcttgtcgcctaggctgcagtgcaatggtgcgatttcagttcaccgcaacctccacctcccggttcaagcgattctcctacctcagcctcccgagtagctgggattacaggcacccaccaccaggcccagctaattttcgtatttttagtagagacggggtttcaccttgttggccaggctggtcttgaactcctgacctcaggtgatctgcctgccttggcctcccaaagtgctaggattacaggtgtgagccaccgtgcctggccagaagtttgactatttcatgaagacaatgtaaactccagagaaataattgttctaatttgtaacagggagtaaatctgcatgtgctgccatttctaggcaatcagaacgtcacttaacaatatgtgctatagcttcctttgtgcctgataaggccatccagctgttctgctgctgctgttaggctgctaagcacatacttgtcaactaaaaaggacaagaagaaatttgggcattgaagtgtagtgttggaactttattaaattctgttgcactgctgtaattgagctggaacctccttgtatttggtattctttctagttaaagctttgacagtcctaggaattctgctctgaaatcataaaaattaaaaaaaaattgtttttactg

SEQ ID NO: 145977 - DNA, 5881 bp, Homo sapiens
  Payload ID: 8943
  Gene Symbol: KIAA1328
  Gene Name: KIAA1328
  Uniprot ID: Q86T90
  ENST ID: ENST00000591619
  CDS Start-End: 787-2508
ttaaatcaataccaattttattctttcatagatggagccagacattcttttatgtttgagggtacaacactgaacaaaataaaacaaaaatcattaccctcttggtgcctacattttagtgagatgagatcaggtcatgaataaggaaaatatatgttcaatgatttttttttttttttttgagtcagagtctcggtctgttgcccaggctggagtgcagtggtgccatctcagctcactgcaagctccgccttctgggttcacaccattctcctgcctcaacctctggagtagctgggactacaggcacccgccaccatgcccggctaattttttttttttacatttttagtagagacagggtttcaccgtgttagccaggatgatctcgattttctgacctcgtgatatgcccacctcggcctcccaaagtgctgggattacagacgtgagccactgcacctggcctatgttcaatgatattggtgctgtggagaaaaaataaagcaggaaagaggcagatagtagcgggaggtaggtaggttgtgggaagagagagttttgcaatttcaagtacctatatggttaggaagtgaaagcttcaatcagaaggtgacatgacatgacatatgacataagtcctaaagtgagccatgaagatatttgaggaaagagcttcctgggtagaagaaatcatacctgcagaagctataagttagttacaaattcccaggtcaaaagaaattatgaattataagaggtatacagaacagaagcagcatttggatgccggataatattattgtattttccttcatgttctcctgcgtagtttctgatgaagaacaatcagtagtatacgttccaggaatttctgctgaaggaaatgtcagatcaagacacaagctgatgagtccaaaagctgatgttaaacttaagacttccagggtgactgatgcttcaatctccatggagtccttaaaaggcacaggagattcagtagatgaacagaattcctgcaggggagaaataaagagtgcatcattgaaggatttatgtcttgaagacaaaagacgcattgcaaacttaattaaagaactggccagagtaagtgaggaaaaggaagtgacagaggaaagactgaaagctgagcaggagtcatttgagaagaagatcaggcagttggaagaacagaatgaactgatcatcaaagaaagggaagctcttcagctacagtatagagaatgccaagaacttctaagcctgtatcagaaatatttatcagaacaacaggagaagctcaccatgtctctctcagaacttggtgctgctagaatgcaggaacagcaggtatccagtagaaaaagcactctccagtgttcatctgtggaactggatggttcctacttgagcatagccagaccacagacctactatcaaaccaagcaaagacctaagtctgcagtccaggattcagcttcagaatcccttatagcatttaggaataattctttgaaaccagtaacccttcatcatcccaaagatgatctagataagataccatcagagaccacaacatgtaattgtgaatctccagggagaaaacctgcagtcccaacagagaaaatgccacaagaagaattgcacatgaaggaatgtccacatcttaagcctactcctagtcaatgctgtggtcatagacttgctgcagatcgtgttcatgacagccatcctacaaacatgacccctcaacatcctaagacacatccagaatcatgcagttattgtcggctttcttgggcatctctggtgcatggtggtggggcactgcaacccattgaaactttgaaaaagcagatctcagaagatagaaagcagcaactgatgcttcagaaaatggaactggaaattgaaaaggagcgccttcagcatctgctggcccagcaggagacaaagcttcttctaaaacagcagcagcttcaccagtctcgactggattacaattgtttattgaagtcaaactgtgatggctggctgcttggaacatcatcatctattaaaaagcaccaagaccccccaaacagtggagagaataggaaggagaggaagacagttgggtttcattcgcatatgaaagatgatgcccagtggtcatgtcaaaagaaagatacatgtagaccccaaagagggacagtgacaggagttagaaaagatgcgtctacatctcctatgccaacaggaagcctaaaggattttgtcaccacagcctcaccatcattacagcacaccacctcccggtatgagacatctttgttggatttggttcagtctctgagcccaaactctgcgcccaaacctcagcgctatccctccagagaagctggggcctggaatcatggtactttccgactcagtcctctaaaatcaacccggaagaagatggggatgcacagaacccctgaagagttggaggagaatcagattctggaagatatatttttcatttgacatattgcaaaattttcttaggaaatttgtgggtttcctcacatactgatctaggattttaaattatttcattgcaaagtaattgtgtctctcctttcacggggacttgtctcactagcatcctgttacgtattgaatatagaaatcattctaacaacccaggttattttcaatcagaccaggcattcgataacacactaagggggtaggaatggaagatggtatcttttatatgctaaacagattagaaaattaacataggatactttctgcgtggtggaaaccattgcatattcagcctcatttcaagagtgtttccttctcaaacttctgctagaaaatgctgactcacttttatatacaagaaaaacctttccactgaaaaatccctctgatttaaaagtaacccctttgaaacataagcagtttcagaaaggcagactctctcatctttctcatcctgttctctcactactacatttctgtaagtggtcctttaattctgaagttggagttggtgcccctgccatcacaaacaacacgagagccaattgtgagtcagtctcagtagccatcagcctggcagctgcccatcccataaccaaagagctcaatgggctggagggtgagacccagccaatccttgggagcaagcagcactaaatcacatcagggagtgattagtcctggggaaattcagtggaggcacaagcctgaagcactcttctaccaatgtttgggtgaccacccctccaatatcccagaatgaataagaacaatccctaggtatttttatttacccaagtgttcagcttattcaccccacccccccaccccccatcacacgtgctcctgtgaactttccatggttatgtctacggaaaatgccactagagagagagtgatgcaagctgctgcaaagctgatgggcttcctctggccctcccttttcctccacgaggattaaaggatacaagctgaccaggcctcacaggtgctctgctcgtggccccaaagaaccatctctacttgccagagtatgttccaccacccaagcagggtctccctactttttctcactggcctcgttttgacccagagaaagcctatggaagttatgcagtgcagacctcatcctgtctgctgtcttttctcccacagagctcttgagatgggtccttcagcttgcagtggtccctagtagcctctcaagctaatggggatgatgatcctggtttagccagagttcaaaactctccagtcattgaaagcaaggggagggtgtgttcccagatgtgtattacttgggaattttatttgatctggagggtgtggctttttttctctcctttttaccaaccccaactaaactgggagtaagacttagtcagtgttggtagacaaagtcataccacccagggcagcctgcatgcagcgagtctgcgtggcttccctgaattactcttttaattaaaactagattatttcaatctagaaaagccttgttgagcagcctccttatccagatagatccaaagctcatgtctcttcaggctgagactggcgctgtcacctccacccagccttctttcacttggggttttttattctttggagtagaaaagaatggagcccactaatattatatttttcttctgaaataaatataaagtcaagactaactagttataatcattcccttaaaaagttggaaaatcattacagattaaaatttctttataaagttcacctctgagagtaaccaaatcggtttcatcccatatcaaaaagcctttggagtgtggagctttctgtggtatggcagaaatgggtggatggcaaactaagagccctcagccattttttcagttaaagttaggttgccagaactttcttttccttgccccctgtgtcatgactagcttaagtgtacttgactcccatagactactcccatgcccacagtcacccattccagactccagtgtccttaaaactctggagtgagaggatgccagaggatcaagaaaaggatcacagtttcttgaagaagcttgtttgcctttagaagaatcgtaaacagagtctaaactaaaggctttttgggggtcacagccacagagtggagttttattgcttctttgcctctccatgaatggccaatttggaaaagcagagatgggctttcagcagaatatcaaccaatacatttttcacatgcaaaactcatcaccagttgcctttttctaacttaatggacattttgttggtgttggtgcaagggcaataggatgtaaatttgtatataatctaatgtcttcattattaattgaatagtacatgttaacattttaatctatttaaatttactttgaaatatatacatacatatgaatgaaaggttgttacagagcctcaaagctgttgcagactatcccaagagaaaggatctggcacaaaggaatctgcctttcctccgtctcaagtctcccacccttgactggttgggatttgctcgtccagcctctagacacttcccaaagcaagactggacacatgccgagggcgttgcggatagtgcctcaccattgcccaccctgctgcccaactcctgtgagagaaaaaccaatcaatgtttacaaaatggaaaaggacacagcatgtcctttgaactccctaagtaaggcccacagttcttgatgcagagaaccaaagtgaatcatagaaaagcttttgctaacagtccgctttccaggaggcaaacttgtgtttatccaaacctgatccccatgatggggacttttctagagcaccccaaatgtcatggggagagagggactctttctgctccctcagagctactcttcacttgtccctgcttccggcaccaagttcataatagagatcttctggccagagaatcaggggagaggagaggcctgatggggcagagctggacgaagtctgctaagagagatggaggctgtggcggactccttccaactcacgatttatcctcagctcagagtgtattttgaatatgagcaaatgtttattcaatcttcaagaagtatcaagtccatccaggcgcggtggcttacacctgtaatcccaggctttgggaggccgaggcagccggatcatgaggtcaggagatcgagaccatcctggctaacacggtgaaaccccatctctgtattttgtatttgtaaaaatacaaaaaattacctgagcgtggtggcacgcacctgtagtcccggctactcaggaggctgaggcaggagaatcacttgaacccgggaggcggaggttgcagtgagccaagatcatgccgctgcactccagcctgggtgacagagcaagactccatctc

SEQ ID NO: 145978 - DNA, 3256 bp, Homo sapiens
  Payload ID: 8943
  Gene Symbol: KIAA1328
  Gene Name: KIAA1328
  ENST ID: ENST00000587139
  CDS Start-End: 1-1805
ggacggcgaggggcgagccgtcgcgtggcagtccgagagcggaggagaagctccgaactaaccccggggatggggacgtgctgctcggccccagtctaggtgctgggctctccccttgcttgggtgttaggtggccgagagactggtactgtctgcaggtgtggggacacggctcagatgcttcccagcgctcactaccgaattcctgcaggggagaaataaagagtgcatcattgaaggatttatgtcttgaagacaaaagacgcattgcaaacttaattaaagaactggccagagtaagtgaggaaaaggaagtgacagaggaaagactgaaagctgagcaggagtcatttgagaagaagatcaggcagttggaagaacagaatgaactgatcatcaaagaaagggaagctcttcagctacagtatagagaatgccaagaacttctaagcctgtatcagaaatatttatcagaacaacaggagaagctcaccatgtctctctcagaacttggtgctgctagaatgcaggaacagcaggtatccagtagaaaaagcactctccagtgttcatctgtggaactggatggttcctacttgagcatagccagaccacagacctactatcaaaccaagcaaagacctaagtctgcagtccaggattcagcttcagaatcccttatagcatttaggaataattctttgaaaccagtaacccttcatcatcccaaagatgatctagataagataccatcagagaccacaacatgtaattgtgaatctccagggagaaaacctgcagtcccaacagagaaaatgccacaagaagaattgcacatgaaggaatgtccacatcttaagcctactcctagtcaatgctgtggtcatagacttgctgcagatcgtgttcatgacagccatcctacaaacatgacccctcaacatcctaagacacatccagaatcatgcagttattgtcggctttcttgggcatctctggtgcatggtggtggggcactgcaacccattgaaactttgaaaaagcagatctcagaagatagaaagcagcaactgatgcttcagaaaatggaactggaaattgaaaaggagcgccttcagcatctgctggcccagcaggagacaaagcttcttctaaaacagcagcagcttcaccagtctcgactggattacaattggttaaaagctcaggctctgtttaagtcgagagaactggttgctgaaaaacagcttactaaaccccaagaactcaaactggatatgaatggcagtgactctggaccaagtttattgaagtcaaactgtgatggctggctgcttggaacatcatcatctattaaaaagcaccaagaccccccaaacagtggagagaataggaaggagaggaagacagttgggtttcattcgcatatgaaagatgatgcccagtggtcatgtcaaaagaaagatacatgtagaccccaaagagggacagtgacaggagttagaaaagatgcgtctacatctcctatgccaacaggaagcctaaaggattttgtcaccacagcctcaccatcattacagcacaccacctcccggtatgagacatctttgttggatttggttcagtctctgagcccaaactctgcgcccaaacctcagcgctatccctccagagaagctggggcctggaatcatggtactttccgactcagtcctctaaaatcaacccggaagaagatggggatgcacagaacccctgaagagttggaggagaatcagattctggaagatatatttttcatttgacatattgcaaaattttcttaggaaatttgtgggtttcctcacatactgatctaggattttaaattatttcattgcaaagtaattgtgtctctcctttcacggggacttgtctcactagcatcctgttacgtattgaatatagaaatcattctaacaacccaggttattttcaatcagaccaggcattcgataacacactaagggggtaggaatggaagatggtatcttttatatgctaaacagattagaaaattaacataggatactttctgcgtggtggaaaccattgcatattcagcctcatttcaagagtgtttccttctcaaacttctgctagaaaatgctgactcacttttatatacaagaaaaacctttccactgaaaaatccctctgatttaaaagtaacccctttgaaacataagcagtttcagaaaggcagactctctcatctttctcatcctgttctctcactactacatttctgtaagtggtcctttaattctgaagttggagttggtgcccctgccatcacaaacaacacgagagccaattgtgagtcagtctcagtagccatcagcctggcagctgcccatcccataaccaaagagctcaatgggctggagggtgagacccagccaatccttgggagcaagcagcactaaatcacatcagggagtgattagtcctggggaaattcagtggaggcacaagcctgaagcactcttctaccaatgtttgggtgaccacccctccaatatcccagaatgaataagaacaatccctaggtatttttatttacccaagtgttcagcttattcaccccacccccccaccccccatcacacgtgctcctgtgaactttccatggttatgtctacggaaaatgccactagagagagagtgatgcaagctgctgcaaagctgatgggcttcctctggccctcccttttcctccacgaggattaaaggatacaagctgaccaggcctcacaggtgctctgctcgtggccccaaagaaccatctctacttgccagagtatgttccaccacccaagcagggtctccctactttttctcactggcctcgttttgacccagagaaagcctatggaagttatgcagtgcagacctcatcctgtctgctgtcttttctcccacagagctcttgagatgggtccttcagcttgcagtggtccctagtagcctctcaagctaatggggatgatgatcctggtttagccagagttcaaaactctccagtcattgaaagcaaggggagggtgtgttcccagatgtgtattacttgggaattttatttgatctggagggtgtggctttttttctctcctttttaccaaccccaactaaactgggagtaagacttagtcagtgttggtagacaaagtcataccacccagggcagcctgcatgcagcgagtctgcgtggctt

SEQ ID NO: 145979 - DNA, 1835 bp, Homo sapiens
  Payload ID: 8943
  Gene Symbol: KIAA1328
  Gene Name: KIAA1328
  ENST ID: ENST00000590617
  CDS Start-End: 9-254
gtttcaagatggcggacgtggcgggcccctcccgccccagtgccgcggcgttctggagccgggacttttctgatgaagaacaatcagtagtatacgttccaggaatttctgctgaaggaaatgtcagatcaagacacaagctgatgagtccaaaagctgatgttaaacttaagacttccagggtgactgatgcttcaatctccatggagtccttaaaaggcacaggagattcagtagatgaacagagtaagtgaggaaaaggaagtgacagaggaaagactgaaagctgagcaggagtcatttgagaagaagatcaggcagttggaagaacagaatgaactgatcatcaaagaaagggaagctcttcagctacagtatagagaatgccaagaacttctaagcctgtatcagaaatatttatcagaacaacaggagaagctcaccatgtctctctcagaacttggtgctgctagaatgcaggaacagcaggtatccagtagaaaaagcactctccagtgttcatctgtggaactggatggttcctacttgagcatagccagaccacagacctactatcaaaccaagcaaagacctaagtctgcagtccaggattcagcttcagaatcccttatagcatttaggaataattctttgaaaccagtaacccttcatcatcccaaagatgatctagataagataccatcagagaccacaacatgtaattgtgaatctccagggagaaaacctgcagtcccaacagagaaaatgccacaagaagaattgcacatgaaggaatgtccacatcttaagcctactcctagtcaatgctgtggtcatagacttgctgcagatcgtgttcatgacagccatcctacaaacatgacccctcaacatcctaagacacatccagaatcatgcagttattgtcggctttcttgggcatctctggtgcatggtggtggggcactgcaacccattgaaactttgaaaaagcagatctcagaagatagaaagcagcaactgatgcttcagaaaatggaactggaaattgaaaaggagcgccttcagcatctgctggcccagcaggagacaaagcttcttctaaaacagcagcagcttcaccagtctcgactggattacaattggttaaaagctcaggctctgtttaagtcgagagaactggttgctgaaaaacagcttactaaaccccaagaactcaaactggatatgaatggcagtgactctggaccaagtttattgaagtcaaactgtgatggctggctgcttggaacatcatcatctattaaaaagcaccaagaccccccaaacagtggagagaataggaaggagaggaagacagttgggtttcattcgcatatgaaagatgatgcccagtggtcatgtcaaaagaaagatacatgtagaccccaaagagggacagtgacaggagttagaaaagatgcgtctacatctcctatgccaacaggaagcctaaaggattttgtcaccacagcctcaccatcattacagcacaccacctcccggtatgagacatctttgttggatttggttcagtctctgagcccaaactctgcgcccaaacctcagcgctatccctccagagaagctggggcctggaatcatggtactttccgactcagtcctctaaaatcaacccggaagaagatggggatgcacagaacccctgaagagttggaggagaatcagattctggaagatatatttttcatttgacatattgcaaaattttcttaggaaatttgtgggtttcctcacatactgatctaggattttaaattatttcattgcaaagt

SEQ ID NO: 145980 - DNA, 1863 bp, Homo sapiens
  Payload ID: 8943
  Gene Symbol: KIAA1328
  Gene Name: KIAA1328
  Uniprot ID: Q86T90
  ENST ID: ENST00000586135
  CDS Start-End: 695-1534
gagatggaagttgcaaaggaagtcatttgggacctttcagaagtgtagtatcctgaaacaccaagcaaattcagaccttcatgctgaggtgaatttgtaaagggtcattgggcgtaccctttgggagaactgatacggccttcagacctttgaccaaaacagataaaataaacacagaaagacataccaagaatgacttaaagggaggaagcaaaggagtccaataatgtattacatttcaacataaaggagaaggatgggcctcctctcactggtgtgaaagagggttcttagagatgattgatacgcataccgtaagtatgttccctggaccagcaacatcagcattactcagaagcttgttagaccctacctcagatctactggatcagaatttgctttccaacaagacccacaggtatccagtagaaaaagcactctccagtgttcatctgtggaactggatggttcctacttgagcatagccagaccacagacctactatcaaaccaagcaaagacctaagtctgcagtccaggattcagcttcagaatcccttatagcatttaggaataattctttgaaaccagtaacccttcatcatcccaaagatgatctagataagataccatcagagaccacaacatgtaattgtgaatctccagggagaaaacctgcagtcccaacagagaaaatgccacaagaagaattgcacatgaaggaatgtccacatcttaagcctactcctagtcaatgctgtggtcatagacttgctgcagatcgtgttcatgacagccatcctacaaacatgacccctcaacatcctaagacacatccagaatcatgcagttattgtcggctttcttgggcatctctggtgcatggtggtggggcactgcaacccattgaaactttgaaaaagcagatctcagaagatagaaagcagcaactgatgcttcagaaaatggaactggaaattgaaaaggagcgccttcagcatctgctggcccagcaggagacaaagcttcttctaaaacagcagcagcttcaccagtctcgactggattacaattggttaaaagctcaggctctgtttaagtcgagagaactggttgctgaaaaacagcttactaaaccccaagaactcaaactggatatgaatggcagtgactctggaccaagtttattgaagtcaaactgtgatggctggctgcttggaacatcatcatctattaaaaagcaccaagaccccccaaacagtggagagaataggaaggagaggaagacagttgggtttcattcgcatatgaaagatgatgcccagtggtcatgtcaaaagaaagatacatgtagaccccaaagagggacagtgacaggagttagaaaagatgcgtctacatctcctatgccaacaggaagcctaaaggattttgtcaccacagcctcaccatcattacagcacaccacctcccgcccaggaatctccacaaagatctgcttcctttcaaatcatttcttcatattgttctcctagacaaaatgctaggctacacggattatggaaggaacctattaaggtatgagacatctttgttggatttggttcagtctctgagcccaaactctgcgcccaaacctcagcgctatccctccagagaagctggggcctggaatcatggtactttccgactcagtcctctaaaatcaacccggaagaagatggggatgcacagaacccctgaagagttggaggagaatcagattctggaagatatatttttcatttgacatattgcaaaattttcttaggaaatttgtgggtttcctcacatactgatctaggattttaaattatttcattgc

SEQ ID NO: 145981 - DNA, 1798 bp, Homo sapiens
  Payload ID: 8943
  Gene Symbol: KIAA1328
  Gene Name: KIAA1328
  ENST ID: ENST00000592611
  CDS Start-End: 34-279
aggcgcgacgccccgagtggcggttgtttcaagatggcggacgtggcgggcccctcccgccccagtgccgcggcgttctggagccgggacttttctgatgaagaacaatcagtagtatacgttccaggaatttctgctgaaggaaatgtcagatcaagacacaagctgatgagtccaaaagctgatgttaaacttaagacttccagggtgactgatgcttcaatctccatggagtccttaaaaggcacaggagattcagtagatgaacagagtaagtgaggaaaaggaagtgacagaggaaagactgaaagctgagcaggagtcatttgagaagaagatcaggcagttggaagaacagaatgaactgatcatcaaagaaagggaagctcttcagctacagtatagagaatgccaagaacttctaagcctgtatcagaaatatttatcagaacaacaggagaagctcaccatgtctctctcagaacttggtgctgctagaatgcaggaacagcaggtatccagtagaaaaagcactctccagtgttcatctgtggaactggatggttcctacttgagcatagccagaccacagacctactatcaaaccaagcaaagacctaagtctgcagtccaggattcagcttcagaatcccttatagcatttaggaataattctttgaaaccagtaacccttcatcatcccaaagatgatctagataagataccatcagagaccacaacatgtaattgtgaatctccagggagaaaacctgcagtcccaacagagaaaatgccacaagaagaattgcacatgaaggaatgtccacatcttaagcctactcctagtcaatgctgtggtcatagacttgctgcagatcgtgttcatgacagccatcctacaaacatgacccctcaacatcctaagacacatccagaatcatgcagttattgtcggctttcttgggcatctctggtgcatggtggtggggcactgcaacccattgaaactttgaaaaagcagatctcagaagatagaaagcagcaactgatgcttcagaaaatggaactggaaattgaaaaggagcgccttcagcatctgctggcccagcaggagacaaagcttcttctaaaacagcagcagcttcaccagtctcgactggattacaattgtttattgaagtcaaactgtgatggctggctgcttggaacatcatcatctattaaaaagcaccaagaccccccaaacagtggagagaataggaaggagaggaagacagttgggtttcattcgcatatgaaagatgatgcccagtggtcatgtcaaaagaaagatacatgtagaccccaaagagggacagtgacaggagttagaaaagatgcgtctacatctcctatgccaacaggaagcctaaaggattttgtcaccacagcctcaccatcattacagcacaccacctcccggtatgagacatctttgttggatttggttcagtctctgagcccaaactctgcgcccaaacctcagcgctatccctccagagaagctggggcctggaatcatgtcaatcttcaagaagtatcaagtccatccaggcgcggtggcttacacctgtaatcccaggctttgggaggccgaggcagccggatcatgaggtttggtgcctggaatgctgacctagatctggaaactagcccagatgaaagcaagaatgatgaggccacagtgtccatgaaagtagggtgaggagggtgtccagtggagccagagggagtgccaagagggaggtccttggaacac

SEQ ID NO: 145982 - DNA, 496 bp, Homo sapiens
  Payload ID: 8943
  Gene Symbol: KIAA1328
  Gene Name: KIAA1328
  ENST ID: ENST00000591911
  CDS Start-End: 461-496
agttctgatttgatgagagtgtaggttgcaatggtgagatggaagttgcaaaggcaatcatttgggacctttcagaagtgtagtatcctgaaacaccaagcaaattcagaccttcatgctgaggtgaatttgtaaagggtcattgggcgtaccctttgggagaactgatacggccttcagacctgtatccagtagaaaaagcactctccagtgttcatctgtggaactggatggttcctacttgagcatagccagaccacagacctactatcaaaccaagcaaagacctaagtctgcagtccaggattcagcttcagaatcccttatagcatttaggaataattctttgaaaccagtaacccttcatcatcccaaagatgatctagataagataccatcagagaccacaacatgtaattgtgaatctccagggagaaaacctgcagtcccaacagagaaaatgccacaagaagaattgcacatgaaggaatgtcca

SEQ ID NO: 145983 - DNA, 1577 bp, Homo sapiens
  Payload ID: 8943
  Gene Symbol: KIAA1328
  Gene Name: KIAA1328
  Uniprot ID: Q86T90
  ENST ID: ENST00000586501
  CDS Start-End: 301-690
aggtgatcttgtggttctttctaggtatccagtagaaaaagcactctccagtgttcatctgtggaactggatggttcctacttgagcatagccagaccacagacctactatcaaaccaagcaaagacctaagtctgcagtccaggattcagcttcagaatcccttatagcatttaggaataattctttgaaaccagtaacccttcatcatcccaaagatgatctagataagataccatcagagaccacaacatgtaattgtgaatctccagggagaaaacctgcagtcccaacagagaaaatgccacaagaagaattgcacatgaaggaatgtccacatcttaagcctactcctagtcaatgctgtggtcatagacttgctgcagatcgtgttcatgacagccatcctacaaacatgacccctcaacatcctaagacacatccagaatcatgcagttattgtcggctttcttgggcatctctggtgcatggtggtggggcactgcaacccattgaaactttgaaaaagcagatctcagaagatagaaagcagcaactgatgcttcagaaaatggaactggaaattgaaaaggagcgccttcagcatctgctggcccagcaggagacaaagcttcttctaaaacagcagcagcttcaccagtctcgactggattacaattgctcagagtagtttgatcatctgaatccttctctcaactcgtcaaagtcattctctgtccagctttgttccgttgctggtgaggagctgcgttcctttggaggaggagaggtgctctgctttttagagtttccaagaaccaagttggaaaacactctgcaggatattatccaggagaacttccccaatctagcaaggcaggccaacattcagattcaggaaatacagagaacgccacaaagatactcctcgagaagagcaactccaagacacataattgtcagattcaccaaagttgaaatgaaggaaaaaatgttaagggcagccagagagaaaggttgggttacccacaaagggaagcccatcagactaacagcggatctcttggcagaaactctacaagccagaagagagtgggggccaatattcaacattcttaaagaaaagaattttcaacccagaatttcatatccagccaaactaagcttcataagtgaaggagaaataaaatcctttacagacaagcaaatgctgagagattttctcaccaccagacttgccctaaaagagctcctgaaggaagcactaaacatggaaaggaacaactggtaccagctgctgcaaaatcatgccaaaatgtaaagaccatcaaggctaggaagaaactgcatcaactaacgagcaaaataaccagctaacatcataatgacaggaacaaattcacacataacaatattaactttaaatgtaaatggactaaatgctccaattaaaagacacagactggcaaattggataaagagtcaagacccatcagtgtgctgttttcaggaaacccatctcacatgcagagacacacataggctcaaaataaaaggatggaggaagatctaccaagc

SEQ ID NO: 145984 - DNA, 6528 bp, Homo sapiens
  Payload ID: 8944
  Gene Symbol: KIAA1429
  Gene Name: KIAA1429
  Uniprot ID: Q69YN4
  ENST ID: ENST00000297591
  CDS Start-End: 77-5515
ctctcctgagtcgctgtcgcggaggctggagcgctgccccggaagtcctcccccctgttccccgcccgcggcaaacatggcggtggactcggcgatggagctgttatttttagatacttttaaacacccgagcgctgagcaaagttctcatatagatgtggttcgttttccatgtgtggtttatatcaatgaagtccgagtcatacccccaggagtaagagcccatagcagtctgccagacaatagagcatatggagagacatctccccatacatttcaattagacttattcttcaacaatgtaagcaaaccaagtgcccctgttttcgataggttgggaagcctggaatatgatgagaatacttccatcatctttagacctaactcaaaggtgaatactgatggtctggtgctaagaggctggtataactgtctgacactggcaatatatggatcagtggatagagtgataagtcatgacagagactctccaccaccaccacctccaccgccaccacctccccagccacaaccaagtttgaaaaggaatccaaaacatgctgatggggagaaagaagatcagtttaatggaagccctccaagaccacagccaaggggaccaagaactcctccaggaccccctccacctgatgatgatgaagatgatcctgtgcctctgccagtgtctggtgacaaggaagaggatgctcctcatagagaagattactttgagcccatttctcctgatcggaattctgttccccaggaagggcaatattctgatgaaggagaagtagaagaggaacaacaagaagaaggagaagaagatgaagatgatgtggatgtagaggaagaagaggatgaggatgaggatgatcgacgaacagtagacagtattcctgaggaggaagaggaagatgaagaggaagaaggtgaagaggatgaagaaggtgaaggggatgatggttatgaacaaatttccagtgatgaagatggaattgctgacttggaacgtgaaacatttaagtatccaaactttgatgttgaatacactgctgaagacttagcttcagttcctcctatgacatatgatccatatgacagggagcttgtaccactcttatacttcagttgtccatacaagactacttttgaaattgaaatcagtagaatgaaggatcaaggtccagataaagaaaattcaggggcaatcgaagcctcagtgaagttaacagaactcttagatttgtatagagaagatagaggtgcaaaatgggtaacagctttagaagaaattccaagtttaataataaaagggttaagctatttgcaattgaaaaacacaaaacaagactcccttggccagttggtagactggaccatgcaagctttaaatttacaagtagcgcttcgccaacctatcgccttaaatgttcgacagctcaaagctgggaccaaattagtgtcctcactagcagaatgtggggctcaaggagttacaggactgctacaagcaggagtgatcagtggattatttgaacttctgtttgctgatcacgtatcatcttctcttaagttaaatgcttttaaagctttggacagtgtcattagtatgacagaaggaatggaagcttttttaagaggtaggcagaatgaaaaaagtggttatcaaaagcttctggaactcatacttttagatcagactgtgagggttgttactgctggttcagctattctccaaaaatgccatttctatgaagtcttgtcagagattaaaagacttggtgaccatttagcagagaagacttcatctcttcctaaccacagtgaacctgatcacgacacagatgctggacttgagagaacaaacccagaatatgaaaatgaggtggaagcttctatggatatggatcttttggaatcctcaaatataagtgaaggggaaatagaaaggcttattaacctcctagaagaagtttttcatttaatggaaactgcccctcatacaatgatccaacaacctgttaagtctttcccaacgatggcacgaattactggacctccagagagggatgatccataccctgttctctttagatatcttcacagtcatcacttcttggagttggttaccttgcttctgtcaattccagtaacaagtgctcaccctggtgtgctgcaagccacaaaagatgttttgaagtttcttgcacagtcacagaagggtcttcttttttttatgtcggaatatgaagcaacaaatttattgatccgagctctgtgtcacttttatgatcaagatgaggaggaaggtctccaatctgatggtgttattgatgatgcatttgccttgtggctacaggactcaacacagacattgcaatgtattacagaactgttcagccattttcagcgttgtacagccagtgaagaaacagaccattcagatctcttgggaaccctgcacaatctttatttgattacttttaatcctgtgggaagatcagctgttggccatgtttttagtctggagaaaaatctccaaagtcttattactctaatggagtactattccaaagaagccttgggtgattccaaatctaagaagtcagtagcttataattacgcatgcatacttattttggtggtggttcagtcttccagtgatgttcaaatgctagaacaacatgcagcatctctcttgaagctttgtaaagcagatgaaaataatgctaaattgcaagaacttggcaagtggcttgaacctctgaaaaaccttagatttgaaattaactgcatcccaaacttaattgagtatgttaagcagaatatcgataacttgatgaccccagaaggagttggccttaccactgccttacgtgttctctgtaatgttgcatgcccaccacctcctgttgaaggtcaacagaaagatctgaaatggaatcttgccgttattcagcttttttctgctgaaggaatggacacgtttattcgagttctgcaaaaattgaacagtattctgactcagccttggaggctccatgtcaacatggggactacccttcacagagttactactatttcaatggctcgctgcacactcactcttcttaaaactatgttaacggaactcctgagaggtggatcctttgagtttaaggacatgcgtgttccttcagcgcttgttactttacatatgctcctgtgctctatccccctctcaggtcgtttggatagtgatgaacagaaaattcagaatgatatcattgatattttactgacttttacacaaggagttaatgaaaaactcacaatctcagaagagactctggccaataatacttggtctttaatgttaaaagaagttctttcttcaatcttgaaggttcctgaaggatttttttctggactcatactcctttcagagctgctgcctcttccattgcccatgcaaacaactcaggttattgagccacatgatatatcagtggcactcaacacccgaaaattgtggagcatgcaccttcatgttcaagcaaagttgctccaagaaatagttcgctctttctctggcacaacctgccagcccattcaacatatgttacggcgtatttgtgttcaattgtgtgaccttgcctcaccaactgcacttctgattatgagaactgtgttggatttgattgtagaagacttgcaaagcacttcagaagataaagaaaaacagtatactagccaaaccaccaggttgcttgctcttcttgatgctctggcttcacacaaagcttgtaaattagctattttgcatctaattaatggaactattaaaggtgatgaaagatatgcagagatattccaggatcttttagctttggtgcggtctcctggagacagtgttattcgccaacagtgtgttgaatatgtcacatccattttgcagtctctctgtgatcaggacattgcacttatcttaccaagctcttctgaaggttctatttctgaactggagcagctctccaattctctaccaaataaagaattgatgacctcaatctgtgactgtctgttggctacgctagctaactctgagagcagttacaactgtttactgacatgtgtcagaacaatgatgtttcttgcagagcatgattatggattatttcatttaaaaagttctttaaggaaaaacagtagtgctctgcatagtttactgaaacgagtggtcagcacatttagtaaggacacaggagagcttgcatcttcatttttagaatttatgagacaaattcttaactctgacacaattggatgctgtggagatgataatggtctcatggaagtagagggagctcatacatcacggacgatgagtattaatgctgcagagttaaaacagcttctacaaagcaaagaagaaagtccagaaaatttgttccttgaactagagaagcttgttttggaacattcaaaagatgatgacaatctggattctttgttggacagtgtagttggacttaagcagatgctggagtcatcaggtgaccctttacctctcagtgaccaggatgtagaaccagtactttcagctccagaatctcttcagaatctgtttaacaataggactgcctatgtgcttgctgatgtcatggatgatcagttgaaatctatgtggttcactccatttcaggctgaagagatagatacagatctggatttggtaaaggttgacttaattgaactctctgaaaaatgctgtagtgactttgatttgcactcagaattagagcgctcatttttgtcagaaccatcatctccaggaagaaccaagactactaaaggattcaaacttgggaagcacaagcatgagacctttataacgtcaagtggaaaatctgaatacattgaacctgccaaaagagctcatgttgtgccaccaccaagaggaaggggcaggggaggatttggacagggtatacgacctcatgatatttttcgtcagagaaaacagaacacaagtagaccaccatctatgcatgtggatgactttgttgctgctgaaagtaaagaagtggttcctcaagatggaatacctccaccaaaacggccactcaaagtatcacagaagatttcttcccgtggtgggttttcaggcaatagaggaggacggggtgctttccacagtcagaataggtttttcacaccacctgcttcaaaaggaaactacagtcgtcgggaaggaacaagaggctccagttggagtgctcagaatactcctcgaggaaattacaatgaaagtcgtggaggccagagcaattttaacagaggccctcttccaccattacgaccccttagttctacaggttaccgcccaagtcctcgggaccgtgcttctagaggtcgtgggggacttggaccttcctgggctagtgcaaatagcggcagtggaggctcaagaggaaagtttgttagtggaggcagtggtagaggtcgtcatgtacgctcctttacacgataaaaatccttttgggaacatcttaactgtatatgaacatttcacgaggacaataaaaataagacattgaaggaccaatttagacttagcagttatctggagacatctgagagaatatttttatctgaagaaagcagaatttgtttgatacctaacaagatttcaataaaaatccaaactttgtatgtacgtttgtatatattttcccttttttgtatgactatttatttagaaaatttctaggtgaaaaactaaatgatgttttgtatttttcttgcctatagcacagatattctcaaactttctcagctcatgacactatttagtgcctcagtacttttttcacagcatacctggtccaaaagaaatatctaatacttgtgtttattaagcagttagatccaacagcttaataagaatgtacatcatcaccactagtaactgtggacactgcatgtctcaaaccttggaatcagtatcattttcttttcctctctgcttcttgcacagtactttttatcaaactgctgaaaacccagttttgtaaagatatgttgttatagaaaggaatataatgctatttaatgttgaaaatgtaaactacctcaaagtagtagtttatgtgatgtccaacaggtgttgctatgtttttctcaaaaattttaaaatattgtgtggcacccatgttaatttgctaaggtgccctgctacacagtttgggaaccatggctgtaccaaaagaaacaaaatactcctctcctttgtattagaaatctgaactttgcatttcagctttggacctactgacactattttattatacaaattatttaaagcctaaaataaggaatatcctaatactattattttgggaatcagaaacatctaataaagctggactttatacatagaaataaagcttacaactttgagaaagtagccatattttccccaagatacgtcttaacacactgagtctatataagtggcgtaaaatacagagttatcttaatcag

SEQ ID NO: 145985 - DNA, 3924 bp, Homo sapiens
  Payload ID: 8944
  Gene Symbol: KIAA1429
  Gene Name: KIAA1429
  Uniprot ID: Q69YN4
  ENST ID: ENST00000421249
  CDS Start-End: 83-3526
ttctccctctcctgagtcgctgtcgcggaggctggagcgctgccccggaagtcctcccccctgttccccgcccgcggcaaacatggcggtggactcggcgatggagctgttatttttagatacttttaaacacccgagcgctgagcaaagttctcatatagatgtggttcgttttccatgtgtggtttatatcaatgaagtccgagtcatacccccaggagtaagagcccatagcagtctgccagacaatagagcatatggagagacatctccccatacatttcaattagacttattcttcaacaatgtaagcaaaccaagtgcccctgttttcgataggttgggaagcctggaatatgatgagaatacttccatcatctttagacctaactcaaaggtgaatactgatggtctggtgctaagaggctggtataactgtctgacactggcaatatatggatcagtggatagagtgataagtcatgacagagactctccaccaccaccacctccaccgccaccacctccccagccacaaccaagtttgaaaaggaatccaaaacatgctgatggggagaaagaagatcagtttaatggaagccctccaagaccacagccaaggggaccaagaactcctccaggaccccctccacctgatgatgatgaagatgatcctgtgcctctgccagtgtctggtgacaaggaagaggatgctcctcatagagaagattactttgagcccatttctcctgatcggaattctgttccccaggaagggcaatattctgatgaaggagaagtagaagaggaacaacaagaagaaggagaagaagatgaagatgatgtggatgtagaggaagaagaggatgaggatgaggatgatcgacgaacagtagacagtattcctgaggaggaagaggaagatgaagaggaagaaggtgaagaggatgaagaaggtgaaggggatgatggttatgaacaaatttccagtgatgaagatggaattgctgacttggaacgtgaaacatttaagtatccaaactttgatgttgaatacactgctgaagacttagcttcagttcctcctatgacatatgatccatatgacagggagcttgtaccactcttatacttcagttgtccatacaagactacttttgaaattgaaatcagtagaatgaaggatcaaggtccagataaagaaaattcaggggcaatcgaagcctcagtgaagttaacagaactcttagatttgtatagagaagatagaggtgcaaaatgggtaacagctttagaagaaattccaagtttaataataaaagggttaagctatttgcaattgaaaaacacaaaacaagactcccttggccagttggtagactggaccatgcaagctttaaatttacaagtagcgcttcgccaacctatcgccttaaatgttcgacagctcaaagctgggaccaaattagtgtcctcactagcagaatgtggggctcaaggagttacaggactgctacaagcaggagtgatcagtggattatttgaacttctgtttgctgatcacgtatcatcttctcttaagttaaatgcttttaaagctttggacagtgtcattagtatgacagaaggaatggaagcttttttaagaggtaggcagaatgaaaaaagtggttatcaaaagcttctggaactcatacttttagatcagactgtgagggttgttactgctggttcagctattctccaaaaatgccatttctatgaagtcttgtcagagattaaaagacttggtgaccatttagcagagaagacttcatctcttcctaaccacagtgaacctgatcacgacacagatgctggacttgagagaacaaacccagaatatgaaaatgaggtggaagcttctatggatatggatcttttggaatcctcaaatataagtgaaggggaaatagaaaggcttattaacctcctagaagaagtttttcatttaatggaaactgcccctcatacaatgatccaacaacctgttaagtctttcccaacgatggcacgaattactggacctccagagagggatgatccataccctgttctctttagatatcttcacagtcatcacttcttggagttggttaccttgcttctgtcaattccagtaacaagtgctcaccctggtgtgctgcaagccacaaaagatgttttgaagtttcttgcacagtcacagaagggtcttcttttttttatgtcggaatatgaagcaacaaatttattgatccgagctctgtgtcacttttatgatcaagatgaggaggaaggtctccaatctgatggtgttattgatgatgcatttgccttgtggctacaggactcaacacagacattgcaatgtattacagaactgttcagccattttcagcgttgtacagccagtgaagaaacagaccattcagatctcttgggaaccctgcacaatctttatttgattacttttaatcctgtgggaagatcagctgttggccatgtttttagtctggagaaaaatctccaaagtcttattactctaatggagtactattccaaagaagccttgggtgattccaaatctaagaagtcagtagcttataattacgcatgcatacttattttggtggtggttcagtcttccagtgatgttcaaatgctagaacaacatgcagcatctctcttgaagctttgtaaagcagatgaaaataatgctaaattgcaagaacttggcaagtggcttgaacctctgaaaaaccttagatttgaaattaactgcatcccaaacttaattgagtatgttaagcagaatatcgataacttgatgaccccagaaggagttggccttaccactgccttacgtgttctctgtaatgttgcatgcccaccacctcctgttgaaggtcaacagaaagatctgaaatggaatcttgccgttattcagcttttttctgctgaaggaatggacacgtttattcgagttctgcaaaaattgaacagtattctgactcagccttggaggctccatgtcaacatggggactacccttcacagagttactactatttcaatggctcgctgcacactcactcttcttaaaactatgttaacggaactcctgagaggtggatcctttgagtttaaggacatgcgtgttccttcagcgcttgttactttacatatgctcctgtgctctatccccctctcaggtcgtttggatagtgatgaacagaaaattcagaatgatatcattgatattttactgacttttacacaaggagttaatgaaaaactcacaatctcagaagagactctggccaataatacttggtctttaatgttaaaagaagttctttcttcaatcttgaaggttcctgaaggatttttttctggactcatactcctttcagagctgctgcctcttccattgcccatgcaaacaactcaggtatcacttccatataacatgcatcttataaatgactgcagtaacactttttaaaaagccagtgattttgttaaaaaacaaaaaccctcatctcccttcctcccaaaaagacataaaataaccggatgagggggagataaaactgaaacaagttggtcattgaggaaatatgggggtaacattttaaataaatttttgttaaagtgagttttattttgctgttatgtatgtttgtacttacatttttctgttattttaaatcctttcccccacaccttaccatgtgttagaatttgccaataactagattgcttcaccaatggactctgctcaactaactgctaacctgagaacaataagattttttagactcattgaattcaagcaaatgtttaactgtataatagaaaattaaatgttttaagcatgcagtaaaaatgttcttttcataa

SEQ ID NO: 145986 - DNA, 609 bp, Homo sapiens
  Payload ID: 8944
  Gene Symbol: KIAA1429
  Gene Name: KIAA1429
  ENST ID: ENST00000523263
  CDS Start-End: 1-274
tcatacatcacggacgatgagtattaatgctgcagagttaaaacagcttctacaaagcaaagaagaaagtccagaaaatttgttccttgaactagagaagcttgttttggaacattcaaaagatgatgacaatctggattctttgttggacagtgtagttggacttaagcagatgctggagtcatcaggtgaccctttacctctcagtgaccaggatgtagaaccagtactttcagctccagaatctcttcagaatctgtttaacaataggtaaaggttgacttaattgaactctctgaaaaatgctgtagtgactttgatttgcactcagaattagagcgctcatttttgtcagaaccatcatctccaggaagaaccaagactactaaaggattcaaacttgggaagcacaagcatgagacctttataacgtcaagtggaaaatctgaatacattgaacctgccaaaagagctcatgttgtgccaccaccaagaggaaggggcaggggaggatttggacagggtatacgacctcatgatatttttcgtcagagaaaacagaacacaagtagaccaccatctatgcatgtggatgactttgttgctgct

SEQ ID NO: 145987 - DNA, 3219 bp, Homo sapiens
  Payload ID: 8944
  Gene Symbol: KIAA1429
  Gene Name: KIAA1429
  ENST ID: ENST00000522263
  CDS Start-End: 1-2193
caacctgttaagtctttcccaacgatggcacgaattactggacctccagagagggatgatccataccctgttctctttagatatcttcacagtcatcacttcttggagttggttaccttgcttctgtcaattccagtaacaagtgctcaccctggtgtgctgcaagccacaaaagatgttttgaagtttcttgcacagtcacagaagggtcttcttttttttatgtcggaatatgaagcaacaaatttattgatccgagctctgtgtcacttttatgatcaagatgaggaggaaggtctccaatctgatggtgttattgatgatgcatttgccttgtggctacaggactcaacacagacattgcaatgtattacagaactgttcagccattttcagcgttgtacagccagtgaagaaacagaccattcagatctcttgggaaccctgcacaatctttatttgattacttttaatcctgtgggaagatcagctgttggccatgtttttagtctggagaaaaatctccaaagtcttattactctaatggagtactattccaaagaagccttgggtgattccaaatctaagaagtcagtagcttataattacgcatgcatacttattttggtggtggttcagtcttccagtgatgttcaaatgctagaacaacatgcagcatctctcttgaagctttgtaaagcagatgaaaataatgctaaattgcaagaacttggcaagtggcttgaacctctgaaaaaccttagatttgaaattaactgcatcccaaacttaattgagtatgttaagcagaatatcgataacttgatgaccccagaaggagttggccttaccactgccttacgtgttctctgtaatgttgcatgcccaccacctcctgttgaaggtcaacagaaagatctgaaatggaatcttgccgttattcagcttttttctgctgaaggaatggacacgtttattcgagttctgcaaaaattgaacagtattctgactcagccttggaggctccatgtcaacatggggactacccttcacagagttactactatttcaatggctcgctgcacactcactcttcttaaaactatgttaacggaactcctgagaggtggatcctttgagtttaaggacatgcgtgttccttcagcgcttgttactttacatatgctcctgtgctctatccccctctcaggtcgtttggatagtgatgaacagaaaattcagaatgatatcattgatattttactgacttttacacaaggagttaatgaaaaactcacaatctcagaagagactctggccaataatacttggtctttaatgttaaaagaagttctttcttcaatcttgaaggttcctgaaggatttttttctggactcatactcctttcagagctgctgcctcttccattgcccatgcaaacaactcaggttattgagccacatgatatatcagtggcactcaacacccgaaaattgtggagcatgcaccttcatgttcaagcaaagttgctccaagaaatagttcgctctttctctggcacaacctgccagcccattcaacatatgttacggcgtatttgtgttcaattgtgtgaccttgcctcaccaactgcacttctgattatgagaactgtgttggatttgattgtagaagacttgcaaagcacttcagaagataaagaaaaacagtatactagccaaaccaccaggttgcttgctcttcttgatgctctggcttcacacaaagcttgtaaattagctattttgcatctaattaatggaactattaaaggtgatgaaagatatgcagagatattccaggatcttttagctttggtgcggtctcctggagacagtgttattcgccaacagtgtgttgaatatgtcacatccattttgcagtctctctgtgatcaggacattgcacttatcttaccaagctcttctgaaggttctatttctgaactggagcagctctccaattctctaccaaataaagaattgatgacctcaatctgtgactgtctgttggctacgctagctaactctgagagcagttacaactgtttactgacatgtgtcagaacaatgatgtttcttgcagagcatgattatggattatttcatttaaaaagggatgctgtggagatgataatggtctcatggaagtagagggagctcatacatcacggacgatgagtattaatgctgcagagttaaaacagcttctacaaagcaaagaagaaagtccagaaaatttgttccttgaactagagaagcttgttttggaacattcaaaagatgatgacaatctggattctttgttggacagtgtagttggacttaagcagatgctggagtcatcaggtgaccctttacctctcagtgaccaggatgtagaaccagtactttcagctccagaatctcttcagaatctgtttaacaataggactgcctatgtgcttgctgatgtcatggatgatcagttgaaatctatgtggttcactccatttcaggctgaagagatagatacagatctggatttggtaaaggttgacttaattgaactctctgaaaaatgctgtagtgactttgatttgcactcagaattagagcgctcatttttgtcagaaccatcatctccaggaagaaccaagactactaaaggattcaaacttgggaagcacaagcatgagacctttataacgtcaaggaaactacagtcgtcgggaaggaacaagaggctccagttggagtgctcagaatactcctcgaggaaattacaatgaaagtcgtggaggccagagcaattttaacagaggccctcttccaccattacgaccccttagttctacaggttaccgcccaagtcctcgggaccgtgcttctagaggtcgtgggggacttggaccttcctgggctagtgcaaatagcggcagtggaggctcaagaggaaagtttgttagtggaggcagtggtagaggtcgtcatgtacgctcctttacacgataaaaatccttttgggaacatcttaactgtatatgaacatttcacgaggacaataaaaataagacattgaaggaccaatttagacttagcagttatctggagacatctgagagaatatttttatctgaagaaagcagaatttgtttgatacctaacaagatttcaataaaaatccaaactttgtatgta

SEQ ID NO: 145988 - DNA, 497 bp, Homo sapiens
  Payload ID: 8944
  Gene Symbol: KIAA1429
  Gene Name: KIAA1429
  ENST ID: ENST00000517624
  CDS Start-End: 1-183
gaattagagcgctcatttttgtcagaaccatcatctccaggaagaaccaagactactaaaggattcaaacttgggaagcacaagcatgagacctttataacgtcaaggaaactacagtcgtcgggaaggaacaagaggctccagttggagtgctcagaatactcctcgaggaaattacaatgaaagtcgtggaggccagagcaattttaacagaggccctcttccaccattacgaccccttagttctacaggttaccgcccaagtcctcgggaccgtgcttctagaggtcgtgggggacttggaccttcctgggctagtgcaaatagcggcagtggaggctcaagaggaaagtttgttagtggaggcagtggtagaggtcgtcatgtacgctcctttacacgataaaaatccttttgggaacatcttaactgtatatgaacatttcacgaggacaataaaaataagacattgaaggaccaatttagacttagcagtt

SEQ ID NO: 145989 - DNA, 668 bp, Homo sapiens
  Payload ID: 8945
  Gene Symbol: KIAA1456
  Gene Name: KIAA1456
  ENST ID: ENST00000532376
  CDS Start-End: 506-668
ctattttttcctcttcctttcatcctcacactctaaaataggtcaaggggtggaagttacacctggtgcagccctcggctctgatgcaaaagcagcttttgcccctggctgcgggacagcgctgtgactactcgcaacgggagagctgctgccagtcgccacaccgtgcggaaagcgccggcgaccggagcactgacaatggtctgcataggggagcggagagaagcttctgttgcgccctagatccgctgcctcggcgcccgcccgcagggaggagggggcgcgacaggtcgtctagcgcgtgccccggagcccgcgcccgggtctggccgcctggggcctgtgcttccttcagagactcacacaagaggtttatcatgagaaggaccgcactatttcatttcactcctacaagttttcatttacgttacacattgagaaagttatgagaagcaactgtcactctctggaggtggagactgccgtgattcacaaagacaagaggatggatcatgaagccgcccagctggagaagcagcatgtgcacaatgtgtacgagagcacagccccttacttcagcgacctgcagagcaaagcctggcctcgtgtccgccagttcctgcaagagcagaagccaggcagcctcatcgctgacataggttgtggga

SEQ ID NO: 145990 - DNA, 9587 bp, Homo sapiens
  Payload ID: 8945
  Gene Symbol: KIAA1456
  Gene Name: KIAA1456
  Uniprot ID: Q9P272
  ENST ID: ENST00000524591
  CDS Start-End: 490-1854
agtattgtgtagtacagaaaagatcacacatgtatatgtcagaagtagatgcacatgttcttttggctttttttctttgttttattcttttttcattttttgtgttttttgttagtttgttttgaattttttttcttgatgcatatgttccttcaacttattcagtacttccatgtgcagggctctggactagactttcaggatctaaggctgaatcctacacagtcctccctctgggaaagtgatgaaacctgtgagctctcctagcaactctgcagtcttccttcaagggcctgtgcttccttcagagactcacacaagaggtttatcatgagaaggaccgcactatttcatttcactcctacaagttttcatttacgttacacattgagaaagttatgagaagcaactgtcactctctggaggtggagactgccgtgattcacaaagacaagaggtaattttcctgtaatcacaggatgactcaggatggatcatgaagccgcccagctggagaagcagcatgtgcacaatgtgtacgagagcacagccccttacttcagcgacctgcagagcaaagcctggcctcgtgtccgccagttcctgcaagagcagaagccaggcagcctcatcgctgacataggttgtgggactggaaaatatcttaaagtgaacagccaggtacataccgtgggctgtgactactgtgggccactggtagagattgcccggaatagaggatgtgaagccatggtatgtgacaaccttaatctcccctttagggatgagggcttcgatgccatcatctccataggagtcatacatcatttttctacaaaacaaagaagaatcagagcaataaaagaaatggccagggtcttagttcccggaggccaactgatgatttacgtttgggcaatggaacaaaagaaccgtcactttgagaagcaagacgtgcttgttccatggaacagggctctgtgttcccagctcttctcagagtccagccagtctgggaggaagaggcagtgtggatacccagaaagaggccatccctaccatcctccttgctctgagtgtagctgttctgtttgttttaaagagcagtgtggttcaaaacggtcccacagcgtgggctatgaacctgctatggcaagaacctgttttgcaaatatttctaaggaaggcgaggaagaatatggattttacagcacattaggaaaatcgtttcgttcctggtttttctccagatctttggatgaatcgactctgaggaagcaaattgaaagagtaagacccttgaaaaacacagaagtttgggccagtagcactgtaacagtccagccttccagacactctagtttagactttgatcaccaagagccattttcaacaaaagggcaaagtttagatgaggaagtgtttgtggaatcttcttctggaaaacacttggagtggctgagagcaccaggcactctgaaacatttaaatggagaccatcaaggggaaatgaggagaaatggagggggaaattttctggatagcactaatactggtgtgaattgtgtggatgcaggcaacatagaagatgataatccttctgctagtaaaatattgagaaggatttctgcagttgattccacagatttcaacccagatgatacaatgtctgtcgaagatccacagactgatgttttggactccacagcctttatgcgctactaccatgtgtttcgagaaggggagctctgcagtctgctcaaggagaatgtgtcagagctccgtatcctgagttctgggaatgatcatggtaactggtgtatcattgcagagaaaaagagaggttgtgattgattggatccttttagacaactcctccaaaagatgaaccacattctttcctcttggtttgatatggttacctgaatttgcattcagtgttatttgttaatccatttacgctttggtctgcagagactattaattatttggttgttttgttttcatttttgaataagcacagattctggcattgaaagcacttgacaaagggtatttgtgcttaaatgttaatatacaagatctgaagaagcaacagaaagtacccttcagtacacctcagacttttttttaaccccagagagataaaatacatgtatagtgtttttcagtattacacattgatttaaaaagattatgctgttaaataatcttttaaaacggtatttttataaagtgaggggataatttctggttctcaggttataactgagagcagtgtgcaagataataggtaaatttgatccattgcacagatatactttgaaccatgtgatgagttatcttgttgccaaggccttgcttctacttaaagttttcagaaaactgagtgacagtggagagaaacaagaagttttacaaggactttactaaattataagcaaacttgcttcaaaataagttgacatgtgataataaggttttcaatgtagcccaggaggtttttaaaggcactgttaggctgagcatggtggctcatgcctgtaatcccagcactttgggaggccaaggcagaaggatcacttgaacccaggagttcaagaatagcctgggcaacatagcaagaccccatctctataaaaattagcaagatgtggtggtgcatgcctgtcatccaagctactcaagagactgaggcaggaggatcacgtgagcccaggaattcaaggctgcagtgaactatgattgcatcactgcactgcagcctgggcaacatagcaagactctgtctcaaaataataataataataataataaaggcgttgttagcttgtaaggagtggagtatgtaggtagtaggagttatatgcaagtacccaagtggtattcttccaatcttattagaagcatgaatattcaagattgatattactattgcttattagcaagattgttatcaatcatgcttattagaaggatgaatatccaagaccaagattgactaatgatgagtctgcatcaagaactaggcatttcttctgagttgacggactctttaggaaaggagaatctaagtgaagcactgattttagctctgagaacaaacaaattaaggtacagcatagttagccttggtagaggtatgacttggatttgctgtatcctttaaaatagtatctgggcatttattttattgaaggtgactacattttattagttatattaggaatttaggtagaatcaacttctactgattacaggttgaatttctgtcactttgtagagaaacgaatagactggacactgtgtggtcactgtttagatttgcccatgggtctctttaaatctatgtcatggatcctgagacacaaatataattaagacaggtctagagacaggagaagcagaaataagttgacccaggagtacagtctcaagtagttcattaatgagaaaattgacatctgacaagagtctttttactttatgctggatgaaaatccaaatcttgttttattttttccactaaaagtgactaaaataataacgaatttcatttgttcttgggttcttttttcctttaatgattgtgctataacttaaaataatgatgttacttttgaacaaacttaaagaaatatttttaaagcgtatctgaaaacgattgatgtttataactctcttttggcttcaaaataagattgtgttatcaccattttggtagatgaggttgtctggtgaaaatgatgcatatgagttgtactgttcagtgtacatcctgcagtagtggatgattgaaaacatatataagtggagtataaattaaaaattaatttggtttcttctatttcttttttttttttttttttttgagacagagtctcgctctgtcgcccaggctggagtgcactggcgcgatctcggctcactgtaagctccgcctcccgggttcacgccatcctcctgcctcagcctcccaagtagctgggactactggcacccaccacgacgcccggctgtttttttgtatttttaggagagacggggtttcaccgtgttagccaggatggtctcgatctcctgacgtcgtgatccacccgcctcggccccccacagtgctgggattacaggcgtgagccaccgcgcccggcctgttccttttatttcttaattcaggacactaaaccatgactgcaagggatttccttggtaaaaagaaaagattctcagagtcaaaatggtcttacaactcgggcttgacggcctttgaattatgaatggattgttcctctctctgaagcctattgtcacatgggtttttaatcctggccttgctgctagaaatctgtgcttgaagtcctctctttctgctgctagcctaccagttaaaagtcaagacttggtggaactcagtttaccagactctttagcctttgagctaaactgtctgagcaacctcttagatgtgcacacaccactttgtatgaaagggttctctagaacggttctttggagagaaatattttcatgtacgtttgacaggggtgtaaataaagcatgctgactaataagtcttttactcttcatctaatgaacataagaatctatgcatccagatattattttgtatacaaatatttaatttggtgattgataatctctctttggggtagtcacatggaaagctcttttaaatttaacttccgcctttggattttttttaaaaagccattgaagagcaaaactaatgtaaacgtcttgatcatttaaaaagcttgcttgtcctcgaaaggaaacacaggtcatcagtgagtataaacgtagacagttgatttgtgaatgctgtcggcctcaacttgcttgatgatagattctactgacctagctggagtaatctgatcacttacttccttattaatactagatcacacagtgtctttcttattccttcttctttacttactggcatcagcacagagtcccactatctgaaatagaagggagagtttgggggtttattggaggagtcttaaaaacttggttggcagctgggtacgatgactcacacctgtactcccagcacttcaggaagctgaggtgggtggatcagctgaggtcaggagtttgagaccagcctgaccaacatggtgaaaccccgtctttattaaatacaaaaaattagccaggttggtggcgcatgcctgtaatcccagctacttgggaggctgaggcaggagaatcgcttgaacctgggaggcggaggttgcagtgagccgagattgtgccattgcactccaacctgggcaacaagagtgaaactccatctccaacaaaacaaaactttgctggcttcctgatgcctcactgtctatttgaggaattccacagaatcttcaaaggatttgggggaaagcgcattaacatggacaaaggatggaatcaaaataatgttatagtgagaatcattcaagcacctatttaaattttttccaattgccagtatagtgatgatatgacaccagcatatcaaagtaactaacaaactagctacacaaacgtcttggagtttggtttcgttctcttttctcatcatagatctccgtgcagaatagtgctaattcttatttctcgtttgcctttctatttccttccaaattctacatgccagtaattcctctgtcttttaagtgaccatcaattcaataggcaaaaatttggagtaatccagagaaaaaaccatccaaatataaaccagctaggaacatgaatgcccctgattattaatggccaaaaaaaaagcactggtggattttaaattaaattaatacatatatacgagtttggaggagaacagaagttctaactcagtacttgaacttggtgggggagggcacaggttaaatatgagctgtgagcccccagttttggaggaaggaggaaatgggaaccaaccaccagacaagcagctgcagtctaagaaaaacaaattagggcaggcctcagcatctctttcctattacatagaaaatctgaaatgagaatagctgtgaacttttctaaatatgcaacattcaactatcgcaaggacaaaaaaccaaacaccgcatgttctcactcataggtgggaattgaacaatgagaacacatggacacagtaaggggaacatcacacactgggacctgttgtgaccccgctgagggagttcctcttgccctctacccccggggcttgtatatagattataaatatataagggggaaaggggtgggggggaggggttgtgcggctggggcctcacttcccctccttccccttctcctggtcccctgtcccaggggctgtttgttaaaaaagagtaataaaggatttttgtttttaaaaaaagcaacgttcattaatttatatgcagtcctcaccacagccctccaagataactatacttattgttcccattttgcagatgaggaaaactgaggcagaaagaaattaaattgcttaaggttacacacatagtaggtatcacacatttagttagaggcagagctgggattcaaacccaggtctggctcctagtctctgctcttaaccacaacaccatatactcccacccctgggcccagctcatgtgcttggcggagtattagagcctttcaaggtaagtgtgattatcccctttccaaatgagctttggaaaagtttaagcaaagattacacagctagacaataattcaatagtagtctcttacatattttcccttttatctttttttcatttgtaaatctgtttcgatttgatttgaattaaaaaatagttcttggttgcaaaatattctgggaccacttttctccaactcttcaacctttcaacaattatattattgttttcccattttataagtaaggcaactgaggactattcagatatttcattcactccatttgtttactaagccctgctgtgtgctggatacacagtctgctgtgtgctggatacatatgatacaaggtaatgactatctggcatcttgaaggtacccagaatattagaattaactgacccacaggtgccaagctgaaacattcttcgtattccctgtgtgcctattaccaagttatattgtttagtttgaggaaaacaacaaacaaccctcccttagagaatcatgatgcatattagcatatttaaggagtaccctaaagcttggacttaatctagcttaccctagacgtattaacatcctatagcgcacgtgttctgtgggatatatttcagaaaataatatgtcttacagaataaatgcagactcctttggatggcattcaggcccttcataaagtaactctgaattatttttcagtctcatttcctgcagttgcacccgattttttctgttctgcaatctgctattttagacaaagctttcataagaaattacataatgacaagtaattcccacattccctagatatatacttggatttcaaatgccataattgtaatctttctccaaagaaaaatgcacgatacaggcttcattctatcaagaggcatatgaggtaagcgttattatacacccgtccagcagatgggaaaaccacggaagtgggagggaatcaagaagcattaacagaccctccaccaaccgtaatgcttaactcctcttgttccaatcttaactcaaaattatgattattttgattatttaatgattgttttgatagtataaactccatatctgcaacctcagttatctacaacactgaggtgcaaacatttaaaaagatctctcaccaaacaaggattgaaattgtattgcaaatgaaagagctcagcatgagagcacaatcagaaactgaagagagttgatcaaagagaagattctagctgaattgttctatttttaattccccagggatcctacggtctatgacacattaacaggggtgtgaatcatttcagttacatcacatactctgtcctcttgtggtgcgggtcttccccagttgattatacacagataatcaatgactttatttgggagggattggagctatagaataatctatcttaccaatctgatggaccatttgtaagagctgtttgtcaaattggatcttcatttgacaaataaatactagagctgcagaaagtaaagtttactccaacccaattaatcattaatacatccacaggaaaaatacattttctccacatggaatattgatttttctatgaatattacctccacattgaaaaacgagtgagtcactgcagttaagccagtgtaccttgatgttgaattccctgaagaaggtacaattatatttacattcccttagcaagaatttggctaagtgataagcacttttctcttttcttttctttttttttttttttttttgagacagtgtctcactctgtcacccaggctggagggcagtagtgcagtctcagctcattgcaacctctgcctcccaggtttaagcaattctcgtgcctcagcctcctgaatagctgggattacaggaacatgccaccactcctggctaatttttgtatttttttttaagtaaagacaaactttcaccatgttggccaggctggtcttgaactcctgacctcttacgagctaatcataccacttctaactagattttctattaatgtacaaggagggactccactactaaagtttgttttacttctctggttatttacacaaaacgctggcaatacattaaggctcactaatgtggacctaagtgagtatctgagaggctttgaatatgtatgtgcaaactgtcctattttctttatatgctctcttaaatatgtatgtctgtaaatatatatataacacacatatatatatattcctagacatctagtgtttgctgtcattagtgaccaagaaaaagtagttcttttgtgcacgcgtgaatacatcaaattagcaattaccatagaaatgtatttcattgaataaatagcttttgtttgtttgtttgtttgtttcagggaaatttagaacaattattagatgttatagtgcctcttctcgtgttgatacgtgtatttgggtcaaaagtgcaaaaacttttttctacaatgtacagttattttgacttttcccaggggaagctagcaatagttttaaaagcacaaagtgatgtaaaatattttgacttttataataatgcgaagtagttttatttgcattaatcaataatgttcaggatctttttgtagtaagtatattttaaatggtgtaatttgtgtgtttatgatatgtattcaattatttaagttaagtatcagtgtatttttaaaaagtgttcccaggtgaacaaaagtttgcttttcttcaccattctgtacaggacaagcattattcagttcacatagtcagctctcactacacttcaacagaacggggcaagttcgtatttgaattctgttatatttatctaagggaagcaaaattaaccttttaataatagattatctttaatggttattaaaagaatgttattgaccaaaaagacatattttgagattaataaagatgtattagattatccaaaa

SEQ ID NO: 145991 - DNA, 983 bp, Homo sapiens
  Payload ID: 8945
  Gene Symbol: KIAA1456
  Gene Name: KIAA1456
  ENST ID: ENST00000447063
  CDS Start-End: 330-920
agtatttgagggaacatccgggctctggactagactttcaggatctaaggctgaatcctacacagtcctccctctgggaaagtgatgaaacctgtgagctctcctagcaactctgcagtcttccttcaagggcctgtgcttccttcagagactcacacaagaggtttatcatgagaaggaccgcactatttcatttcactcctacaagttttcatttacgttacacattgagaaagttatgagaagcaactgtcactctctggaggtggagactgccgtgattcacaaagacaagaggtaattttcctgtaatcacaggatgactcaggatggatcatgaagccgcccagctggagaagcagcatgtgcacaatgtgtacgagagcacagccccttacttcagcgacctgcagagcaaagcctggcctcgtgtccgccagttcctgcaagagcagaagccaggcagcctcatcgctgacataggttgtgggactggaaaatatcttaaagtgaacagccaggtacataccgtgggctgtgactactgtgggccactggtagagattgcccggaatagaggatgtgaagccatgggacttgagcatccatggatttggtatccgagggcgtcctggaaccaaccccccacggatattgagggaccacagtatttttatcctccatgtcaccccatccctgacctccagaaacaaacaatcatttgccattttaaaggacctacactaaatgagcaacagaagagctctcccacccaccaccgactccatgcctgttttcagcattgtagggaggaagagtcccggccctggctgatggctctcagctcctgggatcaggtggcaatggagggtcatgtctcggcttcattgacttcttgcatcgtaaggctcctcttatgagacaacctttcctctcaggcccttaggtccaagtcccctctctcagctttctctgagacctca

SEQ ID NO: 145992 - DNA, 2392 bp, Homo sapiens
  Payload ID: 8945
  Gene Symbol: KIAA1456
  Gene Name: KIAA1456
  ENST ID: ENST00000528753
  CDS Start-End: 924-1106
aggcgccgcaggcctgggttcccggacagctgagcccgagcgccgcctcccgaaaggtgaaggcggcccggggaggcggggacggtgacgggggcgggggccgcgggcggtctcccgacggctgtcgcggggccagcccaaagcccccgatccccggtagctgcgcttcccgcgcggggcgccggagtagggcgggccaagctggcctgcggccgcggcgggaagaagggctagcgaagcacccccgaccgggcccaggcgccggacgccggggggcgcctcgctgcaacttctctttggaagccccgacacgagccccggcccgcgcgcgcgctcccccacggccacgcgcgcaccctgccgcccgcacccccgcgcgccctccgtctattttttcctcttcctttcatcctcacactctaaaataggtcaaggggtggaagttacacctggtgcagccctcggctctgatgcaaaagcagcttttgcccctggctgcgggacagcgctgtgactactcgcaacgggagagctgctgccagtcgccacaccgtgcggaaagcgccggcgaccggagcactgacaatggtctgcataggggagcggagagaagcttctgttgcgccctagatccgctgcctcggcgcccgcccgcagggaggagggggcgcgacaggtcgtctagcgcgtgccccggagcccgcgcccgggtctggccgcctggggcctgtgcttccttcagagactcacacaagaggtttatcatgagaaggaccgcactatttcatttcactcctacaagttttcatttacgttacacattgagaaagttatgagaagcaactgtcactctctggaggtggagactgccgtgattcacaaagacaagaggtaattttcctgtaatcacaggatgactcaggatggatcatgaagccgcccagctggagaagcagcatgtgcacaatgtgtacgagagcacagccccttacttcagcgacctgcagagcaaagcctggcctcgtgtccgccagttcctgcaagagcagaagccaggcagcctcatcgctgacataggtaaccaggcagcctcatcgctgacataggtaaccaggcagcctcatcgctgacataggtaaccaggcagcctcatcgctgacataggtaaccaggcagcctcattgctgtcataggtaacccagcactgggccgtgtagcatgaaataccttccattgagcctttgcttttcacattgatttttcatttttgttctaataggaatcctgaaattgcacccttggcatgccagtacctagaatattcattttacagcagaaactcgagacagtcaagtcagcagcaagtaaaaaactttctcaaacttttattttatttttattcttttgagatggagtttcactcttgtcaaccagattggagtgcagtggtgcaatctcagcttgctgcaaactccgcctcccaggttcaactgattctcctgcctcagactcccaaatagctatgattacaggcacccgccaccacgcccagctaatttttgtatttttagtagaaacggggttttgccatgttggccagactggtctcaaactcctgacctcagatgatccatctgtctcggcttcccaaagtgctgggattacaggcttgagccaccgtgcctggcctcaaactttacctttagacagtggctcttcagggcctttgtgtacatcctccaccaaaacggacctgacattgattgactaaatcaggatggaaatgatggcttgtgaaactaaccgttgtaaatttaaagatattcacatttgccaaatgtgttctcctctggtggctcactttgagtggctcacatgccttctatagaattgtgggattatggaagaggtccagtaatatcttatgaatctcatgggtcctttcctttaattattctataggtgtttcattataggagcgcatctttaattagacagtattttaataataacttatttgtctggaggacgttggttcagtatcttcgtaaatcaagaactggtaaaccacagcttagtagatctaggactaagacttaaaatgtggttggaatctcactcaaggcctacccacctaaaactgcgttctagcaattgcatgctgactgcacctatgagtcgtaagtctgtagttgcaaagtgtgtctagtttgatattctttctaaatactggtaagagaaacagacataccagaacttgtggcttgctgaagatggtatgagtaatgtggaatctggggaaggggtgcatgtcacatggaaattgggagtctttgaaaaatatctctatcctgtaaattaaaaaataataaatctagtttcggagtgtgca

SEQ ID NO: 145993 - DNA, 1982 bp, Homo sapiens
  Payload ID: 8945
  Gene Symbol: KIAA1456
  Gene Name: KIAA1456
  ENST ID: ENST00000400069
  CDS Start-End: 515-697
aaattaagtgagaagagccgcgctaaagccaagcgtcgtcgtcacccaaggtcaaggggtggaagttacacctggtgcagccctcggctctgatgcaaaagcagcttttgcccctggctgcgggacagcgctgtgactactcgcaacgggagagctgctgccagtcgccacaccgtgcggaaagcgccggcgaccggagcactgacaatggtctgcataggggagcggagagaagcttctgttgcgccctagatccgctgcctcggcgcccgcccgcagggaggagggggcgcgacaggtcgtctagcgcgtgccccggagcccgcgcccgggtctggccgcctggggcctgtgcttccttcagagactcacacaagaggtttatcatgagaaggaccgcactatttcatttcactcctacaagttttcatttacgttacacattgagaaagttatgagaagcaactgtcactctctggaggtggagactgccgtgattcacaaagacaagaggatggatcatgaagccgcccagctggagaagcagcatgtgcacaatgtgtacgagagcacagccccttacttcagcgacctgcagagcaaagcctggcctcgtgtccgccagttcctgcaagagcagaagccaggcagcctcatcgctgacataggtaaccaggcagcctcatcgctgacataggtaaccaggcagcctcatcgctgacataggtaaccaggcagcctcatcgctgacataggtaaccaggcagcctcattgctgtcataggtaacccagcactgggccgtgtagcatgaaataccttccattgagcctttgcttttcacattgatttttcatttttgttctaataggaatcctgaaattgcacccttggcatgccagtacctagaatattcattttacagcagaaactcgagacagtcaagtcagcagcaagtaaaaaactttctcaaacttttattttatttttattcttttgagatggagtttcactcttgtcaaccagattggagtgcagtggtgcaatctcagcttgctgcaaactccgcctcccaggttcaactgattctcctgcctcagactcccaaatagctatgattacaggcacccgccaccacgcccagctaatttttgtatttttagtagaaacggggttttgccatgttggccagactggtctcaaactcctgacctcagatgatccatctgtctcggcttcccaaagtgctgggattacaggcttgagccaccgtgcctggcctcaaactttacctttagacagtggctcttcagggcctttgtgtacatcctccaccaaaacggacctgacattgattgactaaatcaggatggaaatgatggcttgtgaaactaaccgttgtaaatttaaagatattcacatttgccaaatgtgttctcctctggtggctcactttgagtggctcacatgccttctatagaattgtgggattatggaagaggtccagtaatatcttatgaatctcatgggtcctttcctttaattattctataggtgtttcattataggagcgcatctttaattagacagtattttaataataacttatttgtctggaggacgttggttcagtatcttcgtaaatcaagaactggtaaaccacagcttagtagatctaggactaagacttaaaatgtggttggaatctcactcaaggcctacccacctaaaactgcgttctagcaattgcatgctgactgcacctatgagtcgtaagtctgtagttgcaaagtgtgtctagtttgatattctttctaaatactggtaagagaaacagacataccagaacttgtggcttgctgaagatggtatgagtaatgtggaatctggggaaggggtgcatgtcacatggaaattgggagtctttgaaaaatatctctatcctgtaaattaaaaaataataaatctagtttcggagtgtgc

SEQ ID NO: 145994 - DNA, 9265 bp, Homo sapiens
  Payload ID: 8946
  Gene Symbol: KIAA1462
  Gene Name: KIAA1462
  Uniprot ID: Q9P266
  ENST ID: ENST00000375377
  CDS Start-End: 103-4182
gcggcggcggtggcggcgcgaggcggcatgagggagccgctcgtgctgggtcctgccaccaccatggttccagtggttgagctttgctgaagcccaggcatcatgtacagtgtagaagacctcctgatctctcatggatacaagctgtcaagagaccccccagcatcacgcgaggataaccccaaggggcgccaggcagcgaggactgggacacgagcaggccagggcctgcagaacgggcatgaggatggccctgcggccctcgcacatcgtaagacgtccgcggggaaaggacatgtgagtgactccgaaagccgccgcagcacaccgagaggccacggggagccccagagcacttctgcttccagaacctcggaggcggggttttgtaatcaacccccctcagcatggtcctctcatcccccgactggtaacgaccaagcctaccggagaagaggacggcaagaagccaggagccagaagccgagggagcacgaaaacctggaggccagaggaatggcccaagcccacagcctgcctgtccacgtgagggagggtccatgggaagttggaggaaggtcagagcatgtgatgaagaagccagtttgggaagaagaattgcgaatgtcaggtcctgccaagtggcagaacgtcagcctggaaagctggaaccagccaaggaaattagggaggcagatgtctgatggagatggggagagactgtttcaagacctgtacccattcattcaaggagaacatgtgttgaattctcaaaacaaagggaagtctcgctcactgcctagagttctttcccccgagagcctgagttgcacggaaattcccattccattaaatgaaagacattcacctaaaatgccaccgtatcctcccacttgcgcaccaaatttggactccacgaggaattctgagaagagtggctgctcagccccatttccccggcctaagtttgggaggcccctcaagcccccatcttacagctcgcaccagcagtctaggggaggagcggacagcagtgactctcaggacagccagcagatggacgcctatgtccccaggcatgagctctgcctgtcagaccctggattggaacctccagtgtacgtgcctccgccctcatacagatcgcccccgcagaacatcccaaacccctacttggaagacacggtgcccataaatgtgtgtggcggtcacagtcaacagcagtctccgaccgagaaggctggggccagcggtcagcctccttcaggcccccctggaactgggaatgagtatggtgtgagcccccgcttgcctcaggggctccccgcacatccccgacctgtcactgcctatgacggcttcgttcagtacattccctttgatgatccacggttacgacattttaaactagctcagccccagggtttctgtgaagacataaagcttgacgataaatcatataactccagtcctgtcactgctcaagagccggctcatggaggaatgcagcctgatggtgccatttggaatccacagagcttaatacccccgtcgggggatgagagaggcctggtcttggccgattccagcccccggtggctgtggggccagccccccggggatggggaaaacagtggcctccccaaccagagagaccgctgtgtggcaaggggacagtggcctgatgtgagaggcagccagcacgggcacactggaagacaagtttcctccccttactcacagggcgagagcacctgcgaaactcaaaccaagctcaaaaagttccaaactgggactcggaccaagaaaagttcaaagaaaaaaatgaacgagactatattttgcttggtttctatcccagtgaaatcagaatcacatctgccagatagagatatggacaacaatgacttaaagcccagtgctgatcaaaagaatgggtctgataagagcccggctctgcaagaacagagtctgctgagcatgtcttccaccgacctggagctgcaggccctcacaggaagcatgggtgggagaacggagttccaaaaacaagatctaggggaaccagaagaagacagacaaacaaatgacctcagtttcatccaccttacaaagcacagagaactcaagcattctggctcttggccagggcaccggtacagagatcagcaaacacaaaccagtttctccgaggagccccaaagttcgcagctgctccctggtgcaaagctgggagggccgagtcgtgcagcattgagtccaaaatgttcagaccctgctgcctccgaagctcagacgcacacagcattccctaccggtgatcacaaacagaggccaagtgcccgtaacctgaaaggtcacaggtccctcagcccatccagcaacagtgcgttctcaaggacttccttgtccgtggaccaggcaccgacgccaaaagcaggccgaagtcagccctgcgtggatgtccacgggcttggagcccaccctgggcctaagcgggaggtggtgaagggggagcccacgggcccttgcaacagtaaacaactctttgggcagtttctcctgaaaccggtcagccgtcgtccctgggatttgatcagtcagttagaaagttttaacaaggagctccaggaagaggaagaaagcagcagtagcagcagcagcagcagcagcagcagtgaggagagtgaggcggagccgcagcaggagaaccgtgctcactgcagacaggaggatgtgggcttccgcggaaacagcccggaaatgagggttgagccacagccgaggatgtgggtgccggagagccctgtgtgtaggtcgggaagaggtgagagtaagtctgagagctggagtgaggagctgcagcctggccacccacgtgcctggcctccatccccgggccgctttcgcgtggaagaaggtggcggtgcacctttctgctcagcagatggaagcacgagtgcagagaagagacacctggaggttagcaacggaatggacgagctggcaggtagcccatttcctgtgacgagaatgtcttcaagatcaagtgacgcaaaaccactgcccgcgtcctatccagctgaacctagggagccccaggaaagtccgaaaatcaccagtgctttcagctctgtgaaaccaagtgaagcggtccctcggaagtttgacagtggtggagagaggggggcagggctcccactgtccctgtctaacaagaaccgagggctctcagctccagacttacggtctgtggggctcacccctgggcaagaacagggtgccagtgagctagaggggtctttgggtgaagcaagcacaatagaaatccccccaggtgagtccttgcaagccagggctgcaaggatcctgggcattgaggtggcggtggagtccctcctgccgggcatccggagagcgggacagaaccagcctgctgagcccgatgcaagtgcctgcaccccagagtccccccaggaagagttgctatctcgcccagcaccggcagatgtccccagggtgtccactgatgccttttatggcaggaggaagtgcggctggaccaagagccctctctttgtaggggacagggacagtgccaggcgggctcctcaggcttttgagcactcagatgtggacggggttgtcaccagcacagaccctgtccctgagcctgagcccagccccttggagtccaagttcttcgaacaaaaggatgtggaaacaaaaccacccttcaggtccactttattccattttgtagaaagaaccccaagtgtggcaggctctgaaaagagacttagaagcccttccaaagtgattgaaagtttacaagagaaactggcctccccgcctaggagagcagaccctgaccgcctgatgagaatgaaagaggtgagctcagtgtcacggatgagagtcctgagcttcaggaatgccgactcccaggaggacgccgaggaattgaaggccaccacaaggggccaggccgggctcccgggaggccttgtgtctcctggcagtggggaccgtgcccagagattgggccactcactctctgtgtccaaggacagcatctccagggaagagaaggagcatccggcagcacaaaaggagaagagcatggatcaagacttctggtgcccagattcctatgaccctagcagagtggagagggtgtgatgaaatgccggtggagcttgcattccgttgcgaattgagtattctcaagtagctggtagatttagtctatcagccccacttccccatgtagaagctggaagctgctgagtttttagcatcctgataacattctttaccactgccactaggaaacttgccatcctctcagaattgctttgtggcgataaagcaatcgtccgttgaaaccatctgtttttatagcatgaagatttaatgcctataattaggaaggagttttcacagaaaccctccctcatgacagatttgactaagctggtaaatagtttggtgttgctctcattctgggtgaagatttcaatgtggaagatctagcaaatgctttggaaaggcctgtgaatggtgtgctcccctctgtgtctccatggcctgcagtccatgctcttgtgaaggagtttgggacactggctgttgcccggtgtttcagcactttcagtttaggggaaatgtgaatcaataggtatgatccatttctaatcaatttggccttctgctgctggaagtaactttacttataagtaacttgccatcagagaataaaagcaatatcttttaagttcctgaaaaattaaaacttgtactgtaatatactaagagtattatttatctggcagtgaaatattttgatcatttgcaaacacgccattgtctgctttgcactcagtattatctatttttattttctgtatgggtatttagaaattctttatatgaaaaataattgctggtttaaaatagaccattttaacaaagtgactatatttctttttacgaaaatgctatttttctatgatgtaaacaattgttaggcggcagatttttaaggaagtattattttatttaagagtctgtatccctttgtgtgagaggaacccaaagagggttcacttttgctttaaagctctgtcccttacccactgacaactctgctacttttattttatcttagaaaatgtcaatatagacatatcacagggttaataaaagaaacttttcacaaagatttttgtacaagtgtagctatcaggttatatttgaaaataaccctctgaaaaccagccaacattgtcatgacaatttttgctgccgtatcaactagaattaccaaaaaacatagttttatctttgtatgtgtgtggggatctaccctgagaccatgcttttcttcccaccctgccaccccacccctttaaagaaatacgtatttttatctagaatgatcttgaattagtctctgcatatttttagaaagtgcttggggacattatatatatgccattacaaaagcattatgaggcctatgtattctactgtgtttaatactgcattaacctgcacaaagtttatgcattttttcatgcatttttttccttctttctaagtaaggtattcctgacaactaacattccctaaatcatttcccctccctccctccctccctcccttcctttcttccttccttctgtcctccctcccttgctacctcttgccctccttccttcaccctgtcctccttttcccttttattttttccccttctctttcattttattttcttttagagaaaccaccttatctatttttagacatttcgaattcctaaaatgtgaaccgttgggtgatctgtcctttggccctaaaacggctggccgggctgtcccggcctgttctcatctgtaccgtatgattttatttcataataactttatgtatttggactgtaacaaacaaaacagaacctaagtcgccccgaaaaatctttccaagccttttcaaaacacttatctgcagtccagaattcagctcttatgaaaagtgagagtgcactccagttttcacagcagcaataagtgcgggaaacaaaaagatcctcttcccaggaaaagttgagtggggaagagttcagacactgttgtagctggtgaatcattgaagtcacctggtagtaccaaataagggctgaggcgcctggaggtctttgtggggtcttccctctttaaatgcaaacgtaagaaggtatatgtgtatatacatttatatacgtgcacatgtatactcgtacatgtatgcacacatacccatacatgtatatgaactccgttctgatttcctctgaaattttgttgataccatctaaatacctctttgaatcaaaataacttaattttagctcattcctcaagagaaagagaaggatccccaaggaagaaaaactgttgtaccttctgtgattctcaaaccaaaatgtgatgcgcttctgttttgttatcttaaattgttgtatcatatctttctgaaaccattctgaattaagttgaaattttcaacatttatactttaactgttctaaatttaagcctacatgtaaatcttttttggggggaaggtaacttgaaaagtttaacttgaaaatttgacctttaaactttcatattctaaggtaaataatagcctataaccaacaacagctttcccagaggtcttgaatttaacactaattgtttagttattgtttctatttctcatacatacataacttcgttttttgtggctggaagaaaaagtttctatattttgtatttgtctttgttcttctcatgcacacaatttactgttggtgtttaataatttggagctcataaaattaaaagttgtaattttgaccatttgggctaaaaattatatgagggattacatatgcaatggattagtatttcttgatttgcaaaagaagggaaaatgatggtaatttagctcaaattgcctttctttgaagaaaatttctgaatgactgaaaaccaaatatctatattatcactttcaacctcatgtttctgcaaagtacagaaaaactcctcactgacagtgcacccagcccctgactgggttttcaggattatgtccatgtgcataactgcttggatttcttcttttaaagtccctaaaacatgaatctgttctttgagatcctggtttccttagcagagttgtaggttgcgggtttcattcacgtggaaattctaagtagaacttttgctgccccattttactgttggtgaagggccgttgttaatggaagtttacgttttaaaactcagatgactcagaaaccagactgtgatcattttttgcagcagcaaaatgacttattctgacagcatctcggtttggggcttctgaagaaaaaggatgaagctgatctgttgaaacaactactttcccaactcggaggcaaaaggggctgatagaagataacattcacctaccatttcatcttgtgacccccagagatcacgtttgcgtgttctggctgagttttttattattgtttgttttaaatgattaaataatacacaattaaatgtcaggatagcatctcttgcaaagtgaccagtgcagcagaattgtctttctatccatatttgagcttagagaaacatttcccatgtcctaagttcttagaagcaattactttagcgttggggagcattgttctaccagacccatttatgcaggggagatgaagcttaaaagacgggatgtggggtgggagtgtgtttcttaagccgaagctgttgcaggctgggggatttttgcattttctttttgttttgtttttgactgcagattctgtacatctgtctgtgggaggagagttgctactcaggacaggatttaagagacacattccagtgacctttaagaatctgcatggcgggaggtccttctccaggagtgtgggttggtccactctgggacccaccacactaagaagggggagatgataaaataacattaaaggaagaatggcctccagcctgcaggttttgttggaaagaaataaaaagggagtcattaagaccataaattcagattgaggcctcttgaaaaggttgatgtgggctagcaacctgcctgtcgaaacagtccttggttcatcagcagtgtgggaaggcagccaaggctcctgcagattcctggcatcgaccttggaaagcctctgcgatacttgtgtgtacgaatacagcagaggacagggaggtccttgttctgtggtctctgtttagtgactgaaacttaaacccaaaggcaagcccagattgtctggccgttcatccccatgctttgataggggttaggaggaaccctttccgtatgaaagacaggccctactagggcttacaaccaagccaaaggaccatctcttctttcttccacctcccttcacccctgccccgcagcagagccgagatgtgagacattcattgtcacggagcaaggagacaaaggcaagttcaagttgagaagcatatggcagcaaacagaaatgaaaaccatatgtcccagcaaggggaaaagcagtcatttccagattataaaaatcaatgaagtactctccacctaggtcagctgaaattcgagccctcacagtcaggcctgtcagagaagttaagcagaaacatctcggggggacttctaaaatttagtgaagacaaggccttgcaactccaaagaaactttttttcccccccttgaaacagggtcttgctctgttgcccagcctggagtgcagtggtgcagtcacggctcactgcagcctcaagctcctgggctcaagcactatccccacctcaacctccttagtagctgggactacaggtgcacaccaccatgcccagctaaccacagaaactttcatctcttcattttttctttgggcaccattaatacctaagacaggtagaaagggtcccagaaagacaccattggtaatggccgattgccggctgcagtcatcgcccccagatcaggctggtacaggatgccttaaggtgatgagaggtgagggtgcatgaagaataatgagcacagggaagagagaagcaggacaaagtagcagataaaatgccggcaaagcacagatgaatgtcttcaagaagctcttgtatttctctgcacagtgtaaatatccttgctatttcaggatggcggctggcctgctcagtaacatacatgttccaaataaagattttgcatgaaagta

SEQ ID NO: 145995 - DNA, 5579 bp, Homo sapiens
  Payload ID: 8947
  Gene Symbol: KIAA1468
  Gene Name: KIAA1468
  Uniprot ID: Q9P260
  ENST ID: ENST00000256858
  CDS Start-End: 249-4001
tctcgcgagactggagaccaggaagacgcctgcagagccgggctgctggtgcagcagaggctgaggcatcaggtgcagctgcatccggatctcctgccttggagcgtactccttgtctctaagtcgggaggcaggacgtggtcaggccggggctgtggaggtgcgctgtgtcccctgaggcctagaggattcgggctgcggcccgtcggaaccagtcagggaggcgcccacactcctgacaggataagatggcggcgatggcgcctggaggtagtggcagtggtggcggcgtgaatccatttctcagtgattcggatgaggacgatgacgaggtagctgcaacagaggaacggcgggcagtacttcggctgggcgccggaagtggcctagatcctggctctgcgggctcgctgtcgccacaggatcccgtggccttaggaagcagtgcgcggccagggctccctggggaggcgtcggcggctgcagtggccctggggggcaccggggagaccccggcccgattatcaattgatgcgatcgctgctcagctgttgcgcgatcaatacttgctgaccgccctggagctgcataccgagctgttagagagtggccgggagctgcctcggctgcgcgactacttctccaatccaggcaacttcgagaggcaaagtggaaccccgccggggatgggggcgccaggggtccctggagcagccggcgttgggggcgctggaggtcgggaaccgagtacagcgtcgggcgggggacagctcaatcgagctgggagcattagtacccttgattctttagactttgcaagatattcagatgatggtaacagggaaacagatgaaaaagtggcagtcctggagtttgaactacggaaagccaaggagaccattcaggccctccgagccaacctgacaaaggccgcagaacatgaagttcctttacaggaacgaaaaaattacaaatcaagtcctgaaattcaggagccaatcaaacctcttgaaaagagagctctaaacttcttagtcaatgaatttttattgaagaataactataagcttacatcaataaccttttcagatgaaaacgatgatcaggattttgaattatgggatgatgtaggattaaacattccaaaacctccagacttattgcaactctaccgggattttggaaatcatcaagtaactggaaaagatcttgtagatgtggccagtggagtagaagaagatgaattagaggcccttacaccaattataagcaaccttcctccaactcttgaaactccccagcctgcagagaactccatgttagtacagaaattagaagataaaattagtttgttaaatagtgagaaatggtcattgatggagcaaatcagaagacttaaaagtgaaatggacttcctcaaaaatgaacactttgccatcccagcagtttgtgactctgttcagcctcctttggatcagttgccccacaaagactctgaggacagtggacagcatccagatgtaaatagttcagacaagggaaaaaacacagacatccatctttcaatatcagatgaagctgattccactattcctaaagagaattccccaaattcattccccaggagagaaagagaaggaatgccaccttcttctctatcaagtaaaaagacagttcattttgataaacctaataggaaattgtctcctgcattccatcaagcactactctctttttgtcgaatgtcagcagatagtcgtttaggatacgaggtgtctcgtattgcagacagtgaaaaaagcgttatgttaatgctgggacgctgcctgccacacattgttcccaatgtgctattggcaaagagagaggagttgatccccctcatattgtgtacagcatgtctacatcctgagcctaaagagcgagatcagcttctccacatacttttcaatttgatcaagaggccagatgatgagcaaaggcaaatgatactgacaggttgtgtggcatttgcgcgtcatgttggaccaacacgtgtagaagctgaacttttaccacagtgttgggaacagattaatcacaaatacccagaaagacgactgcttgtggcagaatcctgtggagcactggcaccttaccttcctaaagaaatccgtagctccttggttctttcaatgttgcaacaaatgttaatggaagataaggcagatttggtaagagaagctgttatcaaaagccttggtatcattatgggatacattgatgatccagacaaatatcatcagggttttgaattgttgctgtcagccttgggtgatccctcagaaagagtagttagtgctacacatcaagtatttttaccagcttacgctgcgtggactacagaacttggaaatttacagtctcatcttatacttacactactgaacaagattgaaaaacttctcagggaaggagaacatggactggatgaacacaaactccacatgtatctttctgccttgcagtccttgatcccatctctctttgcattagtgctacagaatgcacctttctccagcaaagccaagcttcatggtgaagtgccacagatagaagtgactaggtttcctcggcctatgtcgcctcttcaagatgtgtccactattatcggaagtcgtgagcaattggcagtgctgctgcaactttatgactaccagctagaacaagagggtacaacaggctgggagagtttactgtgggttgtcaatcaattgttgccacaacttatagaaatagttggcaaaattaatgttacttcaactgcctgtgtccatgaattctccagatttttctggcgcctttgccggacatttggcaaaatttttacaaacactaaggtaaaacctcagttccaggagattttaagactatctgaagaaaacattgattcctcagcaggaaatggggtcctcactaaagctacagtccccatttatgcaacaggagtccttacgtgttatattcagataaaggagtatttgcatatacataatgagatatcttgggaatgggacccaagtctaaacacaaaatgtgtttcatatacacattatacacatagcctgaaggaagaagaccgaaaactgttagttggattcttagaagatgtaatgacgctgctttcattatctcatgctcctcttgatagcctgaaggcttcttttgtggaattgggtgcaaacccagcctaccatgagttactattaactgttttgtggtatggtgttgtccatacttcagcactcgtgaggtgtactgctgctagaatgtttgagctgttggtgaagggggtgaatgaaactctggtagctcagagggttgttcctgctctcattactctctccagtgaccctgaaatctctgtcaggattgccacaattccagcctttggcactattatggaaacagtaattcaaagagagttgctggaaagagtgaaaatgcagttggcttctttcctggaagatcctcagtatcaagaccaacattctttgcatacagagatcataaaaacatttggtagagttggccctaacgcagaacccaggttccgagatgagtttgttataccacatttgcataagttagccttggtgaacaacttacagattgtggattctaaaagactggacattgctacgcatctttttgaagcctacagtgcactttcctgttgtttcatttcagaggatttaatggttaatcactttttacctggtctcagatgtttacggactgacatggaacatctctctccagagcatgaggttattttaagttccatgataaaagaatgtgaacaaaaagttgaaaacaagaccgtccaagagcctcaaggctcaatgtcaattgctgcaagcttagtgagtgaagatacaaagaccaagtttttgaacaaaatgggccagttgacaacatcaggtgccatgttggccaatgtatttcagagaaagaagtagaagcaggaaagaagcccccagtaaacactaagatggacctcaagccgactggttccttgtacttgaagtacttgccttttttgtttcctcagttttatgttcttgcattataattttatcctaacctccaaagatatttgcactgcttttaattactgctgtatatttgttgattttggagttacaactgtggtgatagaaaattgagttgatggtctgtaccaagtcccttgtctatgttcttgtctttcagaataatttttatataaatatatatatagtgaagaagttttttttaatttttggatgggatattcgcaaatatctgtattatacactaagctattacaatggtacttaaaataatgtaaatttgaagtcattgttataaaataataaagtggagattacttaagtatttaaattatgaaagaataatgcagactttttattgtttcttaactgactagaaagagccaccagcattactctgtgccttttggacatcagtttgtgtgttctgtaggaattgtgtgcattccattcacacagtatttctttaggatgctgtgatgatttgaattacaaatcctacagtcaatagctaaagacgaaaccttcatttcagaactctcatgaatattctttaagtgctatttaaacctccccagcacttagatgcatataatggacttacctgaggaaagacagcacataggcatggggagaggtaaccaaggtgaattttacaaactggtgtatagtagatttaaatgctcaaaaataaatgtaactgagaagagttaataattgtgagatttttcccaaattgagatacagaagaaaatatagtttgaatctgaaatttaacacttatttatgtaaaacactttatttaagatattttctaatgattttaattttagagagtaccttttcattctgtgtgttacagagaagtactgaaaagttaaggacacttgggggctacttttttccctctaaactaaaaaagacattggctgaattataactagttagttatcacctcgtcccttaaagtcagtgacctcctgtgtttgatgtatattacatagagtcttaagtcagtgtacagttccactggaatttgacagttgtctctacagtcatgcaactcgaagtagaaaagagtgctggacataggaagggggtgcttggtttgaggggttaatgtgaggcctttttgaaaaatgaatattttgataaaaagaattcttgttttagcacagttgatgcacataagtgattctcatatttgttgtataaactggtttaatacatttggaacatagttggattacattcatttcctgggaaagctagcttaccatacattcaagtttataaaacaatttgccataggcaaagccatttaaaaagttcattctgaaattatttcatttacctacagtgaaataattgtgaactaagtagtctttctgaaaactgttgggttctaggcattcctgagaaattgaaagtggctacctttcatgtcaaaaatgttgatctattataaataaaatgtttttgcat

SEQ ID NO: 145996 - DNA, 6178 bp, Homo sapiens
  Payload ID: 8947
  Gene Symbol: KIAA1468
  Gene Name: KIAA1468
  Uniprot ID: Q9P260
  ENST ID: ENST00000398130
  CDS Start-End: 233-3883
accaggaagacgcctgcagagccgggctgctggtgcagcagaggctgaggcatcaggtgcagctgcatccggatctcctgccttggagcgtactccttgtctctaagtcgggaggcaggacgtggtcaggccggggctgtggaggtgcgctgtgtcccctgaggcctagaggattcgggctgcggcccgtcggaaccagtcagggaggcgcccacactcctgacaggataagatggcggcgatggcgcctggaggtagtggcagtggtggcggcgtgaatccatttctcagtgattcggatgaggacgatgacgaggtagctgcaacagaggaacggcgggcagtacttcggctgggcgccggaagtggcctagatcctggctctgcgggctcgctgtcgccacaggatcccgtggccttaggaagcagtgcgcggccagggctccctggggaggcgtcggcggctgcagtggccctggggggcaccggggagaccccggcccgattatcaattgatgcgatcgctgctcagctgttgcgcgatcaatacttgctgaccgccctggagctgcataccgagctgttagagagtggccgggagctgcctcggctgcgcgactacttctccaatccaggcaacttcgagaggcaaagtggaaccccgccggggatgggggcgccaggggtccctggagcagccggcgttgggggcgctggaggtcgggaaccgagtacagcgtcgggcgggggacagctcaatcgagctgggagcattagtacccttgattctttagactttgcaagatattcagatgatggtaacagggaaacagatgaaaaagtggcagtcctggagtttgaactacggaaagccaaggagaccattcaggccctccgagccaacctgacaaaggccgcagaacatgaagttcctttacaggaacgaaaaaattacaaatcaagtcctgaaattcaggagccaatcaaacctcttgaaaagagagctctaaacttcttagtcaatgaatttttattgaagaataactataagcttacatcaataaccttttcagatgaaaacgatgatcaggattttgaattatgggatgatgtaggattaaacattccaaaacctccagacttattgcaactctaccgggattttggaaatcatcaagtaactggaaaagatcttgtagatgtggccagtggagtagaagaagatgaattagaggcccttacaccaattataagcaaccttcctccaactcttgaaactccccagcctgcagagaactccatgttagtacagaaattagaagataaaattagtttgttaaatagtgagaaatggtcattgatggagcaaatcagaagacttaaaagtgaaatggacttcctcaaaaatgaacactttgccatcccagcagtttgtgactctgttcagcctcctttggatcagttgccccacaaagactctgaggacagtggacagcatccagatgtaaatagttcagacaagggaaaaaacacagacatccatctttcaatatcagatgaagctgattccactattcctaaagagaattccccaaattcattccccaggagagaaagagaaggaatgccaccttcttctctatcaagtaaaaagacagttcattttgataaacctaataggaaattgtctcctgcattccatcaagcactactctctttttgtcgaatgtcagcagatagtcgtttaggatacgaggtgtctcgtattgcagacagtgaaaaaagcgttatgttaatgctgggacgctgcctgccacacattgttcccaatgtgctattggcaaagagagaggagttgatccccctcatattgtgtacagcatgtctacatcctgagcctaaagagcgagatcagcttctccacatacttttcaatttgatcaagaggccagatgatgagcaaaggcaaatgatactgacaggttgtgtggcatttgcgcgtcatgttggaccaacacgtgtagaagctgaacttttaccacagtgttgggaacagattaatcacaaatacccagaaagacgactgcttgtggcagaatcctgtggagcactggcaccttaccttcctaaagaaatccgtagctccttggttctttcaatgttgcaacaaatgttaatggaagataaggcagatttggtaagagaagctgttatcaaaagccttggtatcattatgggatacattgatgatccagacaaatatcatcagggttttgaattgttgctgtcagccttgggtgatccctcagaaagagtagttagtgctacacatcaagtatttttaccagcttacgctgcgtggactacagaacttggaaatttacagtctcatcttatacttacactactgaacaagattgaaaaacttctcagggaaggagaacatggactggatgaacacaaactccacatgtatctttctgccttgcagtccttgatcccatctctctttgcattagtgctacagaatgcacctttctccagcaaagccaagcttcatggtgaagtgccacagatagaagtgactaggtttcctcggcctatgtcgcctcttcaagatgtgtccactattatcggaagtcgtgagcaattggcagtgctgctgcaactttatgactaccagctagaacaagagggtacaacaggctgggagagtttactgtgggttgtcaatcaattgttgccacaacttatagaaatagttggcaaaattaatgttacttcaactgcctgtgtccatgaattctccagatttttctggcgcctttgccggacatttggcaaaatttttacaaacactaaggtaaaacctcagttccaggagattttaagactatctgaagaaaacattgattcctcagcaggaaatggggtcctcactaaagctacagtccccatttatgcaacaggagtccttacgtgttatattcaggaagaagaccgaaaactgttagttggattcttagaagatgtaatgacgctgctttcattatctcatgctcctcttgatagcctgaaggcttcttttgtggaattgggtgcaaacccagcctaccatgagttactattaactgttttgtggtatggtgttgtccatacttcagcactcgtgaggtgtactgctgctagaatgtttgagctgactcttcgaggcatgagtgaagcgttagttgacaagcgggttgctccggcccttgttaccttgtccagtgatcctgaattctctgtcaggattgccacaattccagcctttggcactattatggaaacagtaattcaaagagagttgctggaaagagtgaaaatgcagttggcttctttcctggaagatcctcagtatcaagaccaacattctttgcatacagagatcataaaaacatttggtagagttggccctaacgcagaacccaggttccgagatgagtttgttataccacatttgcataagttagccttggtgaacaacttacagattgtggattctaaaagactggacattgctacgcatctttttgaagcctacagtgcactttcctgttgtttcatttcagaggatttaatggttaatcactttttacctggtctcagatgtttacggactgacatggaacatctctctccagagcatgaggttattttaagttccatgataaaagaatgtgaacaaaaagttgaaaacaagaccgtccaagagcctcaaggctcaatgtcaattgctgcaagcttagtgagtgaagatacaaagaccaagtttttgaacaaaatgggccagttgacaacatcaggtgccatgttggccaatgtatttcagagaaagaagtagaagcaggaaagaagcccccagtaaacactaagatggacctcaagccgactggttccttgtacttgaagtacttgccttttttgtttcctcagttttatgttcttgcattataattttatcctaacctccaaagatatttgcactgcttttaattactgctgtatatttgttgattttggagttacaactgtggtgatagaaaattgagttgatggtctgtaccaagtcccttgtctatgttcttgtctttcagaataatttttatataaatatatatatagtgaagaagttttttttaatttttggatgggatattcgcaaatatctgtattatacactaagctattacaatggtacttaaaataatgtaaatttgaagtcattgttataaaataataaagtggagattacttaagtatttaaattatgaaagaataatgcagactttttattgtttcttaactgactagaaagagccaccagcattactctgtgccttttggacatcagtttgtgtgttctgtaggaattgtgtgcattccattcacacagtatttctttaggatgctgtgatgatttgaattacaaatcctacagtcaatagctaaagacgaaaccttcatttcagaactctcatgaatattctttaagtgctatttaaacctccccagcacttagatgcatataatggacttacctgaggaaagacagcacataggcatggggagaggtaaccaaggtgaattttacaaactggtgtatagtagatttaaatgctcaaaaataaatgtaactgagaagagttaataattgtgagatttttcccaaattgagatacagaagaaaatatagtttgaatctgaaatttaacacttatttatgtaaaacactttatttaagatattttctaatgattttaattttagagagtaccttttcattctgtgtgttacagagaagtactgaaaagttaaggacacttgggggctacttttttccctctaaactaaaaaagacattggctgaattataactagttagttatcacctcgtcccttaaagtcagtgacctcctgtgtttgatgtatattacatagagtcttaagtcagtgtacagttccactggaatttgacagttgtctctacagtcatgcaactcgaagtagaaaagagtgctggacataggaagggggtgcttggtttgaggggttaatgtgaggcctttttgaaaaatgaatattttgataaaaagaattcttgttttagcacagttgatgcacataagtgattctcatatttgttgtataaactggtttaatacatttggaacatagttggattacattcatttcctgggaaagctagcttaccatacattcaagtttataaaacaatttgccataggcaaagccatttaaaaagttcattctgaaattatttcatttacctacagtgaaataattgtgaactaagtagtctttctgaaaactgttgggttctaggcattcctgagaaattgaaagtggctacctttcatgtcaaaaatgttgatctattataaataaaatgtttttgcatatgtttttgatttggtttgggctatgcattttactttcgttttgaaacactatactttctattaagcaaaaaaatgagaaaagcctatattcatgagaatatactaatattttgtaaatataatttatataaatttacctattttggtttatttttactaaaaggggaccatgttgctataaaactaatacatttcagaggtacctggaagaaaaatgtttaaactctgatttgcttcaaactatagtagaatatgtgtatgtttgttatcaggtgaatgggtagaatgtatttttattgtgaacatttttcttaattaatgaatatatttatttaagtgctaatgtttttttaaaggcaatagtaggcaagattcacagtgtatttcaagtgagagtctcttttcttaaatattttaatatcattaagatttcacattgtggttttgttttttgtttgtttgtttgtttttagtaaaatatgtcttgtctttacagacaagacagacactaatcattgagactgagatttggactgagtccaaaatagggcataaaactcccatactcattccttttaaacagaagtaaacttacggtacaagtttttaagtgttcaacttaatgaaaaactaagtttgcaaagtaatgaaaagctaatttgaaattatacctgtgtttccagagtaatccagagattaaattttttcagaaatcc

SEQ ID NO: 145997 - DNA, 764 bp, Homo sapiens
  Payload ID: 8947
  Gene Symbol: KIAA1468
  Gene Name: KIAA1468
  ENST ID: ENST00000588446
  CDS Start-End: 1-764
ctttctccagcaaagccaagcttcatggtgaagtgccacagatagaagtgactaggtttcctcggcctatgtcgcctcttcaagatgtgtccactattatcggaagtcgtgagcaattggcagtgctgctgcaactttatgactaccagctagaacaagagggtacaacaggctgggagagtttactgtgggttgtcaatcaattgttgccacaacttatagaaatagttggcaaaattaatgttacttcaactgcctgtgtccatgaattctccagatttttctggcgcctttgccggacatttggcaaaatttttacaaacactaaggtaaaacctcagttccaggagattttaagactatctgaagaaaacattgattcctcagcaggaaatggggtcctcactaaagctacagtccccatttatgcaacaggagtccttacgtgttatattcaggaagaagaccgaaaactgttagttggattcttagaagatgtaatgacgctgctttcattatctcatgctcctcttgatagcctgaaggcttcttttgtggaattgggtgcaaacccagcctaccatgagttactattaactgttttgtggtatggtgttgtccatacttcagcactcgtgaggtgtactgctgctagaatgtttgaggtatgtcaacacatgcctctgttggtttcaattataatgatttttttttttttgcgaagaagaagggaattttttttaataaaaaggctttgcatatca

SEQ ID NO: 145998 - DNA, 3268 bp, Homo sapiens
  Payload ID: 8947
  Gene Symbol: KIAA1468
  Gene Name: KIAA1468
  ENST ID: ENST00000587725
  CDS Start-End: 216-3268
agagccgggctgctggtgcagcagaggctgaggcatcaggtgcagctgcatccggatctcctgccttggagcgtactccttgtctctaagtcgggaggcaggacgtggtcaggccggggctgtggaggtgcgctgtgtcccctgaggcctagaggattcgggctgcggcccgtcggaaccagtcagggaggcgcccacactcctgacaggataagatggcggcgatggcgcctggaggtagtggcagtggtggcggcgtgaatccatttctcagtgattcggatgaggacgatgacgaggtagctgcaacagaggaacggcgggcagtacttcggctgggcgccggaagtggcctagatcctggctctgcgggctcgctgtcgccacaggatcccgtggccttaggaagcagtgcgcggccagggctccctggggaggcgtcggcggctgcagtggccctggggggcaccggggagaccccggcccgattatcaattgatgcgatcgctgctcagctgttgcgcgatcaatacttgctgaccgccctggagctgcataccgagctgttagagagtggccgggagctgcctcggctgcgcgactacttctccaatccaggcaacttcgagaggcaaagtggaaccccgccggggatgggggcgccaggggtccctggagcagccggcgttgggggcgctggaggtcgggaaccgagtacagcgtcgggcgggggacagctcaatcgagctgggagcattagtacccttgattctttagactttgcaagatattcagatgatggtaacagggaaacagatgaaaaagtggcagtcctggagtttgaactacggaaagccaaggagaccattcaggccctccgagccaacctgacaaaggccgcagaacatgaagttcctttacaggaacgaaaaaattacaaatcaagtcctgaaattcaggagccaatcaaacctcttgaaaagagagctctaaacttcttagtcaatgaatttttattgaagaataactataagcttacatcaataaccttttcagatgaaaacgatgatcaggattttgaattatgggatgatgtaggattaaacattccaaaacctccagacttattgcaactctaccgggattttggaaatcatcaagtaactggaaaagatcttgtagatgtggccagtggagtagaagaagatgaattagaggcccttacaccaattataagcaaccttcctccaactcttgaaactccccagcctgcagagaactccatgttagtacagaaattagaagataaaattagtttgttaaatagtgagaaatggtcattgatggagcaaatcagaagacttaaaagtgaaatggacttcctcaaaaatgaacactttgccatcccagcagtttgtgactctgttcagcctcctttggatcagttgccccacaaagactctgaggacagtggacagcatccagatgtaaatagttcagacaagggaaaaaacacagacatccatctttcaatatcagatgaagctgattccactattcctaaagagaattccccaaattcattccccaggagagaaagagaaggaatgccaccttcttctctatcaagtaaaaagacagttcattttgataaacctaataggaaattgtctcctgcattccatcaagcactactctctttttgtcgaatgtcagcagatagtcgtttaggatacgaggtgtctcgtattgcagacagtgaaaaaagcgttatgttaatgctgggacgctgcctgccacacattgttcccaatgtgctattggcaaagagagaggagttgatccccctcatattgtgtacagcatgtctacatcctgagcctaaagagcgagatcagcttctccacatacttttcaatttgatcaagaggccagatgatgagcaaaggcaaatgatactgacaggttgtgtggcatttgcgcgtcatgttggaccaacacgtgtagaagctgaacttttaccacagtgttgggaacagattaatcacaaatacccagaaagacgactgcttgtggcagaatcctgtggagcactggcaccttaccttcctaaagaaatccgtagctccttggttctttcaatgttgcaacaaatgttaatggaagataaggcagatttggtaagagaagctgttatcaaaagccttggtatcattatgggatacattgatgatccagacaaatatcatcagggttttgaattgttgctgtcagccttgggtgatccctcagaaagagtagttagtgctacacatcaagtatttttaccagcttacgctgcgtggactacagaacttggaaatttacagtctcatcttatacttacactactgaacaagattgaaaaacttctcagggaaggagaacatggactggatgaacacaaactccacatgtatctttctgccttgcagtccttgatcccatctctctttgcattagtgctacagaatgcacctttctccagcaaagccaagcttcatggtgaagtgccacagatagaagtgactaggtttcctcggcctatgtcgcctcttcaagatgtgtccactattatcggaagtcgtgagcaattggcagtgctgctgcaactttatgactaccagctagaacaagagggtacaacaggctgggagagtttactgtgggttgtcaatcaattgttgccacaacttatagaaatagttggcaaaattaatgttacttcaactgcctgtgtccatgaattctccagatttttctggcgcctttgccggacatttggcaaaatttttacaaacactaaggtaaaacctcagttccaggagattttaagactatctgaagaaaacattggaaatggggtcctcactaaagctacagtccccatttatgcaacaggagtccttacgtgttatattcaggaagaagaccgaaaactgttagttggattcttagaagatgtaatgacgctgctttcattatctcatgctcctcttgatagcctgaaggcttcttttgtggaattgggtgcaaacccagcctaccatgagttactattaactgttttgtggtatggtgttgtccatacttcagcactcgtgaggtgtactgctgctagaatgtttgaggtatgtcaacacatgcctctgttggtttcaattataatgatttttttttttttgcgaagaagaagggaattttttttaataaaaaggctttgcatatc

SEQ ID NO: 145999 - DNA, 878 bp, Homo sapiens
  Payload ID: 8948
  Gene Symbol: KIAA1522
  Gene Name: KIAA1522
  Uniprot ID: Q9P206
  ENST ID: ENST00000294521
  CDS Start-End: 137-568
gtctggagccggtgctctgcggcggggcgggagggctcgcatccccatagtgctgggttacagtgaaggtacgccccgcgctctgctctggagaggcagggtgggatagggaacgtctcgagtggcgcccgcagtcatggtggtgttcgttggccgccgcctcccggcgctcctagggctgtttaagaagaagggctctgccaaggctgagaatgacaaacatctaagtgtagggcctggccaggggccagggtctgcagtggatgagcaccaggacaacgtcttctttcccagtgggcgacccccccacctggaagagctgcacactcaggcccaggaggggctccgctccctacaacaccaagagaaacagaaactgaacaagggtggctgggaccatggagacacccagagtatccagtcctcccggacggggccggatgaagacaacatctccttctgcagtcagaccacatcctacgtggctgagagctccacagcagaggacgcgctctccatccgctcggagatgatccagcgcaaagactcacagaaagagctggcctgaccaccaggcacctcactggcactgctgacccatcccagaaacacaatctcagggacccgagcagctccaaggacgagaggatacagcagacacaacctaatagagagggcgcctgcagccttaacctccacggccttcgatacttatgcaagcctggtgttgctcctgtcctcagagtcatcctgcgctcatgccttttcccgaatgggttcacctctggcagttgccgcttcagtcttggccttagcctcatcttgaagtgggtagctggcgggagagggtggctgcgccccctgctggccctgaggct

SEQ ID NO: 146000 - DNA, 5294 bp, Homo sapiens
  Payload ID: 8948
  Gene Symbol: KIAA1522
  Gene Name: KIAA1522
  Uniprot ID: Q9P206
  ENST ID: ENST00000373480
  CDS Start-End: 104-3211
ggctcgcatccccatagtgctgggttacagtgaaggtacgccccgcgctctgctctggagaggcagggtgggatagggaacgtctcgagtggcgcccgcagtcatggtggtgttcgttggccgccgcctcccggcgctcctagggctgtttaagaagaagggctctgccaaggctgagaatgacaaacatctaagtgtagggcctggccaggggccagggtctgcagtggatgagcaccaggacaacgtcttctttcccagtgggcgacccccccacctggaagagctgcacactcaggcccaggaggggctccgctccctacaacaccaagagaaacagaaactgaacaagggtggctgggaccatggagacacccagagtatccagtcctcccggacggggccggatgaagacaacatctccttctgcagtcagaccacatcctacgtggctgagagctccacagcagaggacgcgctctccatccgctcggagatgatccagcgcaaaggctccaccttccgaccccatgactcatttcccaaatctggaaagtcagggcggcgtcggcgggagcggcggagcactgtgctgggactcccgcagcatgtgcagaaggagcttggcctgaggaatgagcgtgaggcaccaggcacgccccgggctcctggtgcacgggatgccgtacgcatccccacagtggacggccgcccccgaggcacctcagggatgggggcccgggtgtccctgcaggcgctggaggcggaggcggaggctggcgctgagacagaggccatgctgcagcgccacattgaccgtgtctaccgggatgacacctttgttggccggtccacgggtacccgggccccaccattgacccggcccatgtccctagcagtgcctggattgacaggaggggcagggcctgcagagcccctgagcccggccatgtccatctccccccaggccacctacctgtcgaagttgattccacatgctgtgctgccgcctacagtggacgtggtggccctaggccgctgcagcctgcgcacactaagccgctgcagcctgcactcggccagcccagcctcagtccgctcgctggggcgcttctcctccgtctccagcccacagccccgcagccgccacccatcctcctccagtgacacctggagccactctcaatcctccgacaccattgtgtctgacggttccaccctctcctctaagggtggctctgagggccagccggagagctctacggctagcaatagcgtggtaccccctccccagggaggcagtgggaggggctctcccagtgggggcagcactgctgaggcctcagacacactcagcattcggagcagtgggcagttgtctggccggagtgtgtccctgcgtaagctgaagcggcctccaccccctccccgccggacccactccctccatcagcggggcttagcagtgcctgatgggccattagggttgccccctaagcctgagcgtaagcagcagccccagctgcctcggccacccaccactggtggctcagaaggggcgggggcagcaccctgtccacccaacccagccaacagctgggtacctggcttgtctccgggtggttcccggcgccccccacggtccccagaacggacactttcgccctccagtggatactcgagccaaagtggtactcccaccctccctcccaagggcctggcaggtccccctgcttccccaggcaaggcccagccccctaaaccagagcgtgtcacgtctcttcgctcccctggggcctccgtctcctcttccctcacgtctttatgttcctcctcctctgacccagccccctcagaccgctctgggccacagatattgacccccctgggtgacaggtttgtcatacctcctcaccccaaggtgcctgcccccttctccccacctccctccaagcccaggagccctaacccagctgcccctgctctagccgcccctgctgtggttcctgggcctgtttctaccactgacgccagtcctcagtcccctcccactccccagacaaccttgactccactgcaggagtctcctgtcatctccaaagaccagtcacccccaccttccccacccccatcttatcatccacccccaccacccactaagaagccagaggtggttgtggaggcaccatctgcctcagagactgctgaggagcccctccaagatcccaactggccccctcccccaccccctgcccctgaggagcaggacctgtccatggctgacttccccccaccagaggaggcttttttctctgtggccagccctgagcctgcaggcccttcaggctccccagagcttgtcagctccccggctgcttcgtcctcctcagctactgctttgcagattcagcccccgggtagcccagaccctcctccagctccgccagccccagctcctgctagttccgccccagggcatgtggccaagctccctcagaaggaaccggtgggctgtagcaagggtggtgggcctcccagggaggacgtaggtgcgcccctggtcacgccctcgctcctgcagatggtgcggctgcgctccgtgggtgctccaggaggggctcccaccccagcactggggccatcggccccccagaaaccactgcgaagggccctgtcagggcgggccagcccagtgcctgccccctcctcagggctccatgctgcggtccgactcaaggcctgcagcctggccgccagtgaaggcctctcaagtgctcagcccaacggaccgcctgaggcagagccacggcctccccagtcccctgcctcaacggccagtttcatcttctccaagggctctaggaagctgcagctggagcggcccgtgtcccctgagacccaggctgacctccagcggaatctggtggcagaactccggagcatctcagagcagcggccaccccaggccccaaagaagtcacctaaggctcccccacctgtggcccgcaagccgtctgtgggagtccccccacccgcctcccccagttaccctcgagctgagccccttactgctcctcccaccaatgggctccctcacacccaggacaggactaagagggagctggcggagaatggaggtgtcctgcagctggtgggcccagaggagaagatgggcctcccgggctcagactcacagaaagagctggcctgaccaccaggcacctcactggcactgctgacccatcccagaaacacaatctcagggacccgagcagctccaaggacgagaggatacagcagacacaacctaatagagagggcgcctgcagccttaacctccacggccttcgatacttatgcaagcctggtgttgctcctgtcctcagagtcatcctgcgctcatgccttttcccgaatgggttcacctctggcagttgccgcttcagtcttggccttagcctcatcttgaagtgggtagctggcgggagagggtggctgcgccccctgctggccctgaggctgcagagttgggagcaggacacctcacctgagtttcattttttttcatgtccaaaccatgcacatactatagtccagaatcaaagcacttttgaaaagtggctgcatggccatcctccagggcccaggaagttgcattccaagggcctgtttacatggcagcagaatccatccccggcagtcagcccatagcttgggaccagtctgtgccctcctgcccagtccagtttactcctcttggttcctgaaggtggccaagtcattgtgttcccacaggcttctctaggctgggggcaggtgtggggctgtggaattccaaagcacaaaaggtgcagaggggattggccttcctgtgcctcaactcaccaaccaccctcctgccttccagttctgccaggtgctccatgctggggacaagtaggagactgccagggcccaaagaaatgggtgagcagtagagtcatctcggggcacttggcagtgtcaagcacctgccccttgcctccttgaccacactggggtgggtgggcccccagcacttcagaggcaggagcctttgggctgagcaagcactgaggaggtggatggaagggagcatctggagggggggagcttccttgagcagtgggcccaggcctggccctccacacttcattctctgacctttctctctcctcatttcggtgcatgtcctttctgcagctgcctttcagcacaggtggttccactgggggcagctaacgctgagtgacaaggatgggaagccacaggtgcattttactcaagtcttctctagtcaatgaggggcacccagtgcttctagggcaggctgggtggtggtcccctaggtatcagcctctcttactgtactctccgggaatgttaacctttctattttcagcctgtgccacctgtctaggcaagctggcttccccattggcccctgtgggtccacagcagcgtggctgccccccagggccaccgcttctttcttgatcctctttccttaacagtgacttgggcttgagtctggcaaggaaccttgcttttagcttcaccaccaaggagagaggttgacatgacctccccgccccctcaccaaggctgggaacagaggggatgtggtgagagccaggttcctctggccctctccagggtgttttccactagtcactactgtcttctccttgtagctaatcaatcaatattcttcccttgcctgtgggcagtggagagtgctgctgggtgtacgctgcacctgcccactgagttggggaaagaggataatcagtgagcactgttctgctcagagctcctgatctaccccaccccctaggatccaggactgggtcaaagctgcatgaaaccaggccctggcagcaacctgggaatggctggaggtgggagagaacctgacttctctttccctctccctcctccaacattactggaactctatcctgttaggatcttctgagcttgtttccctgctgggtgggacagaggacaaaggagaagggagggtctagaagaggcagcccttctttgtcctctggggtaaatgagcttgacctagagtaaatggagagaccaaaagcctctgatttttaatttccataaaatgttagaagtatatatatacatatatatatttctttaaatttttgagtctttgatatgtctaaaaatccattccctctgccctgaagcctgagtgagacacatgaagaaaactgtgtttcatttaaagatgttaattaaatgattgaaacttg

SEQ ID NO: 146001 - DNA, 5293 bp, Homo sapiens
  Payload ID: 8948
  Gene Symbol: KIAA1522
  Gene Name: KIAA1522
  Uniprot ID: Q9P206
  ENST ID: ENST00000373481
  CDS Start-End: 70-3210
gggctgcgggcccggcggccgggctggctgggccgcgcttgggttcccgcgccggctcccgcacccgcaatggggaactcacaccacaagaggaaggcccccagcggtccccgggtccgcagcttctggcggttcgggcggtcggcgaagcggccggcaggctctgccaaggctgagaatgacaaacatctaagtgtagggcctggccaggggccagggtctgcagtggatgagcaccaggacaacgtcttctttcccagtgggcgacccccccacctggaagagctgcacactcaggcccaggaggggctccgctccctacaacaccaagagaaacagaaactgaacaagggtggctgggaccatggagacacccagagtatccagtcctcccggacggggccggatgaagacaacatctccttctgcagtcagaccacatcctacgtggctgagagctccacagcagaggacgcgctctccatccgctcggagatgatccagcgcaaaggctccaccttccgaccccatgactcatttcccaaatctggaaagtcagggcggcgtcggcgggagcggcggagcactgtgctgggactcccgcagcatgtgcagaaggagcttggcctgaggaatgagcgtgaggcaccaggcacgccccgggctcctggtgcacgggatgccgtacgcatccccacagtggacggccgcccccgaggcacctcagggatgggggcccgggtgtccctgcaggcgctggaggcggaggcggaggctggcgctgagacagaggccatgctgcagcgccacattgaccgtgtctaccgggatgacacctttgttggccggtccacgggtacccgggccccaccattgacccggcccatgtccctagcagtgcctggattgacaggaggggcagggcctgcagagcccctgagcccggccatgtccatctccccccaggccacctacctgtcgaagttgattccacatgctgtgctgccgcctacagtggacgtggtggccctaggccgctgcagcctgcgcacactaagccgctgcagcctgcactcggccagcccagcctcagtccgctcgctggggcgcttctcctccgtctccagcccacagccccgcagccgccacccatcctcctccagtgacacctggagccactctcaatcctccgacaccattgtgtctgacggttccaccctctcctctaagggtggctctgagggccagccggagagctctacggctagcaatagcgtggtaccccctccccagggaggcagtgggaggggctctcccagtgggggcagcactgctgaggcctcagacacactcagcattcggagcagtgggcagttgtctggccggagtgtgtccctgcgtaagctgaagcggcctccaccccctccccgccggacccactccctccatcagcggggcttagcagtgcctgatgggccattagggttgccccctaagcctgagcgtaagcagcagccccagctgcctcggccacccaccactggtggctcagaaggggcgggggcagcaccctgtccacccaacccagccaacagctgggtacctggcttgtctccgggtggttcccggcgccccccacggtccccagaacggacactttcgccctccagtggatactcgagccaaagtggtactcccaccctccctcccaagggcctggcaggtccccctgcttccccaggcaaggcccagccccctaaaccagagcgtgtcacgtctcttcgctcccctggggcctccgtctcctcttccctcacgtctttatgttcctcctcctctgacccagccccctcagaccgctctgggccacagatattgacccccctgggtgacaggtttgtcatacctcctcaccccaaggtgcctgcccccttctccccacctccctccaagcccaggagccctaacccagctgcccctgctctagccgcccctgctgtggttcctgggcctgtttctaccactgacgccagtcctcagtcccctcccactccccagacaaccttgactccactgcaggagtctcctgtcatctccaaagaccagtcacccccaccttccccacccccatcttatcatccacccccaccacccactaagaagccagaggtggttgtggaggcaccatctgcctcagagactgctgaggagcccctccaagatcccaactggccccctcccccaccccctgcccctgaggagcaggacctgtccatggctgacttccccccaccagaggaggcttttttctctgtggccagccctgagcctgcaggcccttcaggctccccagagcttgtcagctccccggctgcttcgtcctcctcagctactgctttgcagattcagcccccgggtagcccagaccctcctccagctccgccagccccagctcctgctagttccgccccagggcatgtggccaagctccctcagaaggaaccggtgggctgtagcaagggtggtgggcctcccagggaggacgtaggtgcgcccctggtcacgccctcgctcctgcagatggtgcggctgcgctccgtgggtgctccaggaggggctcccaccccagcactggggccatcggccccccagaaaccactgcgaagggccctgtcagggcgggccagcccagtgcctgccccctcctcagggctccatgctgcggtccgactcaaggcctgcagcctggccgccagtgaaggcctctcaagtgctcagcccaacggaccgcctgaggcagagccacggcctccccagtcccctgcctcaacggccagtttcatcttctccaagggctctaggaagctgcagctggagcggcccgtgtcccctgagacccaggctgacctccagcggaatctggtggcagaactccggagcatctcagagcagcggccaccccaggccccaaagaagtcacctaaggctcccccacctgtggcccgcaagccgtctgtgggagtccccccacccgcctcccccagttaccctcgagctgagccccttactgctcctcccaccaatgggctccctcacacccaggacaggactaagagggagctggcggagaatggaggtgtcctgcagctggtgggcccagaggagaagatgggcctcccgggctcagactcacagaaagagctggcctgaccaccaggcacctcactggcactgctgacccatcccagaaacacaatctcagggacccgagcagctccaaggacgagaggatacagcagacacaacctaatagagagggcgcctgcagccttaacctccacggccttcgatacttatgcaagcctggtgttgctcctgtcctcagagtcatcctgcgctcatgccttttcccgaatgggttcacctctggcagttgccgcttcagtcttggccttagcctcatcttgaagtgggtagctggcgggagagggtggctgcgccccctgctggccctgaggctgcagagttgggagcaggacacctcacctgagtttcattttttttcatgtccaaaccatgcacatactatagtccagaatcaaagcacttttgaaaagtggctgcatggccatcctccagggcccaggaagttgcattccaagggcctgtttacatggcagcagaatccatccccggcagtcagcccatagcttgggaccagtctgtgccctcctgcccagtccagtttactcctcttggttcctgaaggtggccaagtcattgtgttcccacaggcttctctaggctgggggcaggtgtggggctgtggaattccaaagcacaaaaggtgcagaggggattggccttcctgtgcctcaactcaccaaccaccctcctgccttccagttctgccaggtgctccatgctggggacaagtaggagactgccagggcccaaagaaatgggtgagcagtagagtcatctcggggcacttggcagtgtcaagcacctgccccttgcctccttgaccacactggggtgggtgggcccccagcacttcagaggcaggagcctttgggctgagcaagcactgaggaggtggatggaagggagcatctggagggggggagcttccttgagcagtgggcccaggcctggccctccacacttcattctctgacctttctctctcctcatttcggtgcatgtcctttctgcagctgcctttcagcacaggtggttccactgggggcagctaacgctgagtgacaaggatgggaagccacaggtgcattttactcaagtcttctctagtcaatgaggggcacccagtgcttctagggcaggctgggtggtggtcccctaggtatcagcctctcttactgtactctccgggaatgttaacctttctattttcagcctgtgccacctgtctaggcaagctggcttccccattggcccctgtgggtccacagcagcgtggctgccccccagggccaccgcttctttcttgatcctctttccttaacagtgacttgggcttgagtctggcaaggaaccttgcttttagcttcaccaccaaggagagaggttgacatgacctccccgccccctcaccaaggctgggaacagaggggatgtggtgagagccaggttcctctggccctctccagggtgttttccactagtcactactgtcttctccttgtagctaatcaatcaatattcttcccttgcctgtgggcagtggagagtgctgctgggtgtacgctgcacctgcccactgagttggggaaagaggataatcagtgagcactgttctgctcagagctcctgatctaccccaccccctaggatccaggactgggtcaaagctgcatgaaaccaggccctggcagcaacctgggaatggctggaggtgggagagaacctgacttctctttccctctccctcctccaacattactggaactctatcctgttaggatcttctgagcttgtttccctgctgggtgggacagaggacaaaggagaagggagggtctagaagaggcagcccttctttgtcctctggggtaaatgagcttgacctagagtaaatggagagaccaaaagcctctgatttttaatttccataaaatgttagaagtatatatatacatatatatatttctttaaatttttgagtctttgatatgtctaaaaatccattccctctgccctgaagcctgagtgagacacatgaagaaaactgtgtttcatttaaagatgttaattaaatgattgaaacttg

SEQ ID NO: 146002 - DNA, 5438 bp, Homo sapiens
  Payload ID: 8948
  Gene Symbol: KIAA1522
  Gene Name: KIAA1522
  Uniprot ID: Q9P206
  ENST ID: ENST00000401073
  CDS Start-End: 71-3355
gcggccgcccccggcatgggcaccgcgccgcagggggcctgacccgccgcccgctccgcccccgcctgccatggcggcccgcgcgccccccgccgcacctgcggccgaggagccggggaacccgggcggccccccgcgcaggaagaagtcccgctccggcgcgtccggcctccgccgcgccttcagctggctgcggggcaagcggcgcaagaagaaggcggcgggggccgagggcgccgaaccggccgccccccgggccaagaaggcggaggacaaggccaagagggccaagggcaaaggccgaggctctgccaaggctgagaatgacaaacatctaagtgtagggcctggccaggggccagggtctgcagtggatgagcaccaggacaacgtcttctttcccagtgggcgacccccccacctggaagagctgcacactcaggcccaggaggggctccgctccctacaacaccaagagaaacagaaactgaacaagggtggctgggaccatggagacacccagagtatccagtcctcccggacggggccggatgaagacaacatctccttctgcagtcagaccacatcctacgtggctgagagctccacagcagaggacgcgctctccatccgctcggagatgatccagcgcaaaggctccaccttccgaccccatgactcatttcccaaatctggaaagtcagggcggcgtcggcgggagcggcggagcactgtgctgggactcccgcagcatgtgcagaaggagcttggcctgaggaatgagcgtgaggcaccaggcacgccccgggctcctggtgcacgggatgccgtacgcatccccacagtggacggccgcccccgaggcacctcagggatgggggcccgggtgtccctgcaggcgctggaggcggaggcggaggctggcgctgagacagaggccatgctgcagcgccacattgaccgtgtctaccgggatgacacctttgttggccggtccacgggtacccgggccccaccattgacccggcccatgtccctagcagtgcctggattgacaggaggggcagggcctgcagagcccctgagcccggccatgtccatctccccccaggccacctacctgtcgaagttgattccacatgctgtgctgccgcctacagtggacgtggtggccctaggccgctgcagcctgcgcacactaagccgctgcagcctgcactcggccagcccagcctcagtccgctcgctggggcgcttctcctccgtctccagcccacagccccgcagccgccacccatcctcctccagtgacacctggagccactctcaatcctccgacaccattgtgtctgacggttccaccctctcctctaagggtggctctgagggccagccggagagctctacggctagcaatagcgtggtaccccctccccagggaggcagtgggaggggctctcccagtgggggcagcactgctgaggcctcagacacactcagcattcggagcagtgggcagttgtctggccggagtgtgtccctgcgtaagctgaagcggcctccaccccctccccgccggacccactccctccatcagcggggcttagcagtgcctgatgggccattagggttgccccctaagcctgagcgtaagcagcagccccagctgcctcggccacccaccactggtggctcagaaggggcgggggcagcaccctgtccacccaacccagccaacagctgggtacctggcttgtctccgggtggttcccggcgccccccacggtccccagaacggacactttcgccctccagtggatactcgagccaaagtggtactcccaccctccctcccaagggcctggcaggtccccctgcttccccaggcaaggcccagccccctaaaccagagcgtgtcacgtctcttcgctcccctggggcctccgtctcctcttccctcacgtctttatgttcctcctcctctgacccagccccctcagaccgctctgggccacagatattgacccccctgggtgacaggtttgtcatacctcctcaccccaaggtgcctgcccccttctccccacctccctccaagcccaggagccctaacccagctgcccctgctctagccgcccctgctgtggttcctgggcctgtttctaccactgacgccagtcctcagtcccctcccactccccagacaaccttgactccactgcaggagtctcctgtcatctccaaagaccagtcacccccaccttccccacccccatcttatcatccacccccaccacccactaagaagccagaggtggttgtggaggcaccatctgcctcagagactgctgaggagcccctccaagatcccaactggccccctcccccaccccctgcccctgaggagcaggacctgtccatggctgacttccccccaccagaggaggcttttttctctgtggccagccctgagcctgcaggcccttcaggctccccagagcttgtcagctccccggctgcttcgtcctcctcagctactgctttgcagattcagcccccgggtagcccagaccctcctccagctccgccagccccagctcctgctagttccgccccagggcatgtggccaagctccctcagaaggaaccggtgggctgtagcaagggtggtgggcctcccagggaggacgtaggtgcgcccctggtcacgccctcgctcctgcagatggtgcggctgcgctccgtgggtgctccaggaggggctcccaccccagcactggggccatcggccccccagaaaccactgcgaagggccctgtcagggcgggccagcccagtgcctgccccctcctcagggctccatgctgcggtccgactcaaggcctgcagcctggccgccagtgaaggcctctcaagtgctcagcccaacggaccgcctgaggcagagccacggcctccccagtcccctgcctcaacggccagtttcatcttctccaagggctctaggaagctgcagctggagcggcccgtgtcccctgagacccaggctgacctccagcggaatctggtggcagaactccggagcatctcagagcagcggccaccccaggccccaaagaagtcacctaaggctcccccacctgtggcccgcaagccgtctgtgggagtccccccacccgcctcccccagttaccctcgagctgagccccttactgctcctcccaccaatgggctccctcacacccaggacaggactaagagggagctggcggagaatggaggtgtcctgcagctggtgggcccagaggagaagatgggcctcccgggctcagactcacagaaagagctggcctgaccaccaggcacctcactggcactgctgacccatcccagaaacacaatctcagggacccgagcagctccaaggacgagaggatacagcagacacaacctaatagagagggcgcctgcagccttaacctccacggccttcgatacttatgcaagcctggtgttgctcctgtcctcagagtcatcctgcgctcatgccttttcccgaatgggttcacctctggcagttgccgcttcagtcttggccttagcctcatcttgaagtgggtagctggcgggagagggtggctgcgccccctgctggccctgaggctgcagagttgggagcaggacacctcacctgagtttcattttttttcatgtccaaaccatgcacatactatagtccagaatcaaagcacttttgaaaagtggctgcatggccatcctccagggcccaggaagttgcattccaagggcctgtttacatggcagcagaatccatccccggcagtcagcccatagcttgggaccagtctgtgccctcctgcccagtccagtttactcctcttggttcctgaaggtggccaagtcattgtgttcccacaggcttctctaggctgggggcaggtgtggggctgtggaattccaaagcacaaaaggtgcagaggggattggccttcctgtgcctcaactcaccaaccaccctcctgccttccagttctgccaggtgctccatgctggggacaagtaggagactgccagggcccaaagaaatgggtgagcagtagagtcatctcggggcacttggcagtgtcaagcacctgccccttgcctccttgaccacactggggtgggtgggcccccagcacttcagaggcaggagcctttgggctgagcaagcactgaggaggtggatggaagggagcatctggagggggggagcttccttgagcagtgggcccaggcctggccctccacacttcattctctgacctttctctctcctcatttcggtgcatgtcctttctgcagctgcctttcagcacaggtggttccactgggggcagctaacgctgagtgacaaggatgggaagccacaggtgcattttactcaagtcttctctagtcaatgaggggcacccagtgcttctagggcaggctgggtggtggtcccctaggtatcagcctctcttactgtactctccgggaatgttaacctttctattttcagcctgtgccacctgtctaggcaagctggcttccccattggcccctgtgggtccacagcagcgtggctgccccccagggccaccgcttctttcttgatcctctttccttaacagtgacttgggcttgagtctggcaaggaaccttgcttttagcttcaccaccaaggagagaggttgacatgacctccccgccccctcaccaaggctgggaacagaggggatgtggtgagagccaggttcctctggccctctccagggtgttttccactagtcactactgtcttctccttgtagctaatcaatcaatattcttcccttgcctgtgggcagtggagagtgctgctgggtgtacgctgcacctgcccactgagttggggaaagaggataatcagtgagcactgttctgctcagagctcctgatctaccccaccccctaggatccaggactgggtcaaagctgcatgaaaccaggccctggcagcaacctgggaatggctggaggtgggagagaacctgacttctctttccctctccctcctccaacattactggaactctatcctgttaggatcttctgagcttgtttccctgctgggtgggacagaggacaaaggagaagggagggtctagaagaggcagcccttctttgtcctctggggtaaatgagcttgacctagagtaaatggagagaccaaaagcctctgatttttaatttccataaaatgttagaagtatatatatacatatatatatttctttaaatttttgagtctttgatatgtctaaaaatccattccctctgccctgaagcctgagtgagacacatgaagaaaactgtgtttcatttaaagatgttaattaaatgattgaaacttg

SEQ ID NO: 146003 - DNA, 4075 bp, Homo sapiens
  Payload ID: 8949
  Gene Symbol: KIAA1524
  Gene Name: KIAA1524
  Uniprot ID: Q8TCG1
  ENST ID: ENST00000295746
  CDS Start-End: 78-2795
aaaaaaagcgcggcgaaagctaaaggccggcgcacgctgggcggtggtggtccctaagccgggccgcggccggtgcaatggactccactgcctgcttgaagtccttgctcctgactgtcagtcagtacaaagccgtgaagtcagaggcgaacgccactcagcttttgcggcacttggaggtaatttctggacagaaactcacacgactatttacatcaaatcagatattaacaagtgaatgcttgagttgccttgtagagctacttgaagaccccaacataagtgcttcactgatcttaagtattatcggtttgctgtctcaactagcagtagacattgaaaccagagattgtcttcagaatacatataatctgaatagtgtgctggcgggagtggtttgtcggagcagccacactgattcggtgtttttgcagtgcattcaacttctacagaagttaacatataatgtcaaaattttctattctggtgccaatatagatgaattaattacgttcctgatagatcacattcaatcttctgaagatgagttaaaaatgccttgtctaggattattggcaaatctttgtcggcacaatctttctgttcaaacgcacataaagacattgagtaatgtgaaatctttttatcgaactcttatcaccttgttggcccatagtagtttaactgtggttgtgtttgcactttcaatattatccagtttgacattaaatgaagaggtgggggaaaagctattccatgctcgaaacattcatcagacttttcaactaatatttaatattctcataaacggtgatggcactctaactagaaagtattcagttgacctactgatggatctccttaagaatcctaaaattgctgattatctcaccagatatgagcacttttcttcatgtcttcaccaagtattaggtcttcttaatggaaaggatcctgattcctcttcaaaggttttagaattacttcttgccttctgttcagtgactcagctgcgccatatgctcactcagatgatgtttgaacagtctccacctggcagcgccactctgggaagccatactaaatgtttagaacctactgtggctctactgcgctggttaagccaacctttggacggatcagaaaactgttctgttttagcattggagttgttcaaggaaatatttgaggatgtcatagatgctgctaactgttcctcggctgatcgttttgtgacccttctgctgcctacaatccttgatcaacttcagttcacagaacaaaatctagatgaggctttaacaagaaaaaaatgtgaaaggattgccaaggccattgaagttttgttaactctctgtggagatgatacactaaaaatgcatattgcaaaaatcttgacaactgtcaagtgtaccactcttatagaacaacaatttacatatggcaagattgacctgggatttggaacaaaggttgcagattctgaattatgcaaacttgctgctgatgtaattttgaaaactcttgatttgattaacaaacttaaaccattggttcctggtatggaagtaagcttctacaaaatacttcaggacccacgtttgattactcctttggcttttgctttaacgtcagataatagagaacaagtacagtctggactgagaatattattggaggctgctccactgccagattttcctgctttagtacttggagaaagtatagcagcaaacaatgcctatagacaacaggaaacagaacatatacccagaaaaatgccctggcaatcatcaaatcacagttttccaacatcaataaagtgtttaactcctcatttgaaagatggtgttcctggattgaatattgaagaattaatagagaaacttcagtctggaatggtggtaaaggatcagatttgtgatgtgagaatatctgacataatggatgtatatgaaatgaaactatccacattagcttccaaagaaagcaggctacaagatcttttggaaacaaaagctctagcccttgcacaggctgatagactgattgctcagcatcgctgtcaaagaactcaagctgaaacagaggcacggacacttgctagtatgttgagagaagttgagagaaaaaatgaagagcttagtgtgttgctgaaggcgcagcaagttgaatcagaaagagcgcagagtgatattgagcatctctttcaacataataggaagttagagtctgtggctgaagaacatgaaatactgacaaaatcctacatggaacttcttcagagaaatgaaagtactgaaaagaagaataaagatttacagatcacatgtgattctctgaataaacaaattgagacagtgaaaaagttgaatgagtcactcaaggaacaaaatgaaaaaagtattgcccaattaatagagaaagaagaacagagaaaagaagtacagaatcagctagtagacagagaacataagctagcaaatttgcatcaaaaaacaaaagtacaagaagaaaagattaaaaccttacaaaaggaaagggaagataaggaagaaaccattgatatccttagaaaagaattaagcagaacagaacagataagaaaagagttgagcattaaggcttcctccctagaggttcaaaaggcacaattagaaggtcgtttggaagagaaagagtccttggtgaaacttcagcaagaggaattgaacaaacactcccacatgatagcaatgatccacagtttaagtggtggaaaaataaatccagaaactgtgaatctcagtatatagacattatggcattttggaatttgtaatctcatgatatttttgatgtatttatctattggagggggggtgggtaggggagttaatttgtgacttcgtaacaataagaagttattatctaatttagtaaagaccctgatctgttgcatgttttttatttgatagtttgaatagaaatttaattttctaagttttactttttgtttctggcttttatggcttaaggttttctttggttcttacattagaaaatcatttttaacctccattatcatttttctaaggttctttcctttttcttagttgctttctattctgttttgcctgtcttatttattctcatttgtgattatttagatcttaagaccaaactttcttggtataacagtcctaaagattacaaaataaaaatatagagagagtaaaagtaaaaagtaaagtaaaaagagagaaggtatgattttactgctagagaagtttgtctctgaagaagcacaaaagaaaatattagtgaatttaaaataatttttatactgctgtagcataatttctaaatttgaaaaaaatgcaatggtaataaaatgtataaaaattagaaaactgtcattgtgttaaactattacatttaaatgattacatttaacacaatagctgtctcataaaaaatctaagaacttgtagaattatttgtaaggtatatttagtgtttttttctcttttttcaaatgttgcatagtggtccagatcatctataattaattataagtttcttatgatttacataaggataatttggattctactcttgctgcatattcagaaaaatattatttactgttaattctgatatgaattgtatttaatttgttgtcctaatagtttttaattggttcatttaattttaaagcataggttaaatatctttattttttttaaaatacaagggtccttctgtacttttcatttgaatcatatcctctaactactctgtaagaaacgtttttacatcaatattttgattgattttattgctataccaatacagtcattaattttacttggtgttttcttcaccatatgtctgtttgatttaagtgaatttagatttgtacagttctggaaattttttaaaaaatattatgcagagtaaaacattttaaattactatttgttctatagaggagatacattctgtttctcttttgaaattgcatgcattttcaaccaaatatgaaaaagtttaagtggatagataagactgaagaataaaagggtctataaaa

SEQ ID NO: 146004 - DNA, 2764 bp, Homo sapiens
  Payload ID: 8949
  Gene Symbol: KIAA1524
  Gene Name: KIAA1524
  ENST ID: ENST00000481530
  CDS Start-End: 78-443
aaaaaaagcgcggcgaaagctaaaggccggcgcacgctgggcggtggtggtccctaagccgggccgcggccggtgcaatggactccactgcctgcttgaagtccttgctcctgactgtcagtcagtacaaagccgtgaagtcagaggcgaacgccactcagcttttgcggcacttggaggtaatttctggacagaaactcacacgactatttacatcaaatcagatattaacaagtgaatgcttgagttgccttgtagagctacttgaagaccccaacataagtgcttcactgatcttaagtattatcggtttgctgtctcaactagcagtagacattgaaaccagagattgtcttcagaatacatataatctgaatagtgtgctggcgggagtggtttgtcggagcagccacactgattcggtgtttttgcagatgaattaattacgttcctgatagatcacattcaatcttctgaagatgagttaaaaatgccttgtctaggattattggcaaatctttgtcggcacaatctttctgttcaaacgcacataaagacattgagtaatgtgaaatctttttatcgaactcttatcaccttgttggcccatagtagtttaactgtggttgtgtttgcactttcaatattatccagtttgacattaaatgaagaggtgggggaaaagctattccatgctcgaaacattcatcagacttttcaactaatatttaatattctcataaacggtgatggcactctaactagaaagtattcagttgacctactgatggatctccttaagaatcctaaaattgctgattatctcaccagatatgagcacttttcttcatgtcttcaccaagtattaggtcttcttaatggaaaggatcctgattcctcttcaaaggttttagaattacttcttgccttctgttcagtgactcagctgcgccatatgctcactcagatgatgtttgaacagtctccacctggcagcgccactctgggaagccatactaaatgtttagaacctactgtggctctactgcgctggttaagccaacctttggacggatcagaaaactgttctgttttagcattggagttgttcaaggaaatatttgaggatgtcatagatgctgctaactgttcctcggctgatcgttttgtgacccttctgctgcctacaatccttgatcaacttcagttcacagaacaaaatctagatgaggctttaacaagaaaaaaatgtgaaaggattgccaaggccattgaagttttgttaactctctgtggagatgatacactaaaaatgcatattgcaaaaatcttgacaactgtcaagtgtaccactcttatagaacaacaatttacatatggcaagattgacctgggatttggaacaaaggttgcagattctgaattatgcaaacttgctgctgatgtaattttgaaaactcttgatttgattaacaaacttaaaccattggttcctggtatggaagtaagcttctacaaaatacttcaggacccacgtttgattactcctttggcttttgctttaacgtcagataatagagaacaagtacagtctggactgagaatattattggaggctgctccactgccagattttcctgctttagtacttggagaaagtatagcagcaaacaatgcctatagacaacaggaaacagaacatatacccagaaaaatgccctggcaatcatcaaatcacagttttccaacatcaataaagtgtttaactcctcatttgaaagatggtgttcctggattgaatattgaagaattaatagagaaacttcagtctggaatggtggtaaaggatcagatttgtgatgtgagaatatctgacataatggatgtatatgaaatgaaactatccacattagcttccaaagaaagcaggctacaagatcttttggaaacaaaagctctagcccttgcacaggctgatagactgattgctcagcatcgctgtcaaagaactcaagctgaaacagaggcacggacacttgctagtatgttgagagaagttgagagaaaaaatgaagagcttagtgtgttgctgaaggcgcagcaagttgaatcagaaagagcgcagagtgatattgagcatctctttcaacataataggaagttagagtctgtggctgaagaacatgaaatactgacaaaatcctacatggaacttcttcagagaaatgaaagtactgaaaagaagaataaagatttacagatcacatgtgattctctgaataaacaaattgagacagtgaaaaagttgaatgagtcactcaaggaacaaaatgaaaaaagtattgcccaattaatagagaaagaagaacagagaaaagaagtacagaatcagctagtagacagagaacataagctagcaaatttgcatcaaaaaacaaaagtacaagaagaaaagattaaaaccttacaaaaggaaagggaagataaggaagaaaccattgatatccttagaaaagaattaagcagaacagaacagataagaaaagagttgagcattaaggcttcctccctagaggttcaaaaggcacaattagaaggtcgtttggaagagaaagagtccttggtgaaacttcagcaagaggaattgaacaaacactcccacatgatagcaatgatccacagtttaagtggtggaaaaataaatccagaaactgtgaatctcagtatatagacattatggcattttggaatttgtaatctcatg

SEQ ID NO: 146005 - DNA, 654 bp, Homo sapiens
  Payload ID: 8949
  Gene Symbol: KIAA1524
  Gene Name: KIAA1524
  ENST ID: ENST00000468953
  CDS Start-End: 82-228
aatcaaaaaaagcgcggcgaaagctaaaggccggcgcacgctgggcggtggtggtccctaagccgggccgcggccggtgcaatggactccactgcctgcttgaagtccttgctcctgactgtcagtcagtacaaagccgtgaagtcagaggcgaacgccactcagcttttgcggcacttggagctcacctattgtctttgggaagaagcagaaggaataatcccataactaccctctgggcttcatttttcattctcctccctcaaagtaatttctggacagaaactcacacgactatttacatcaaatcagatattaacaagtgaatgcttgagttgccttgtagagctacttgaagaccccaacataagtgcttcactgatcttaagtattatcggtttgctgtctcaactagcagtagacattgaaaccagagattgtcttcagaatacatataatctgaatagtgtgctggcgggagtggtttgtcggagcagccacactgattcggtgtttttgcagtgcattcaacttctacagaagttaacatataatgtcaaaattttctattctggtgccaatatagatgaattaattacgttcctgatagatcacattcaatcttctgaagatgagttaaaaatgccttgtcta

SEQ ID NO: 146006 - DNA, 3877 bp, Homo sapiens
  Payload ID: 8949
  Gene Symbol: KIAA1524
  Gene Name: KIAA1524
  Uniprot ID: Q8TCG1
  ENST ID: ENST00000491772
  CDS Start-End: 474-2714
ccttaacttctgagctcacctattgtctttgggaagaagcagaaggaataatcccataactaccctctgggcttcatttttcattctcctccctcaaagtaatttctggacagaaactcacacgactatttacatcaaatcagatattaacaagtgaatgcttgagttgccttgtagagctacttgaagaccccaacataagtgcttcactgatcttaagtattatcggtttgctgtctcaactagcagtagacattgaaaccagagattgtcttcagaatacatataatctgaatagtgtgctggcgggagtggtttgtcggagcagccacactgattcggtgtttttgcagtgcattcaacttctacagaagttaacatataatgtcaaaattttctattctggtgccaatatagatgaattaattacgttcctgatagatcacattcaatcttctgaagatgagttaaaaatgccttgtctaggattattggcaaatctttgtcggcacaatctttctgttcaaacgcacataaagacattgagtaatgtgaaatctttttatcgaactcttatcaccttgttggcccatagtagtttaactgtggttgtgtttgcactttcaatattatccagtttgacattaaatgaagaggtgggggaaaagctattccatgctcgaaacattcatcagacttttcaactaatatttaatattctcataaacggtgatggcactctaactagaaagtattcagttgacctactgatggatctccttaagaatcctaaaattgctgattatctcaccagatatgagcacttttcttcatgtcttcaccaagtattaggtcttcttaatggaaaggatcctgattcctcttcaaaggttttagaattacttcttgccttctgttcagtgactcagctgcgccatatgctcactcagatgatgtttgaacagtctccacctggcagcgccactctgggaagccatactaaatgtttagaacctactgtggctctactgcgctggttaagccaacctttggacggatcagaaaactgttctgttttagcattggagttgttcaaggaaatatttgaggatgtcatagatgctgctaactgttcctcggctgatcgttttgtgacccttctgctgcctacaatccttgatcaacttcagttcacagaacaaaatctagatgaggctttaacaagaaaaaaatgtgaaaggattgccaaggccattgaagttttgttaactctctgtggagatgatacactaaaaatgcatattgcaaaaatcttgacaactgtcaagtgtaccactcttatagaacaacaatttacatatggcaagattgacctgggatttggaacaaaggttgcagattctgaattatgcaaacttgctgctgatgtaattttgaaaactcttgatttgattaacaaacttaaaccattggttcctggtatggaagtaagcttctacaaaatacttcaggacccacgtttgattactcctttggcttttgctttaacgtcagataatagagaacaagtacagtctggactgagaatattattggaggctgctccactgccagattttcctgctttagtacttggagaaagtatagcagcaaacaatgcctatagacaacaggaaacagaacatatacccagaaaaatgccctggcaatcatcaaatcacagttttccaacatcaataaagtgtttaactcctcatttgaaagatggtgttcctggattgaatattgaagaattaatagagaaacttcagtctggaatggtggtaaaggatcagatttgtgatgtgagaatatctgacataatggatgtatatgaaatgaaactatccacattagcttccaaagaaagcaggctacaagatcttttggaaacaaaagctctagcccttgcacaggctgatagactgattgctcagcatcgctgtcaaagaactcaagctgaaacagaggcacggacacttgctagtatgttgagagaagttgagagaaaaaatgaagagcttagtgtgttgctgaaggcgcagcaagttgaatcagaaagagcgcagagtgatattgagcatctctttcaacataataggaagttagagtctgtggctgaagaacatgaaatactgacaaaatcctacatggaacttcttcagagaaatgaaagtactgaaaagaagaataaagatttacagatcacatgtgattctctgaataaacaaattgagacagtgaaaaagttgaatgagtcactcaaggaacaaaatgaaaaaagtattgcccaattaatagagaaagaagaacagagaaaagaagtacagaatcagctagtagacagagaacataagctagcaaatttgcatcaaaaaacaaaagtacaagaagaaaagattaaaaccttacaaaaggaaagggaagataaggaagaaaccattgatatccttagaaaagaattaagcagaacagaacagataagaaaagagttgagcattaaggcttcctccctagaggttcaaaaggcacaattagaaggtcgtttggaagagaaagagtccttggtgaaacttcagcaagaggaattgaacaaacactcccacatgatagcaatgatccacagtttaagtggtggaaaaataaatccagaaactgtgaatctcagtatatagacattatggcattttggaatttgtaatctcatgatatttttgatgtatttatctattggagggggggtgggtaggggagttaatttgtgacttcgtaacaataagaagttattatctaatttagtaaagaccctgatctgttgcatgttttttatttgatagtttgaatagaaatttaattttctaagttttactttttgtttctggcttttatggcttaaggttttctttggttcttacattagaaaatcatttttaacctccattatcatttttctaaggttctttcctttttcttagttgctttctattctgttttgcctgtcttatttattctcatttgtgattatttagatcttaagaccaaactttcttggtataacagtcctaaagattacaaaataaaaatatagagagagtaaaagtaaaaagtaaagtaaaaagagagaaggtatgattttactgctagagaagtttgtctctgaagaagcacaaaagaaaatattagtgaatttaaaataatttttatactgctgtagcataatttctaaatttgaaaaaaatgcaatggtaataaaatgtataaaaattagaaaactgtcattgtgttaaactattacatttaaatgattacatttaacacaatagctgtctcataaaaaatctaagaacttgtagaattatttgtaaggtatatttagtgtttttttctcttttttcaaatgttgcatagtggtccagatcatctataattaattataagtttcttatgatttacataaggataatttggattctactcttgctgcatattcagaaaaatattatttactgttaattctgatatgaattgtatttaatttgttgtcctaatagtttttaattggttcatttaattttaaagcataggttaaatatctttattttttttaaaatacaagggtccttctgtacttttcatttgaatcatatcctctaactactctgtaagaaacgtttttacatcaatattttgattgattttattgctataccaatacagtcattaattttacttggtgttttcttcaccatatgtctgtttgatttaagtgaatttagatttgtacagttctggaaattttttaaaaaatattatgcagagtaaaacattttaaattact

SEQ ID NO: 146007 - DNA, 2839 bp, Homo sapiens
  Payload ID: 8949
  Gene Symbol: KIAA1524
  Gene Name: KIAA1524
  ENST ID: ENST00000619684
  CDS Start-End: 37-2757
cggtggtggtccctaagccgggccgcggccggtgcaatggactccactgcctgcttgaagtccttgctcctgactgtcagtcagtacaaagccgtgaagtcagaggcgaacgccactcagcttttgcggcacttggaggtaatttctggacagaaactcacacgactatttacatcaaatcagatattaacaagtgaatgcttgagttgccttgtagagctacttgaagaccccaacataagtgcttcactgatcttaagtattatcggtttgctgtctcaactagcagtagacattgaaaccagagattgtcttcagaatacatataatctgaatagtgtgctggcgggagtggtttgtcggagcagccacactgattcggtgtttttgcagtgcattcaacttctacagaagttaacatataatgtcaaaattttctattctggtgccaatatagatgaattaattacgttcctgatagatcacattcaatcttctgaagatgagttaaaaatgccttgtctaggattattggcaaatctttgtcggcacaatctttctgttcaaacgcacataaagacattgagtaatgtgaaatctttttatcgaactcttatcaccttgttggcccatagtagtttaactgtggttgtgtttgcactttcaatattatccagtttgacattaaatgaagaggtgggggaaaagctattccatgctcgaaacattcatcagacttttcaactaatatttaatattctcataaacggtgatggcactctaactagaaagtattcagttgacctactgatggatctccttaagaatcctaaaattgctgattatctcaccagatatgagcacttttcttcatgtcttcaccaagtattaggtcttcttaatggaaaggatcctgattcctcttcaaaggttttagaattacttcttgccttctgttcagtgactcagctgcgccatatgctcactcagatgatgtttgaacagtctccacctggcagcgccactctgggaagccatactaaatgtttagaacctactgtggctctactgcgctggttaagccaacctttggacggatcagaaaactgttctgttttagcattggagttgttcaaggaaatatttgaggatgtcatagatgctgctaactgttcctcggctgatcgttttgtgacccttctgctgcctacaatccttgatcaacttcagttcacagaacaaaatctagatgaggctttaacaagaaaaaaatgtgaaaggattgccaaggccattgaagttttgttaactcctctctgtggagatgatacactaaaaatgcatattgcaaaaatcttgacaactgtcaagtgtaccactcttatagaacaacaatttacatatggcaagattgacctgggatttggaacaaaggttgcagattctgaattatgcaaacttgctgctgatgtaattttgaaaactcttgatttgattaacaaacttaaaccattggttcctggtatggaagtaagcttctacaaaatacttcaggacccacgtttgattactcctttggcttttgctttaacgtcagataatagagaacaagtacagtctggactgagaatattattggaggctgctccactgccagattttcctgctttagtacttggagaaagtatagcagcaaacaatgcctatagacaacaggaaacagaacatatacccagaaaaatgccctggcaatcatcaaatcacagttttccaacatcaataaagtgtttaactcctcatttgaaagatggtgttcctggattgaatattgaagaattaatagagaaacttcagtctggaatggtggtaaaggatcagatttgtgatgtgagaatatctgacataatggatgtatatgaaatgaaactatccacattagcttccaaagaaagcaggctacaagatcttttggaaacaaaagctctagcccttgcacaggctgatagactgattgctcagcatcgctgtcaaagaactcaagctgaaacagaggcacggacacttgctagtatgttgagagaagttgagagaaaaaatgaagagcttagtgtgttgctgaaggcgcagcaagttgaatcagaaagagcgcagagtgatattgagcatctctttcaacataataggaagttagagtctgtggctgaagaacatgaaatactgacaaaatcctacatggaacttcttcagagaaatgaaagtactgaaaagaagaataaagatttacagatcacatgtgattctctgaataaacaaattgagacagtgaaaaagttgaatgagtcactcaaggaacaaaatgaaaaaagtattgcccaattaatagagaaagaagaacagagaaaagaagtacagaatcagctagtagacagagaacataagctagcaaatttgcatcaaaaaacaaaagtacaagaagaaaagattaaaaccttacaaaaggaaagggaagataaggaagaaaccattgatatccttagaaaagaattaagcagaacagaacagataagaaaagagttgagcattaaggcttcctccctagaggttcaaaaggcacaattagaaggtcgtttggaagagaaagagtccttggtgaaacttcagcaagaggaattgaacaaacactcccacatgatagcaatgatccacagtttaagtggtggaaaaataaatccagaaactgtgaatctcagtatatagacattatggcattttggaatttgtaatctcatgatatttttgatgtatttatctattggagggggggtgggtaggggagtta

SEQ ID NO: 146008 - DNA, 147 bp, Homo sapiens
  Payload ID: 8949
  Gene Symbol: KIAA1524
  Gene Name: KIAA1524
  ENST ID: ENST00000625495
  CDS Start-End: 1-147
atggactccactgcctgcttgaagtccttgctcctgactgtcagtcagtacaaagccgtgaagtcagaggcgaacgccactcagcttttgcggcacttggagctcacctattgtctttgggaagaagcagaaggaataatcccataa

SEQ ID NO: 146009 - DNA, 12379 bp, Homo sapiens
  Payload ID: 8950
  Gene Symbol: KIAA1549
  Gene Name: KIAA1549
  Uniprot ID: Q9HCM3
  ENST ID: ENST00000440172
  CDS Start-End: 50-5854
gacccgagagccgctgagccgcgaggccgggccggggcgccggccgggaatgccgggggcgcggcgccgacgccgaggcgcggccatggaggggaagccccgcgccggggtcgcgctggccccggggccgagcggccgacggccttccgcccgctgcgcccgccgccgccgcccggggctgctgcttcctggcctctggctgctgctgctggcccggccggcctcgtgcgccccagatgagctctctccggaacagcacaacctttctttatactccatggagctcgtgctgaagaaaagcactgggcacagcgctgcacaagtggccttaacagaaactgctcccggctcccagcacagcagtcctctccatgtcacagccccgccgtctgccactacttttgatacagccttttttaaccaaggaaaacagaccaaaagtacagcagatcccagcatctttgtggcaacttacgtgtcagtgacgagtaaagaggtggccgtcaatgacgatgagatggataactttctgccagatactcactggaccactccacggatggtttctccaatacagtatatcacagtcagcccaccagggctgcccagggaagcattagaacctatgctcactccatcattacccatggtttctttacaagatgaagaagtgacatcgggctggcagaacacaacgcgacaaccagcggcatatgctgagtccgccagtcatttccacacctttcggtcagcttttcgcacctctgagggcatcgttccaactcctggcaggaatttggtgctttatcctactgatgcttacagtcatttatcaagcaggactctgccagagattgtggcttccctaacagagggtgtggaaaccaccctttttttaagctcccggtctttaatgccacagccgttaggcgacggcattactataccgttgccctccttgggggaggtctcacagcctccagaggaggtttgggccacaagtgcagacagatacactgatgtgaccactgtgttgagtcaaagcctagaagaaaccatctctccaagaacataccccactgtgactgcatcgcacgcagcccttgcattcagcaggacacattctccattgctttcaactcctcttgcatttgcgtcctctgcttcaccaactgatgtttcatctaacccctttctccctagcgactccagcaaaacatccgaattgcatagcaattcagccctccccggtcctgtggacaacactcatatcctgagcccggtgtcctcattcagaccatacacttggtgtgcggcctgcactgtgccttcacctcagcaagttctggccacgagcctcatggagaaagacgtgggatcaggggatggtgccgagactctgtgcatgaccgtgctggaagaaagcagcatctctctaatgagtagcgtcgtagcagacttctctgaatttgaggaagatcctcaagtatttaatacgcttttcccctccagacctatcgtcccactttcttctagatccatggaaatctcagagacgagtgttggcatttctgccgaggtggatatgagtagtgttacaaccacacaggttccccctgcccacggccgcctctctgtgccggcgtcacttgatcctactgctggctccttgtctgttgctgaaacccaagtgacgccatccagcgtgaccactgcatttttctcggtcatcaccagcattctccttgactcatctttctctgtcatagcaaacaaaaacacaccgtcgcttgccgtcagagacccgagtgtttttacgccttatagtctggttccttcagtggagtcttcacttttctctgaccaagaacgttccagtttttctgagcataaacccagaggtgctttggattttgcatccagctttttctcaacacccccgctggaactcagcggctccatctcttcgccttcggaagcacctgcgtctctgtctctgatgccgagtgacttgtcccccttcacatctcagtctttttctcccttggttgagacatttacattgtttgactctagtgatctgcagtcatctcagctgtctcttcccagttccacaaatcttgagttttcgcagctccagccaagttccgagctgcctttaaacaccatcatgttgctacctagccgttctgaggtgtcaccatggtcaagcttcccttctgattctctcgagtttgttgaagcgtctacggtttcactgacggattcagaagctcattttacctcagctttcattgaaactacctcctatcttgagtcttcactcatttcccatgaatccgcagtcactgcactggtgccccccggctctgagtcttttgacattttgactgccgggattcaagcaacatcaccattgaccactgtccacacaacgcccattttaactgagtcttctttgttctcaactctgacacctcctgacgaccaaatcagtgctctagacggtcacgtgtctgtcctggcctctttctccaaagccattcccactggtacggtgttgatcactgacgcgtacctgccatcaggatcctcgtttgtttctgaagcaacccccttccctctgcccacagagctgaccgtcgtgggcccatcactcacacccacagaggtgccactgaacacctccacggaagtgagcacaaccagcaccggtgctgccactggtggtcccctcgactccaccctgatgggtgacgccgcaagtcagagccccccagagagtagtgctgctcctcccctgccatccctgcgtcccgtgactgccttcactctcgaagcaacagtcgacacaccaacactggctactgccaagccgccatatgtttgtgatatcacagtccccgatgcctatctgatcacaactgtgctggccagaagagctgtgcaggagtacatcattacagcaatcaaagaagtactgaggattcacttcaaccgtgcagtggaactgaaggtttacgaactatttactgacttcacttttctggtaacatccggtcctttcgtttacacggcaatatccgtcataaatgtgcttataaacagtaagcttgtccgtgaccagactcctttaatcctgtctgtgaaaccttctttccttgtgccagagtccaggttccaagttcaaacagtacttcagtttgtgcctccgagtgtggatactggcttctgcaacttcacccagcgcattgagaaaggcctaatgacagctctctttgaagtgagaaaacaccaccagggaacgtataacctcacggtgcagatcttgaatatcaccatcagttcctcaagggtgactcctcggcggggcccggtgaatatcatctttgcggttaaaagcacacagggatttttgaatgggtcggaagtgagcgagctgctcagaaacttgagtgtggtggagttcagtttctatctgggatacccagtgctgcagatcgcagagcccttccagtatccacagctcaacttatctcagttgctgaagtcctcttgggtcagaacagttctcctgggcgtcatggagaagcaactccagaatgaagtgtttcaagccgagatggaacgcaagctggcccagctgctcagcgaggtttccaccagaaggcggatgtggagaagggccactgtagctgcagggaacagtgtggtgcaggtggtaaatgtgtcgaggctggagggagatgacaatccggtacagctcatctactttgtggaggatcaagatggagaaagactcagtgcagtcaagtcttcggacctgattaacaaaatggacctccagagagcagccatcatcttgggttaccgaattcaaggtgtcattgcccagcctgtcgacagggtgaagaggccgtctccggaatcccagagcaacaacttgtgggtcattgttggcgtggtcatcccagtgctggtggtgatggtgattgttgtcatcctctactggaaactatgccgcacagacaagctagactttcagcctgacactgtggccaacattcagcagcgtcagaagctgcagatccctagtgtgaagggcttcgattttgctaagcagcatctgggtcagcacaataaagacgacatattgattattcatgagccagcgccactgccaggacctctgaaggaccacaccacgccctcggaaaatggagacgtgccaagccccaagtcaaagatcccttccaagaatgttcgtcacagaggaagagtttctccctcagatgctgactctacggtcagtgaagagtccagcgagagggacgcaggagataagacgccgggagccgtcaacgatggcaggtcccacagagctccgcagagcgggccaccactgcccagttcgggaaatgagcagcactcatcagcctccatcttcgagcacgtggacaggatctcccgccccccggaggctagccggcgggtccccagtaagatccagcttatcgccatgcagccgatcccggcacctcccgtccagcgcccctccccagccgaccgagtggcggaaagcaataaaatcaacaaagagattcagaccgcgctgcggcacaagtctgagatcgagcaccatcgcaacaagatccgcctgcgcgccaagcgccgcgggcactacgagttcccggtggtagacgacctgtcctcgggcgacactaaggagcgacaccgggtgtaccgcagggcacagatgcagatcgacaagatcctggaccccacggccagcgtgccctccgtgttcatagagcccaggaagagctcacggataaaacgttctcccaagcctcgccggaaacaccaggtcaacggctgtcctgccgacgctgagaaggaccggctcatcaccacagacagcgatggcacctacaggaggccccccggcgtccacaactcagcctacatcggatgcccatcggatcctgacctcccagccgatgtgcagacaccatcctcggtggaactggggaggtatccagcccttcccttcccggcctcccagtacatcccaccccagccgtccatcgaggaggcacgccagaccatgcactccctcctggacgacgcctttgccctcgtggcccccagcagccagcctgccagcaccgcaggtgtaggccccggagtcccacccggcctgcccgcaaacagcaccccttcccaggaagagaggcgagccacccagtgggggtccttctacagcccagcccagacggccaacaatccctgcagtagatacgaagactatggaatgactcccccgacgggtccattgccaagaccaggttttggccccggtttgctgcagtctacagagctggtgccccctgaccctcagcagccacaggcctccgccgaagccccatttgctgccagagggatctactcggaggagatgccgtcggtggcccggcctcggcctgtcgggggtaccacaggctcccagatccagcacctgacacaggtggggattgccagcagaattggagctcagccagtggaaatcccgccaagcagaggcagccagtatggggggccaggctggccttcgtacggggaggacgaagcggggcgaagagaggccgtgccaaggacttcaggcagggagccctcagctccttccgggaacctcccccaccggggactgcagggccctgggctgggttaccccaccagctccacggaagacctccagcctggccactcctcggcctctctcatcaaagcaatccgcgaggagctcctccggctctcccagaaacagagcaccgtgcagaacttccacagctgatcggcctcgcctcgcagatttgccaagtatccgcttcctgtggaagcaagaccaaaaggaaatcaactgagtgggtgtttggaagaggaaggagcaactctcgggcagcctgcccaagggagggagcaagttgcaatttagaagatgccatacgtcgtgtgacagctcatgagcctttcactgggctggcaattgtctgaacacttgggttcagttgaaatatatgtattttggccaaaagccagcagcacttcacaaaaacaaaacacaaacctaagctaacaaaatgactgcattcgtctcttttttaaaggtagagattaaactgtatagacagcatagggatgaaaggaaccaagcgtttctgtgggattgagactggtacgtgtacgatgaacctgctgctttgttttctgagaagaggtttgaagacattttattaacagcttaatttttctcttttactccataggaacttattttaatagtaacattaacaacaagaatactaagactgtttgggaattttaaaaagctactagtgagaaaccaaatgataggttgtagagcctgatgactccaaacaaagccatcacccgcattcttcctccttcttctggtgctacagctccaagggcccttcaccttcatgtctgaaatggaactttggctttttcagtggaagaatatgttgaaggtttcattttgttctagaaaaaaaaaatccctcccaaagtggggcaaaaagctttatatttatttgattatccaaaatacagatcaaagtttagatctacattcttcattgtatttgctgtttcttaattgggcacacacaactcctggtcatgtcccagttcagcaccgatcgctaaggccgatcctgtagaatgcggctttcaagaggtcctaactgatcctttcttccactttgctgttgatttgttcacaaattatgtctgaatgagaaatcttctgtaagcagaagttatttaataattcccagcaccacgaaattgttatacatacatccctaccagtcacattccctgtgttcagagcctggaaatgaaattgagttcagttcagcctctctgtaatgaatcaagaaatgtaaaagagctttgagaccccaagggaaaggagagagttgcttctcatttctgattttattgtgctgttactctgtcgagtggctattaaaattgtcttatgctctttgggctaagaggggatcatctcgcttaagatgtactcctgatgtaaacatttcccccactttccaaataatggtaaagaaaacagtggcaagggctgttctgttttctggtacctgagtgaaactcagaagaaaagcaggcttagctaagagattttcactattaacctgtttttattagatcagcgaagacagtcatgcatcgcttaatgatggggatgcattctgagaaatgtgtcattaggctgttttgttgctgtgccaacatcctagattgtacttacacaacctacatggtatagcctactacacacctgggctgtgtggcatggcctattcctcttaggctacaaacctgtacagcatgttactgtactgaacacaatggtaagtatttgtgtatctaaacatagctaaacatagaaaaggtatggtaaaaatacaattttataatcttatgggactaccatcaatatgtagaccgtcattgaccaaaacatcctgatgtgtgcatgactgtacttttcattaaataacagataaggggctatagaatttggggctctgactgatcaaaacctgtgtatctgtgtcaagttttaagacccctgaaacagctaaaacaggtttccaaagtgtaatcactggatttcaaaaccatgttttagcccttcattaatgaagcctgttgtacagatttagagtcttacaatatgagggaagttggttctgggaaggtaagatgtagccagttttcatctgggcacctctgaaagagaaggagtgcaggagagtaagtctctcaaggacgttcaacaaaggaccagcagcatcttatcaggcgatcctcagaggctccaaggagcattggagagaatgcccctttctgggcttgatgtcttggttttggtttaataccaaatttctcttggtcttggtttaatacccgactcctcccaaattgaacgattatctttgtatgtcactcaaaaataccaggtttcctgaatatgttattaagaatttcagatatccaagcagaattttattatggacaccttgtaatgaattcaaatcgtgtgacagcaaacgggataaatggccccttctcacccagttccgctcagggccatacaggcttgcacatagagtgtgctaaaaatggtaacctcctttgagcattgcagaaagagggttctgtttcaaattgggctgaccgtaaaagcaattttgatgtctttcaaactaccataaagggattttaactgtatttttattcttagaaacaatacacctttaaacagatgtcaagaccaaagatgatgtataataaacagccggtggttatggtgtggtgtgagcaggcccccggatcaccagccctctgctggtggtcataaagcacacacagtttgtacttgcttcctctcgacgcctgccacaacagttttgccagtcaccaaactcagaaaaaactagctgtgtgagcagcaccgtaccctagcggtcttcagacattaagttcacgtcatccactgaaaggaagggtccttgcgttgacagcgtgtggctttggagtccgtttatggaagcactctacaatgaacagttgaattttatgtctattcttttttcctattttaaaagttctagtggtaacacaaactgtaaatttgagtcagaatgtttggagaaatgttgtttttttttttttcagagactactttgtcactcactgaccatgtctggttccttctctgaacttcattctccccataagccaaacaagaacagacctcccccgccacctcccaggcaccgtagttgtgagaatcagatgtgatcatgtgtgcagatgtcctgtgaggagggagcataaagcactgtgaaaatgtagcatgctgtctatgtggacgccctaggatgagtgatgtgaaacgctgcactactgcggtgaatgggttcacacatgggtaatgagcaaaaccgaaagctcggtgtgactcagtttcctcactcccattttgctttaatttcacttccttcaccaattttccgattgcatttattaagcatctttctgctcccgactttctggtgtctctggcaccaaataacccagcagacatgagccttgccttctgagattttagaatctaagatagcacgagtgggtatagaagatggaagataccgataaataacatggtttaagtgtcaataaaattcattcgaagagatcaggcgcggtggctcacgcctgtaatcccagcattttgggaggctgaggcaggtggatcacttgagatcaagagcttaaaaccagcccaggcaacatggcaaaaccccgtctctacaaaaaaatacaaaaactagctgggtgtggtggcgcatgcctgtagtcccagctgaggcacgataattgcttgaacccggggggtggaggttgcagtgagctgagattgcaccactgtactccaacctgggcgacagagcaagactgtgtctcaaaaagaaaaaaatttgttcaaaagacataaatgaattaggcacccagaagaagttgcatgtttggaaatgcaatatcttggggagacgtcaacttctgaagtgactttgaaggcagggcagctacccaggcaaatggcgtggaaggaagagctgagagtgggcctgggaaaggctgtagggaaggagtgaagctgtcactgaaatgaacttgatcttgatctgctttgatatggggacagaatccccgactgcactattgagggagtttcagaagagaaggaagaggtgctggaaggatgcttttgcagtcatgcagcaaggaaacgaccagggctgtgaagatctacagaggaagtactccagtgtgggggaggcaagggaagaggacgaaaatgatgagaatgacactgaggtcattgtttagagcagatctcaagcagccgtttggccacgccatatcctttgtggagcatagtgggttatctatctgtctgtctgtctatgtatctgtctatctatctatatatatattcagcttctttactgctacctacacatttttctccaaattttattaatttcatagtgttttgatttgggtggcagatgacttttaagcagtgggtgtttgccggccagatctttcctggcatgcggactgtgaggcaaagcacgggtgaaggtaggcgctaaaggctttgggctaaagccagcacgcggttctgtgctataggagtctcccgtttcccgtggacaggttcagcgttccttctttcgcacaacttttttctaagtgttccagtgaccaagccagtcattcggacactgatttgcagtgcattggcagtaattcacaaattagttgttatataagtctctctcatccctttcacactagattctcagacatgaatgaatttgtcgtttggaaggaaagctgggtaacgttttgggcacaggggaaggaggactccggtcttaactcccacgctaactttagctcaagtggagttttcaccgtggtcatttctacctccggagcaaggtgccagcgccagtactagagcctgcttatccacatttgccctggacaggagcaggaggaagtccacttctgtaccggcagacagagcatgtgaacacaaaacacatttctatggcatagtcaactgaacttcatttttacatttaatctaacatgttaacacgttctaacagggtttctatgagcagctgctgtaacatactcatcaactatgatagacttaacacttgttacctaatgaacaaggaggatgtgcatttcgggtttcttttgatattcgtggaggtgattgtcagtgtttaaacaggactactttctccactatgaagatgacttggaaatcgcaacatcatggtacattgctaagtccatgcttgtgtgtgtgacagtaggcttgataatttatcttaaaacacagcagcattgaaatttaggaaaagaatattaaatgcctttggaaacatgaaacaaagttaggagccagtaagaaagtgacagaagcaatgaatgtcttaatgcagtatagttaaaatggcttcccacagggtagataattatccaggatccttccttttccttcttcctccaggtttttcaggggtcacttcacatttctaaagaaagagtgaataggctgggcatggtggctcaagcctctaatctcaacgctttgggaggctgaggcaggaggatcgcttgaggccaggagtttgagaccaccttgggcaacataacgagaccccgtctctacaaaaaaaatttaaaaattagctgagcatggtggcatgtgccagtagtcccagctactcgaaaggctaagactggaggatcgcttgagccaatgagttggaggctgcagtgagctataatcacgccactgcactccagcctgggctgcagggtgaggtcctgtctctggaaaaaaaaaaaaaaaaaaaaggaataggtaaaagggacagaggtgaaattttgagtgacttgagtctcttgcagtccctgattacacagaacctttctgggctacttggagcatcacgaatagtctttcctgtacttaccagatttcaagtattcataacttgactccctaagtgtacaagttgggaatagtacagggccaagttcaagtcgcatatgctgtactgttcctcctgcaaatgtggggaaagaagagggagatactagaggaactgaggctccacccattcattcagttgctctaagcaccagaggacttgtttcagaaaaggggagtgggaacgccctcgactttgccctcctccggagcatctctgggacgcagggagtctggctagcgttaataggaaaggttgctcggcagagctgccctggagtactgacttgtctctccctcctttgtcaaggtccatgtttttctggctcttcctgcacactcatccctagattatgagcgttaatgtacgaaatgtgcagagcaaattgaggccaactgtggcatcaatactgcaacttaaacttgacaatcatggtttgctggtcctcaaacaggcactgaaatctcagtatgggtatacgatttaataatcggcccctcccttctatttgtcggttttatgtttctatccttcaatagctgcactgttttctaatgtgctgtagagtttttgaaataatttatgcaagtatttggtttccatgtttacaatttatacagctttcctagcattttaaatggaaatgtcaataaatgctatgaattggtgtcaaa

SEQ ID NO: 146010 - DNA, 6283 bp, Homo sapiens
  Payload ID: 8950
  Gene Symbol: KIAA1549
  Gene Name: KIAA1549
  Uniprot ID: Q9HCM3
  ENST ID: ENST00000422774
  CDS Start-End: 50-5902
gacccgagagccgctgagccgcgaggccgggccggggcgccggccgggaatgccgggggcgcggcgccgacgccgaggcgcggccatggaggggaagccccgcgccggggtcgcgctggccccggggccgagcggccgacggccttccgcccgctgcgcccgccgccgccgcccggggctgctgcttcctggcctctggctgctgctgctggcccggccggcctcgtgcgccccagatgagctctctccggaacagcacaacctttctttatactccatggagctcgtgctgaagaaaagcactgggcacagcgctgcacaagtggccttaacagaaactgctcccggctcccagcacagcagtcctctccatgtcacagccccgccgtctgccactacttttgatacagccttttttaaccaaggaaaacagaccaaaagtacagcagatcccagcatctttgtggcaacttacgtgtcagtgacgagtaaagaggtggccgtcaatgacgatgagatggataactttctgccagatactcactggaccactccacggatggtttctccaatacagtatatcacagtcagcccaccagggctgcccagggaagcattagaacctatgctcactccatcattacccatggtttctttacaagatgaagaagtgacatcgggctggcagaacacaacgcgacaaccagcggcatatgctgagtccgccagtcatttccacacctttcggtcagcttttcgcacctctgagggcatcgttccaactcctggcaggaatttggtgctttatcctactgatgcttacagtcatttatcaagcaggactctgccagagattgtggcttccctaacagagggtgtggaaaccaccctttttttaagctcccggtctttaatgccacagccgttaggcgacggcattactataccgttgccctccttgggggaggtctcacagcctccagaggaggtttgggccacaagtgcagacagatacactgatgtgaccactgtgttgagtcaaagcctagaagaaaccatctctccaagaacataccccactgtgactgcatcgcacgcagcccttgcattcagcaggacacattctccattgctttcaactcctcttgcatttgcgtcctctgcttcaccaactgatgtttcatctaacccctttctccctagcgactccagcaaaacatccgaattgcatagcaattcagccctccccggtcctgtggacaacactcatatcctgagcccggtgtcctcattcagaccatacacttggtgtgcggcctgcactgtgccttcacctcagcaagttctggccacgagcctcatggagaaagacgtgggatcaggggatggtgccgagactctgtgcatgaccgtgctggaagaaagcagcatctctctaatgagtagcgtcgtagcagacttctctgaatttgaggaagatcctcaagtatttaatacgcttttcccctccagacctatcgtcccactttcttctagatccatggaaatctcagagacgagtgttggcatttctgccgaggtggatatgagtagtgttacaaccacacaggttccccctgcccacggccgcctctctgtgccggcgtcacttgatcctactgctggctccttgtctgttgctgaaacccaagtgacgccatccagcgtgaccactgcatttttctcggtcatcaccagcattctccttgactcatctttctctgtcatagcaaacaaaaacacaccgtcgcttgccgtcagagacccgagtgtttttacgccttatagtctggttccttcagtggagtcttcacttttctctgaccaagaacgttccagtttttctgagcataaacccagaggtgctttggattttgcatccagctttttctcaacacccccgctggaactcagcggctccatctcttcgccttcggaagcacctgcgtctctgtctctgatgccgagtgacttgtcccccttcacatctcagtctttttctcccttggttgagacatttacattgtttgactctagtgatctgcagtcatctcagctgtctcttcccagttccacaaatcttgagttttcgcagctccagccaagttccgagctgcctttaaacaccatcatgttgctacctagccgttctgaggtgtcaccatggtcaagcttcccttctgattctctcgagtttgttgaagcgtctacggtttcactgacggattcagaagctcattttacctcagctttcattgaaactacctcctatcttgagtcttcactcatttcccatgaatccgcagtcactgcactggtgccccccggctctgagtcttttgacattttgactgccgggattcaagcaacatcaccattgaccactgtccacacaacgcccattttaactgagtcttctttgttctcaactctgacacctcctgacgaccaaatcagtgctctagacggtcacgtgtctgtcctggcctctttctccaaagccattcccactggtacggtgttgatcactgacgcgtacctgccatcaggatcctcgtttgtttctgaagcaacccccttccctctgcccacagagctgaccgtcgtgggcccatcactcacacccacagaggtgccactgaacacctccacggaagtgagcacaaccagcaccggtgctgccactggtggtcccctcgactccaccctgatgggtgacgccgcaagtcagagccccccagagagtagtgctgctcctcccctgccatccctgcgtcccgtgactgccttcactctcgaagcaacagtcgacacaccaacactggctactgccaagccgccatatgtttgtgatatcacagtccccgatgcctatctgatcacaactgtgctggccagaagagctgtgcaggagtacatcattacagcaatcaaagaagtactgaggattcacttcaaccgtgcagtggaactgaaggtttacgaactatttactgacttcacttttctggtaacatccggtcctttcgtttacacggcaatatccgtcataaatgtgcttataaacagtaagcttgtccgtgaccagactcctttaatcctgtctgtgaaaccttctttccttgtgccagagtccaggttccaagttcaaacagtacttcagtttgtgcctccgagtgtggatactggcttctgcaacttcacccagcgcattgagaaaggcctaatgacagctctctttgaagtgagaaaacaccaccagggaacgtataacctcacggtgcagatcttgaatatcaccatcagttcctcaagggtgactcctcggcggggcccggtgaatatcatctttgcggttaaaagcacacagggatttttgaatgggtcggaagtgagcgagctgctcagaaacttgagtgtggtggagttcagtttctatctgggatacccagtgctgcagatcgcagagcccttccagtatccacagctcaacttatctcagttgctgaagtcctcttgggtcagaacagttctcctgggcgtcatggagaagcaactccagaatgaagtgtttcaagccgagatggaacgcaagctggcccagctgctcagcgaggtttccaccagaaggcggatgtggagaagggccactgtagctgcagggaacagtgtggtgcaggtggtaaatgtgtcgaggctggagggagatgacaatccggtacagctcatctactttgtggaggatcaagatggagaaagactcagtgcagtcaagtcttcggacctgattaacaaaatggacctccagagagcagccatcatcttgggttaccgaattcaaggtgtcattgcccagcctgtcgacagggtgaagaggccgtctccggaatcccagagcaacaacttgtgggtcattgttggcgtggtcatcccagtgctggtggtgatggtgattgttgtcatcctctactggaaactatgccgcacagacaagctagactttcagcctgacactgtggccaacattcagcagcgtcagaagctgcagatccctagtgtgaagggcttcgattttgctaagcagcatctgggtcagcacaataaagacgacatattgattattcatgagccagcgccactgccaggacctctgaaggaccacaccacgccctcggaaaatggagacgtgccaagccccaagtcaaagatcccttccaagaatgttcgtcacagaggaagagtttctccctcagatgctgactctacggtcagtgaagagtccagcgagagggacgcaggagataagacgccgggagccgtcaacgatggcaggtcccacagagctccgcagagcgggccaccactgcccagttcgggaaatgagcagcactcatcagcctccatcttcgagcacgtggacaggatctcccgccccccggaggctagccggcgggtccccagtaagatccagcttatcgccatgcagccgatcccggcacctcccgtccagcgcccctccccagccgaccgagtggcggaaagcaataaaatcaacaaagagattcagaccgcgctgcggcacaagtctgagatcgagcaccatcgcaacaagatccgcctgcgcgccaagcgccgcgggcactacgagttcccggtggtagacgacctgtcctcgggcgacactaaggagcgacaccgggtgtaccgcagggcacagatgcagatcgacaagatcctggaccccacggccagcgtgccctccgtgttcatagagcccaggaagagctcacggataaaacgttctcccaagcctcgccggaaacaccaggtcaacggctgtcctgccgacgctgagaaggaccggctcatcaccacagacagcgatggcacctacaggaggccccccggcgtccacaactcagcctacatcggatgcccatcggatcctgacctcccagccgatgtgcagacaccatcctcggtggaactggggaggtatccagcccttcccttcccggcctcccagtacatcccaccccagccgtccatcgaggaggcacgccagaccatgcactccctcctggacgacgcctttgccctcgtggcccccagcagccagcctgccagcaccgcaggtgtaggccccggagtcccacccggcctgcccgcaaacagcaccccttcccaggaagagaggcgagccacccagtgggggtccttctacagcccagcccagacggccaacaatccctgcagtagatacgaagactatggaatgactcccccgacgggtccattgccaagaccaggttttggccccggtttgctgcagtctacagagctggtgccccctgaccctcagcagccacaggcctccgccgaagccccatttgctgccagagggatctactcggaggagatgccgtcggtggcccggcctcggcctgtcgggggtaccacaggctcccagatccagcacctgacacaggtggggattgccagcagaattggagctcagccagtggaaatcccgccaagcagaggcagccagtatggggggccaggctggccttcgtacggggaggacgaagcggggcgaagagaggccacacacatgctcggacatcaagagtattcttcttcaccgctatttcaggtgccaaggacttcaggcagggagccctcagctccttccgggaacctcccccaccggggactgcagggccctgggctgggttaccccaccagctccacggaagacctccagcctggccactcctcggcctctctcatcaaagcaatccgcgaggagctcctccggctctcccagaaacagagcaccgtgcagaacttccacagctgatcggcctcgcctcgcagatttgccaagtatccgcttcctgtggaagcaagaccaaaaggaaatcaactgagtgggtgtttggaagaggaaggagcaactctcgggcagcctgcccaagggagggagcaagttgcaatttagaagatgccatacgtcgtgtgacagctcatgagcctttcactgggctggcaattgtctgaacacttgggttcagttgaaatatatgtattttggccaaaagccagcagcacttcacaaaaacaaaacacaaacctaagctaacaaaatgactgcattcgtctcttttttaaaggtagagattaaactgtatagacagcatagggatgaaaggaaccaagcgtttctgtgggattgagactg

SEQ ID NO: 146011 - DNA, 4492 bp, Homo sapiens
  Payload ID: 8951
  Gene Symbol: KIAA1549L
  Gene Name: KIAA1549-like
  Uniprot ID: Q6ZVL6
  ENST ID: ENST00000265654
  CDS Start-End: 125-3832
tcattccatcatctctgagccagcagagcaatcccccaaagtgctgttagttccccaaacagctccagccgacccctctttaggtcagaacatagctaatcccttaatcccattttctgatgaaatggaccacactgcatcccaaaatgcccaggatctcataggcatccctcatctaggtgtttctggatcctcaacaaaatggcattccgagctgtccccaacagagggtccccattcagcaggttcatccacacctgggtttttgagccccatggcagaactgtcccatccgtctccccctcccccagcacttggaagtcttcttcagcttccagatggaagcccctcatggtcaatgttggaagtggcttcaggtcctgcatccacccagcagatcaaagctggggtgcctggaagagtgcacaatggggtgtctttgccaacttttaagaatacagaaacagcgacccatgaggctgagcctccacttttccagactgcagaatcaggggccatagaaatgaccagcagaaagctagcctctgccactgcaaatgactctgctaacccgctgcatttgtcagcagctccagagaattccagagggcccgccctttcggcagaacacacctcttctttggtgccttctctgcatatcaccacactgggtcaagagcaagccatcctttctggggcggttcccgcatcaccatcaactgggacagccgactttccctccatacttactttcctccagcccacagagaatcatgcctccccatctcctgtgccagaaatgcccactcttccagcagagggcagtgatgggtcccctcctgcaactagagacttgctcctctcaagcaaagttcctaatcttctttccacatcttggacatttccccggtggaaaaaggacagtgtgacagccattttagggaagaatgaagaggcaaatgtgacgattcctctccaggcctttccaaggaaagaggttttgagtcttcacactgtaaatggatttgtctctgatttcagcaccggtagtgtctcatctcccatcattacagcaccaaggacgaatccccttccttcaggaccacctctaccttccatactctccatacaagccacccagactgttttcccatctcttggcttttccagcaccaagccagaggcttatgcagctgctgtggaccattctgggttgccagcttcagcttccaaacaggtgagagcatcgccctcctccatggatgtatatgattccttaacaataggagacatgaaaaagccagcaaccacagatgttttctggagttctctttcagcagaaactggatctctttccacagaatcaataatatctggcttgcagcagcaaacaaattatgatttaaatggacacacaattagcaccacaagttgggaaactcatttagctccaacagctcctcccaatggtttaacttcagctgccgatgccataaaatctcaggatttcaaagatactgctgggcattcagtgactgcagaagggtttagtattcaggatctagtcctcggtacaagcattgagcagcctgtgcaacagtcagacatgaccatggttggaagccatatagacctctggcccacaagcaataacaaccattccagagacttccaaacagctgaagttgcatattactcacccacaactcgacattccgtgtctcatcctcagctacagttgcccaaccagccagcacatcctcttttgctaacctcaccaggaccaacttctacaggtagcttgcaggaaatgctttcagatggaacagatacaggttctgaaatttccagtgacatcaattcatcacctgagagaaatgcttccacaccattccagaacatcttgggatatcactctgctgctgaatcttctatatcgaccagtgtctttcccaggacctcctccagagtgctgcgggcttctcagcaccccaagaaatggacaggtgcagccactaatgcagcggacacagtatcatctaaggtacagccaacagcagcagctgccgtcacattgtttctgaggaaatcaagtccacctgcactgtctgcagccctggttgctaagggcaccagcagcagccctttggccgtggcctcaggaccagctaagagcagttcgatgactactcttgctaaaaatgtcacaaacaaggccgcatctggcccaaagaggacaccaggggcagtccatacagccttcccattcacaccaacctacatgtatgcaagaacaggacataccacgagcacacatacagccatgcaaggaaacatggacactgcctctggcctgttgtctacaacttacctccccaggaaaccacaagccatgcacaccggcctcccaaaccccaccaacctggagatgcccagagcatccacgccacgcccactgacagtcacggccgcgctgacatccattacagcctcagtgaaggccacccggttgccaccattgcgagcagaaaacacagatgctgtccttcctgctgcatcggctgcagtggtcacgactggcaaaatggcatccaacctggagtgtcagatgtccagtaagctcctggtgaagacagttctctttctcacccaaaggagagtgcagatcagtgaatccttgaagttcagtatcgccaaagggctcacacaggcattgcggaaggctttccaccagaacgatgtctcagctcacgtggacattctggaatattctcataatgtcacagttggttattatgctaccaaagggaagttggtgtatttgcctgctgtggtgatcgaaatgctgggtgtgtatggagtcagcaacgtcactgcagacctgaagcaacacaccccacacttacagtctgtggcagtacttgcctccccatggaatccccagcctgcaggctacttccagctaaaaacagtgctgcagtttgtgagccaagcggacaacatacagtcctgcaagtttgctcagacaatggaacagaggctgcagaaggcattccaggatgccgagaggaaagtcctgaataccaaaagcaacttgacaattcagattgtgagcacgtccaatgcctcccaggcagtcaccttggtgtacgtcgtgggcaatcagagcacattcctcaacggcaccgtcgccagcagcctcctcagccagctctcggctgagctggtgggattctacctcacctatccgccgctaaccattgctgaaccactggaatatcccaaccttgacatatcagaaacaaccagagactattgggtaattacagtgctgcagggtgtggacaattcgctggtgggcctgcacaaccagagctttgcccgggtcatggagcagcgcctggcccagctattcatgatgtcccagcaacaaggccggcggtttaaacgggccaccaccctgggaagctacactgtgcagatggtgaagatgcagcgtgtcccaggcccgaaggacccagcggagctgacttactataccctgtacaacgggaagcctttgttggggaccgcagctgccaagatcctgagcaccattgattcccaaaggatggccttgacccttcatcacgttgtccttctgcaagctgaccccgtggtgaagaacccgcccaataacctgtggatcatcgctgcagtgctggcgcccattgccgtggtcacggtcatcatcatcatcatcactgccgtgctctgcaggaagaacaagaacgacttcaagcctgacaccatgataaacctgccgcagagagcaaagcaggtcgcccagtgagaatggctctgtcatcagcaacgaatcagggaagcccagctcagggagacgctcaccccagaatgtaatggcacagcagaaagtgacaaaggaggaggcaaggaagagaaatggtgagaagccttccctccaagaaccacccccagctgctcccacgcgtgcccgcacacacatgcgtgcacacgtgtgcacaaactcacacacagccactgggctctgaccctcagtcgttctttctattctgccccacaagggccaggagtctgtatgtaccccttgggttctcaccttaccccttgtctgaattgtcctgtctcacttcctccgcccctgttcttatgaaatggtgtagttccttaggaaaaaccttttgcggaatgaactgatgtttgcttagaggtttttctaattctctagttagaaatcctctaaaatttctaatttctaatcacatgaattgacgcaatttcttgcaccagttccactaaggcagcagatctctgaaataactgctcatcttggagattcctctcattttcctgccctgactcccctgataagtttcatgggttcagtctgtgccactgagtccagatattgcaactccacttctcccaggaaaaaactaacccaaaacaataaaggaacagatctgtcatc

SEQ ID NO: 146012 - DNA, 11678 bp, Homo sapiens
  Payload ID: 8951
  Gene Symbol: KIAA1549L
  Gene Name: KIAA1549-like
  Uniprot ID: Q6ZVL6
  ENST ID: ENST00000321505
  CDS Start-End: 181-5730
gacattcccccactcctccctctacctccatcctcttcattggctcctgactcacctcattccatcatctctgagccagcagagcaatcccccaaagtgctgttagttccccaaacagctccagccgacccctctttaggtcagaacatagctaatcccttaatcccattttctgatgaaatggaccacactgcatcccaaaatgcccaggatctcataggcatccctcatctaggtgtttctggatcctcaacaaaatggcattccgagctgtccccaacagagggtccccattcagcaggttcatccacacctgggtttttgagccccatggcagaactgtcccatccgtctccccctcccccagcacttggaagtcttcttcagcttccagatggaagcccctcatggtcaatgttggaagtggcttcaggtcctgcatccacccagcagatcaaagctggggtgcctggaagagtgcacaatggggtgtctttgccaacttttaagaatacagaaacagcgacccatgaggctgagcctccacttttccagactgcagaatcaggggccatagaaatgaccagcagaaagctagcctctgccactgcaaatgactctgctaacccgctgcatttgtcagcagctccagagaattccagagggcccgccctttcggcagaacacacctcttctttggtgccttctctgcatatcaccacactgggtcaagagcaagccatcctttctggggcggttcccgcatcaccatcaactgggacagccgactttccctccatacttactttcctccagcccacagagaatcatgcctccccatctcctgtgccagaaatgcccactcttccagcagagggcagtgatgggtcccctcctgcaactagagacttgctcctctcaagcaaagttcctaatcttctttccacatcttggacatttccccggtggaaaaaggacagtgtgacagccattttagggaagaatgaagaggcaaatgtgacgattcctctccaggcctttccaaggaaagaggttttgagtcttcacactgtaaatggatttgtctctgatttcagcaccggtagtgtctcatctcccatcattacagcaccaaggacgaatccccttccttcaggaccacctctaccttccatactctccatacaagccacccagactgttttcccatctcttggcttttccagcaccaagccagaggcttatgcagctgctgtggaccattctgggttgccagcttcagcttccaaacaggtgagagcatcgccctcctccatggatgtatatgattccttaacaataggagacatgaaaaagccagcaaccacagatgttttctggagttctctttcagcagaaactggatctctttccacagaatcaataatatctggcttgcagcagcaaacaaattatgatttaaatggacacacaattagcaccacaagttgggaaactcatttagctccaacagctcctcccaatggtttaacttcagctgccgatgccataaaatctcaggatttcaaagatactgctgggcattcagtgactgcagaagggtttagtattcaggatctagtcctcggtacaagcattgagcagcctgtgcaacagtcagacatgaccatggttggaagccatatagacctctggcccacaagcaataacaaccattccagagacttccaaacagctgaagttgcatattactcacccacaactcgacattccgtgtctcatcctcagctacagttgcccaaccagccagcacatcctcttttgctaacctcaccaggaccaacttctacaggtagcttgcaggaaatgctttcagatggaacagatacaggttctgaaatttccagtgacatcaattcatcacctgagagaaatgcttccacaccattccagaacatcttgggatatcactctgctgctgaatcttctatatcgaccagtgtctttcccaggacctcctccagagtgctgcgggcttctcagcaccccaagaaatggacagcggacacagtatcatctaaggtacagccaacagcagcagctgccgtcacattgtttctgaggaaatcaagtccacctgcactgtctgcagccctggttgctaagggcaccagcagcagccctttggccgtggcctcaggaccagctaagagcagttcgatgactactcttgctaaaaatgtcacaaacaaggccgcatctggcccaaagaggacaccaggggcagtccatacagccttcccattcacaccaacctacatgtatgcaagaacaggacataccacgagcacacatacagccatgcaaggaaacatggacactgcctctggcctgttgtctacaacttacctccccaggaaaccacaagccatgcacaccggcctcccaaaccccaccaacctggagatgcccagagcatccacgccacgcccactgacagtcacggccgcgctgacatccattacagcctcagtgaaggccacccggttgccaccattgcgagcagaaaacacagatgctgtccttcctgctgcatcggctgcagtggtcacgactggcaaaatggcatccaacctggagtgtcagatgtccagtaagctcctggtgaagacagttctctttctcacccaaaggagagtgcagatcagtgaatccttgaagttcagtatcgccaaagggctcacacaggcattgcggaaggctttccaccagaacgatgtctcagctcacgtggacattctggaatattctcataatgtcacagttggttattatgctaccaaagggaagttggtgtatttgcctgctgtggtgatcgaaatgctgggtgtgtatggagtcagcaacgtcactgcagacctgaagcaacacaccccacacttacagtctgtggcagtacttgcctccccatggaatccccagcctgcaggctacttccagctaaaaacagtgctgcagtttgtgagccaagcggacaacatacagtcctgcaagtttgctcagacaatggaacagaggctgcagaaggcattccaggatgccgagaggaaagtcctgaataccaaaagcaacttgacaattcagattgtgagcacgtccaatgcctcccaggcagtcaccttggtgtacgtcgtgggcaatcagagcacattcctcaacggcaccgtcgccagcagcctcctcagccagctctcggctgagctggtgggattctacctcacctatccgccgctaaccattgctgaaccactggaatatcccaaccttgacatatcagaaacaaccagagactattgggtaattacagtgctgcagggtgtggacaattcgctggtgggcctgcacaaccagagctttgcccgggtcatggagcagcgcctggcccagctattcatgatgtcccagcaacaaggccggcggtttaaacgggccaccaccctgggaagctacactgtgcagatggtgaagatgcagcgtgtcccaggcccgaaggacccagcggagctgacttactataccctgtacaacgggaagcctttgttggggaccgcagctgccaagatcctgagcaccattgattcccaaaggatggccttgacccttcatcacgttgtccttctgcaagctgaccccgtggtgaagaacccgcccaataacctgtggatcatcgctgcagtgctggcgcccattgccgtggtcacggtcatcatcatcatcatcactgccgtgctctgcaggaagaacaagaacgacttcaagcctgacaccatgataaacctgccgcagagagcaaagcctgtgcaaggctttgattatgccaagcaacacctgggccagcaaggggcagatgaggaggtcatccctgtgactcaggagacagtggttctcccactgcccattagagatgctcctcaggaaagagacgtcgctcaggatggaagcaccatcaagaccgccaaatccactgaaaccaggaagagcaggtcgcccagtgagaatggctctgtcatcagcaacgaatcagggaagcccagctcagggagacgctcaccccagaatgtaatggcacagcagaaagtgacaaaggaggaggcaaggaagagaaatgtgccagcgagtgacgaagaggagggagcggttctatttgacaactccagcaaggtggccgctgaaccctttgacacatcttctgggtctgtgcagctcattgccataaaacccacagccctccccatggtgccccccacctcggacaggagccaggagtcatcggcagtcctcaacggcgaggtgaacaaagccctgaagcagaagtcagacatcgagcactatcggaacaagctgcgcctcaaagccaagaggaagggatattacgacttccctgcagtggagacgagcaagggtctgaccgaaagaaagaagatgtatgaaaaagccccgaaggaaatggagcatgttttggatccagattcagaactctgtgctccattcaccgagtctaaaaacaggcaacagatgaagaactctgtctacagaagccggcagtctctgaacagcccgagtccaggggaaaccgagatggaccttctggtgactcgggagcgaccccggcgtggaatccgcaacagcggatacgatactgagcctgaaatcatagaggaaaccaacattgacagagttcctgagccccggggctattccaggtctcgacaggtgaaaggccactcggagacctccacactgagctcccagccatccatcgacgaggtcaggcagcagatgcacatgctgctggaggaggccttcagcctggcatccgcgggccacgcaggccagagccggcaccaagaggcctacggctcagcccagcacctgccctattcggaggtggtgaccagcgctccggggaccatgacgcggcccagggccggggtgcagtgggtgccgacctaccgcccagaaatgtatcagtacagtctgccccggccggcttacaggttttcccagcttcctgagatggtcatgggctcaccgcctccacccgtacctccccggactggtcctgtggctgtcgcttctctcaggcgatccacctcagacatcggcagcaagaccagaatggccgagtctacagggcccgagccggcccagctgcacgacagcgcctccttcacgcagatgtccagaggccctgtgtccgtgacgcagttggatcagtcggctttaaattactcaggtaatacggtgccagcagtgttcgccatcccagctgccaacagacctggcttcaccggctacttcatcccaacgcctccctcatcctataggaaccaggcctggatgtcctatgcaggagagaatgagctcccgagccagtgggcagattcggtgcccctcccagggtacatcgaggcctacccccgatcacggtacccccagagctctccctccaggcttcctcgtcagtacagccagccagccaacctgcaccccagcctggagcaggccccggcgccctccacagcggcctcgcagcagagcctggcagaaaacgacccgtctgacgctcccctgaccaacatctccactgcggcccttgtgaaggccatccgggaggaggtggccaagctggccaaaaaacagacagacatgtttgagttccaggtctaacgccttagccccgtgggactctggacttccaaactctgaggactcagcctttgggtttcccatgcctacgtgttaggacttgagacatagcaatgggtgagtctttctcaccctccatttctgaaaaggtgaactatggggcttctgggaacaggaaactcttgaacgactagattcttggctcatccaactgattgtgggtcaagtccctggcttggggccttatgtttgatactctctcatgtcaaatgtttgaactttgggcatgtgccctatggaagcttagtcacaagaggcactagctaatctacagattcctatccaatgccacattttaataaatcaccggaagcgggagaatgtagctcttatcttcggtgacctctgcatgttaactctgtttctgtgttaaaggcaatgcaggagtgtggattaagcaccagactgtattctcattcaaccatgaccgtgcgcattaaaatcagtttgtaagggagacactgactccagccaagaaacctgagccccttttttttaggttcatattcaaagtcaaatgaactggatgaaagtcagtaccaatggctgtgcctataaatagacctgattctttgtttccctcgtcaattaaacaaaggccaagaaagagagaagatgagagggaatggtggatttgcgttgacagattttttaaaaggtgttgccattttggaaataaaagtcccctacaagttaggatctaactgaaagagaatcggtgctaagagcttttaggatcctacaaaagaaacacagttatttgtgaaggtttttctttgccttgttttgaaggtggcctgagaatggagcttctctttttcttgggataatagatacatcaacttttacaagaaaatctctgtctcttcaacaatgatgtccagtgtgtgctgctgagtggtacaaaaggaaatagtacttgattcctgttagaaacaggagtggtagaaccacagtcttcccaggccgcagcctctgtttatagaagcttctgaatgtagaaaagctgttgaatttcatttaaatgtaaataaccttttaaaaagcgtatggagttagccagttccccctagttaatggacataggaagacatttgctgaaatggtagggtggccactttgtgaccatgatgttgcaagttgccctccctggcatggtgagttggcttccagagctgtgggtagaggacatcgcctcacggcactgaggcaccagccgctgcctacccatcaatgcaagcaaaacagctactgactttgtgtagcagggagattggggactctggttccctcgccaagtgtggcagcctgtgcagtgttgggggcttacttggtatctgttggagaatgaggtcctgtcctgctttcacccatgacccatctagcttcagctgtatccattttcttctgagcccatcttccattgtcctcaacgagtttctttggtctttactgaaagaagatagtagaaatttaaaagttgagagaagactagaaatggaactgattagaaggggaggttcaaactgtcaatgcacagacttttcaaagaagttgtttatattttccaatggcaaactgccctttctggaatgttcagagatgatgtgtcatggaaccttcaaacaagtctcttgttcggatgataataggtagtgtccttttagtatgctggttgatctttcatagtgttagtgttttgttacttaaaaaggaaatcagctataaataaaatgtatttttgtaattcccgtgtgtatatatggtatatttctatcaatggccagttgttgtagtccaaaacctaaatcagtttgcaaaacactgtggacagtgcgagattttattgacaggttaacacaatgcctacgtctatccacataggcattcaatgcacttgaatgaacaaagagccaaagaaactcagcctgttcatgcaaatggtatgagtctgataaaatcagctacattgtcctgctttatcaataataatatttcattagtgcaatgatatcaaccagtactttgtctacttggtaaatgcctggaaatactgtatgtgaaaatgatgtttcaagatcttactgtaattgaagtatacgtaaatgtttcagaagacagtgtctgaaatttggctgtttcaatgacttacagagactgagtctacagtttgcagagctatggctccagagtgctaagagggtggagtcacaaatcactgtggtctttacagagccccaggaaatactgagtgagtcaactgagacgactaaaaagatagcatgctaaatcagatactgtcttaaactagacaccatgggttcaagaatagtattaatagatgagaggaaaaccttaagttggaaagaaatcagtctgttcatgttatcccactcatggggagacagagccactctggtcagattttctgtgagtgagatgtggtcccttccctgaagaatctcctaacctcatagaggtgagagagatgactggacagctgactctaagagatggtcaaaagtgcctcaaggaattgaaataaggttcccagagagccctgaggaggcagcaatgaacaaacaccctgttcatcagaaccctctagatagtcacagaagccacaaaaggaccttggttgaccttggaggaggaagcagaagtaccacgaagtggagtgactggcccagtgattcagtcccaacctcctggttcacgaacctgcttgctttccatctcgccatgtggcctgcaggcttgtcagtaacacatttctttagctgtgcctagaggtttaaaaaaaagataagggtcatatgaagaactccataatgttcttgccaagaaaaaagatgattgagtatataacgaacttcagatacagtgtatagaggatgatgcatttgtggcataataaatagttttcagtgctggttttgatatgagttttctgcattcatgaaaaagaaatgcattttggctttttccagaaagagtaccatcaaggaaacggagacctcaactgctgttctagactgtgggggtgcattcctgtctcagcaccaaggatcccaacaggcaggcagggaggcccttgactttgtgtcactgtgaggcagcagagtccatgctctgcatcaggggaggtgcagtaaaggtccattgtgtggcttgagacctatgatctgaggcttgtgcataataagatggcagctgttacctacagagcaaggagtttcctctttcagggtagattatgtaagaatcaattccctggtcccaggagaagttttattgtgagtttgttaatttaagaactcactcagcagaaggacatgtaatgtctgagtaatcttgatggaagaaaggaaatagatctgtgattaaaacacacacacacacacacacacacacacacacacaccctacttcggagagagaatgtagaatggaggaggtgaggaatttaactaatagagatgctttttctaacaggcagaaattagagaaatggatcaaaagatttaaacattgattacatataaacgagtttcctttttttctacatagcacacaggtgctcaacatttaatgaataatataacagatactgtcttaaaagtttaaaaacaggatttgtacttaatcctaaattcctcttatcacacaccagaaaataatttggattttatttacaaactacatccaaatactcttaaggaaagagtgtcatttagcttggagtagggactgactggggtctaagtgttggaaattaaattctgccattcagtccaacctcaaaggtgttccaggcaaggagttttgcaaggactagaaaccctttcacacttgaagtgcaggtgttggctgaaagaatagagggacatttcacaaacacagaacacggctcccctacaggaaagggatggagacagctacctttgctcttgctctcacattctctgtcctcatggactttcttctctgtttccctctgcctatctatctgcctggttctcttgcttctcctggccaaccagctttctcattagtgcatatgtagctgaaaaatccacccctcaagaacccactccacacaacctttccttttcagtacccaccacgctctgactagcatctctgtgatgcctaaggcaaatttttgaggatctgattggtttagttcatctgcctatgggtgagccaccctggggtcaggtgcctgtccaatcacctgttaccaaggaggcagggccgtgtcatttaagcatggccccatggactgaccctttcagcagggacttttattgggggctggtacccagaagaaggagcatgagtgggcaagaccttcaaaaagaacctactacacactggaactgactagtactcctgggatgccatgccacgcagcagccagcactcggagagcagtcccctggatactaccacacagagaaaaggggcatcttcacttgcacatcaggtgagggtgcacacacttgaaactctgctagactggccagagctgccccagccacttctcaccccaccaccagttattgatacagccgctgggtctaggaagcgatttctgaacaaggcccagttagcacaatgtcttgctcagcagacaataaatacttgtaaattgaattgcatgatcttagctcaggtgctactaatgtggctcacggccacacacttgcatggataagaaaaccaatgagcccctcaacagagtcttttgaaacaaaattggtttcaagtgaaacttacattattttttggctgtgaccttctgaatataataacttagtgtcctgagaattgaaaggcctcttgatttcttaggtgaactgttacagaatcctagcctgtggtaaatgctaaaatgtaaggtgtttctgagaaggaatatttaggaaatataattgtgccacacacacattactttagaagatatgcagttgctctgattctgcaggtttaaaaaaaatgggaagtttgtgatatggcagaatctgtctccattggtcaaaccatacttcagtgagagccattataagtgaaatctaaaaattgatcgttttcattctctgactttggtcagacttttgcaaattatggagagaggccatcaacatattttacataaattactgtggccccatcttatttctcctcatttcttccttatgtttaaacacgcccccatctcacacacaaactgagaaaagatttgtatcaaacagaatcagaggcatatgaatggactggaaattgtgaaaaaggtataaatatcctagaccttgatcaactcactttaaactggtctctgattcctcatctgtcaaatgagtataagaccctctgtacttcccatggtgattttgaggagcacatgcataatgtatctgaaaatggcttgacaagcacttgaagccattcttactaaattattagttttgtaattcggttttatccaggaaaatattttagctcctcctatctgctgaattaatttatacagtcacatgttccatgacaccatgttttgccaaggaaaaataaagaaattcctaaatttgaaattgcccacaagatctagcctcatctggagttgctgttattgtccttgttgtctatgatttggaggatatgtaagtacttgtacatgtgctttaactctgggtgaaaaaccccaaccggtgagtctttaaaaccatattagacacattgggcaaagtactgagcagaagctttgaatgtagctgttgttattttaatgcttcgctttctaatgaactttgtacgtccttagcctctgccgggaacagagtgttcatatgctgttagaattttttattgtaaaataaaatgacaaaggctttcataccccaaaa

SEQ ID NO: 146013 - DNA, 2507 bp, Homo sapiens
  Payload ID: 8951
  Gene Symbol: KIAA1549L
  Gene Name: KIAA1549-like
  ENST ID: ENST00000526400
  CDS Start-End: 1-2507
aaccttccaaggattctaccgagtccctggtccaaccggggcctaaagggggacaagaagcagccgatgtgtcagcggacacagtatcatctaaggtacagccaacagcagcagctgccgtcacattgtttctgaggaaatcaagtccacctgcactgtctgcagccctggttgctaagggcaccagcagcagccctttggccgtggcctcaggaccagctaagagcagttcgatgactactcttgctaaaaatgtcacaaacaaggccgcatctggcccaaagaggacaccaggggcagtccatacagccttcccattcacaccaacctacatgtatgcaagaacaggacataccacgagcacacatacagccatgcaaggaaacatggacactgcctctggcctgttgtctacaacttacctccccaggaaaccacaagccatgcacaccggcctcccaaaccccaccaacctggagatgcccagagcatccacgccacgcccactgacagtcacggccgcgctgacatccattacagcctcagtgaaggccacccggttgccaccattgcgagcagaaaacacagatgctgtccttcctgctgcatcggctgcagtggtcacgactggcaaaatggcatccaacctggagtgtcagatgtccagtaagctcctggtgaagacagttctctttctcacccaaaggagagtgcagatcagtgaatccttgaagttcagtatcgccaaagggctcacacaggcattgcggaaggctttccaccagaacgatgtctcagctcacgtggacattctggaatattctcataatgtcacagttggttattatgctaccaaagggaagttggtgtatttgcctgctgtggtgatcgaaatgctgggtgtgtatggagtcagcaacgtcactgcagacctgaagcaacacaccccacacttacagtctgtggcagtacttgcctccccatggaatccccagcctgcaggctacttccagctaaaaacagtgctgcagtttgtgagccaagcggacaacatacagtcctgcaagtttgctcagacaatggaacagaggctgcagaaggcattccaggatgccgagaggaaagtcctgaataccaaaagcaacttgacaattcagattgtgagcacgtccaatgcctcccaggcagtcaccttggtgtacgtcgtgggcaatcagagcacattcctcaacggcaccgtcgccagcagcctcctcagccagctctcggctgagctggtgggattctacctcacctatccgccgctaaccattgctgaaccactggaatatcccaaccttgacatatcagaaacaaccagagactattgggtaattacagtgctgcagggtgtggacaattcgctggtgggcctgcacaaccagagctttgcccgggtcatggagcagcgcctggcccagctattcatgatgtcccagcaacaaggccggcggtttaaacgggccaccaccctgggaagctacactgtgcagatggtgaagatgcagcgtgtcccaggcccgaaggacccagcggagctgacttactataccctgtacaacgggaagcctttgttggggaccgcagctgccaagatcctgagcaccattgattcccaaaggatggccttgacccttcatcacgttgtccttctgcaagctgaccccgtggtgaagaacccgcccaataacctgtggatcatcgctgcagtgctggcgcccattgccgtggtcacggtcatcatcatcatcatcactgccgtgctctgcaggaagaacaagaacgacttcaagcctgacaccatgataaacctgccgcagagagcaaagcctgtgcaaggctttgattatgccaagcaacacctgggccagcaaggggcagatgaggaggtcatccctgtgactcaggagacagtggttctcccactgcccattagagatgctcctcaggaaagagacgtcgctcaggatggaagcaccatcaagaccgccaaatccactgaaaccaggaagagcaggtcgcccagtgagaatggctctgtcatcagcaacgaatcagggaagcccagctcagggagacgctcaccccagaatgtaatggcacagcagaaagtgacaaaggaggaggcaaggaagagaaatgtgccagcgagtgacgaagaggagggagcggttctatttgacaactccagcaaggtggccgctgaaccctttgacacatcttctgggtctgtgcagctcattgccataaaacccacagccctccccatggtgccccccacctcggacaggagccaggagtcatcggcagtcctcaacggcgaggtgaacaaagccctgaagcagaagtcagacatcgagcactatcggaacaagctgcgcctcaaagccaagaggaagggatattacgacttccctgcagtggagacgagcaagggtctgaccgaaagaaagaagatgtatgaaaaa

SEQ ID NO: 146014 - DNA, 6230 bp, Homo sapiens
  Payload ID: 8952
  Gene Symbol: KIAA1551
  Gene Name: KIAA1551
  Uniprot ID: Q9HCM1
  ENST ID: ENST00000312561
  CDS Start-End: 415-5658
gacttaaactctggggcccgggaggccgccggttttctccccgcttgccggggtggtcctcttccctttgtcggaccaaagaagtaaacactgtgtggagagggactgacgtgtttggagggaaatgggaatgtacacgataattaaagagtaaagttgtgctcaacgctgtttacttctaattatttcctgattcacaaattaatttttgcaattcacaacttcaagaatacttggactattggattcaatccatagtaatctgcaaaagaagagaagcagaattatacctagaagtctactaatggacagttagtcacccacctacatgttgagattcctgacattcagacaactgacttgtaactgacttataactgacttgtaatacactgctactatatcaaaccgacaatgaattggaatgaaaaaccaaagagtgctacattaccaccactgtatcctaaaagccagccaccttttttgcaccagtctttaataaaccaaattaccacaacatctcagagttctttcagctatcctggaagtaaccaagaagcatgcatgtatcccggtaattcaaatccaatttcacagccactgctgaatatccaaaattatcctcaacaaatttctgtttctgatatgcataatgggacagttgtggcctcacacacttcagtagaaagaataacatatgcaaatgttaatggacccaaacaactaactcacaatttgcagatgtcttcaggagttacccaaaacgtatggttgaactcaccaatgaggaatcctgtgcattctcatataggggcaactgtatctcatcaaactgattttggagctaacgtacccaatatgccggcactacagagtcaactgataacatcagatacctattctatgcaaatgcagatgatcccttctaattctacacgacttcctgtagcttaccaaggaaatcagggacttaaccagtctttttcagagcaacaggttgattggacacaacagtgtatatctaagggactgacttacccagattacagaccacctccaaagctataccgttactcaccacaaagctttttaccagattctaccattcaaaaacaaaactttataccacatacatcattgcaagttaaaaatagtcagcttctaaattctgtattaactttaccatcaaggcagacctcagctgtaccatcacagcagtatgccacgcaaactgacaaaagacctcctcctcctccttacaactgtagatatggaagccagcctttgcaaagtactcagcatattactaaacacttgtctatggaagttcctcagagtcgagaaatgctgtcatctgaaataaggaccagctttcaacagcagtggcaaaaccctaatgaaaatgtcagcacaattggaaatttcactaacttgaaagtaaataccaacagcaaacagccttttaacagtcccattagatcttctgtggatggtgttcagactcttgctcaaactaatgaagagaaaataatggattcttgcaatccaacttcaaatcaagtactggacacaagtgttgcaaaagaaaagctagtaagggatattaaaacattagtagagataaaacagaagttttcagaacttgcaaggaaaattaaaatcaataaagatcttttgatggcagcaggttgtattaaaatgactaatacttcttatagtgaaccagctcagaattctaaattgtctctaaaacaaactgccaaaatccagtctggaccccagataactccagtaatgccagagaatgcagagagacaaacaccaacagtagtggaatctgcagaaacaaataagactcaatgtatgttgaattctgacattcaggaagtcaattgcagaaggtttaaccaagttgattctgttttaccaaatcctgtctattctgaaaagcggccaatgccagactcatctcatgatgtgaaagttctcacttcaaagacatcagctgttgagatgacccaggcagtattgaatactcagctttcatcagaaaatgttaccaaagttgagcaaaattcaccagcagtttgtgaaacaatttctgttcccaagtccatgtccactgaggaatataaatcaaaaattcaaaatgaaaatatgctacttctcgctttgctttcacaggcacgtaagactcagaagacagtattaaaagatgctaatcaaactattcaggattctaaaccagacagttgtgaaatgaatccaaatacccaaatgactggtaaccaactgaatttgaagaacatggaaactccaagtacttctaatgtaagtggcagggttttggacaactccttttgcagtggacaagaatcctcaacaaaaggaatgcctgctaaaagtgacagtagctgttccatggaagtgctagcaacctgtctttccctgtggaaaaagcaaccttcagatactgcaaaagaaaaggagtgtgataaactcagaacaaacacaacagcagttggaatttcaaagcctgctaacatccacgttaagagtccttgttcagttgtgggaaattcaaattctcagaataaaataagtaatccctcacagcagacagctttgtcgatggtaatgcacaattatgagtcttcaggtataaatataacaaagggaacagaacttcagatagctgtagtgtcaccgttagttctgtcagaggtcaaaacattgtctgtcaaaggaataacacctgcagtgttacctgaaacagtgtatcccgttattaaagaaggcagtgtttgtagtttacaaaatcaattggcagaaaatgcaaaggcaactgctgctttgaaagttgatgttagtggaccagtagcaagtacagcaacatcaaccaagatttttccactaactcagaaggaaaagcagaatgagtcaactaatggtaattcagaagtcacacctaatgtcaatcaaggaaagcataacaaattagagtcagctatccattctcctatgaacgatcagcaaatctcacaggagtcaaggaatagtactgttgtgagtagtgatacattacagattgacaatatttgttctctggttgaaggtgatacctcttacaattcccaaatagcaaagatattcagctctcttcccttgaaaatggttgagccacagaaaccttctctacccaatcagcaagggattggcagcagagaaccagaaaaacaattagataataccactgaaaataaagactttggttttcaaaaagataaacctgtacagtgcacagatgtttcacataaaatatgtgatcagtcaaagtcagagccacccttagagtcatcttttaacaatcttgaaacaaacagagttattctagagaaaagtagtttggagcatgccactgaaaaaagcacagctaacgatacgtgctcgtcagctgctattcaggaggatatttaccctcaggaaatagatgcatccagcaactatactccccaagatcctgcaagaaatgaaatccacagtgataaggcacctgtcttatacctacatgaccagctgtcagaacttctaaaagagtttccttatggcattgaggctgtgaatacacgtgaaggttctgtgggccagcaaactacataccagacctcagaagatcaaactgctgataaaaccagttctgactccaaagacccagcagatcaaatacaaattacaatattaagctcagagcaaatgaaagaaatatttcctgaacaggatgatcaaccctatgtagtagacaagttggcagaacctcagaaagaagagcccatcacagaagtagttagccagtgtgacctgcaggcacctgcagctggacaaagtcgtgattctgtgatactggactctgagaaagatgatatccactgctgtgcattgggctggctctccatggtttacgaaggagtaccccagtgtcagtgtaattccatcaagaactcatcttcagaggaagagaaacaaaaagagcagtgttctcctttggataccaacagttgtaaacaaggagagagaacttctgatagagatgtcactgttgttcaatttaagagccttgtaaataatccaaagactcctccagatgggaaaagtcattttcctgaactacaagacgacagtagaaaagatacacccaaaacaaaacataaaagcttaccaaggacagaacaagaattagttgctggtcagttttcatctaaatgtgataaactaaatcccttgcaaaatcacaaaagaaaaaaattgaggtttcacgaggtaacctttcactccagtaataaaatgacagcatcttatgaacaagcttctcaggaaacccgacagaagaaacatgtaacacagaactcacgtccactaaaaacaaaaacagcttttttgccaaataaagatgtgtataagaagcatagttctttgggacagtcattatcaccagaaaagataaaattgaaactcaaatcagttagcttcaaacaaaaacgaaagttagaccaagggaacgtattagatatggaagtaaagaaaaagaaacatgataaacaagaacagaaaggaagtgtgggagctacattcaaattaggtgactctttgtcaaacccaaacgaaagagccattgttaaagaaaagatggtatcaaatactaagtctgtagacacgaaagcgagttcatctaaatttagtagaattctaactcctaaggagtatttacaaaggcagaagcataaagaagctctgagtaataaagcatcgaagaaaatctgtgtgaaaaacgtgccatgtgattctgaacatatgagaccaagtaaacttgccgtgcaggttgaaagttgtgggaaatcaaatgagaaacacagcagcggcgtgcagacctctaaagaatcattaaatggcttgacaagccatggtaaaaacctcaaaatccaccattctcaggagtctaaaacatacaacattctaaggaatgttaaagaaaaagttggtgggaagcagcctgataaaatatggattgataagactaaattagacaaattaaccaatataagcaacgaagctcaattcagccaaatgcctccccaagtaaaggatcaaaagaaattatatctgaatagagttgggtttaaatgcactgaacgtgaaagcatttctctcaccaaattagaaagttcacccaggaagcttcataaagataagagacaggaaaataaacataagacctttttaccggtgaaaggtaacacagaaaaatcaaacatgctggagtttaaattatgtccagatatcttactaaagaatacaaactctgtggaagaacggaaggatgtaaagcctcatcctaggaaggagcaagcccctctgcaagtttcaggaataaaaagtacaaaagaagactggttaaaatttgttgctacaaagaaaaggacacagaaagacagccaagagagagataatgttaattcaagactctcgaagagaagcttcagtgcagatggatttgagatgctacaaaacccagtaaaagattcaaaagaaatgtttcaaacctacaaacagatgtacctggagaagagaagcagaagccttggtagcagtcctgtaaaataattacaagatgtggttttgtaattgccactgggaaatttctttccttttctgttcaaaatatttcgctgaaactaatgagaaatgccatgataaagatttctcagagtttggttcccactttcattgtatttcattgaaagtgcttaattaaaatggcttgagaactttgggtagccatgtgtaagaaatggatggtattcaccggggaaacaaggtatttgaatttctactttattgaaccagatttaccattattttaaaaggaatgcttatacaaatcaatttgaaattctacccatcttgagggaggaccgttcctcagttaaggacttgtttatttaaatgggactgtaaatatgttttggtttctaagctatattagcaaaatttatttttcaaaaatgcccactgtgatgtgaatgtcaaaatatattcttaagtgttttataactaattgtaaactttttttcagaagtcttattttatacttgtgaaactgaacacaattttgggacaacgtttaaacattacttttcatacttgaaataaacatttattttttaaaaaactaa

SEQ ID NO: 146015 - DNA, 2326 bp, Homo sapiens
  Payload ID: 8952
  Gene Symbol: KIAA1551
  Gene Name: KIAA1551
  ENST ID: ENST00000381054
  CDS Start-End: 303-2326
attcctaataccttaagtgtacttgtaagtgaagagcaaagttggaggctgttgagctgtttacttctaattatttcctgattcacaaattaatttttgcaattcacaacttcaagaatacttggactattggattcaatccatagtaatctgcaaaagaagagaagcagaattatacctagaagtctactaatggacagttagtcacccacctacatgttgagattcctgacattcagacaactgacttgtaactgacttataactgacttgtaatacactgctactatatcaaaccgacaatgaattggaatgaaaaaccaaagagtgctacattaccaccactgtatcctaaaagccagccaccttttttgcaccagtctttaataaaccaaattaccacaacatctcagagttctttcagctatcctggaagtaaccaagaagcatgcatgtatcccggtaattcaaatccaatttcacagccactgctgaatatccaaaattatcctcaacaaatttctgtttctgatatgcataatgggacagttgtggcctcacacacttcagtagaaagaataacatatgcaaatgttaatggacccaaacaactaactcacaatttgcagatgtcttcaggagttacccaaaacgtatggttgaactcaccaatgaggaatcctgtgcattctcatataggggcaactgtatctcatcaaactgattttggagctaacgtacccaatatgccggcactacagagtcaactgataacatcagatacctattctatgcaaatgcagatgatcccttctaattctacacgacttcctgtagcttaccaaggaaatcagggacttaaccagtctttttcagagcaacaggttgattggacacaacagtgtatatctaagggactgacttacccagattacagaccacctccaaagctataccgttactcaccacaaagctttttaccagattctaccattcaaaaacaaaactttataccacatacatcattgcaagttaaaaatagtcagcttctaaattctgtattaactttaccatcaaggcagacctcagctgtaccatcacagcagtatgccacgcaaactgacaaaagacctcctcctcctccttacaactgtagatatggaagccagcctttgcaaagtactcagcatattactaaacacttgtctatggaagttcctcagagtcgagaaatgctgtcatctgaaataaggaccagctttcaacagcagtggcaaaaccctaatgaaaatgtcagcacaattggaaatttcactaacttgaaagtaaataccaacagcaaacagccttttaacagtcccattagatcttctgtggatggtgttcagactcttgctcaaactaatgaagagaaaataatggattcttgcaatccaacttcaaatcaagtactggacacaagtgttgcaaaagaaaagctagtaagggatattaaaacattagtagagataaaacagaagttttcagaacttgcaaggaaaattaaaatcaataaagatcttttgatggcagcaggttgtattaaaatgactaatacttcttatagtgaaccagctcagaattctaaattgtctctaaaacaaactgccaaaatccagtctggaccccagataactccagtaatgccagagaatgcagagagacaaacaccaacagtagtggaatctgcagaaacaaataagactcaatgtatgttgaattctgacattcaggaagtcaattgcagaaggtttaaccaagttgattctgttttaccaaatcctgtctattctgaaaagcggccaatgccagactcatctcatgatgtgaaagttctcacttcaaagacatcagctgttgagatgacccaggcagtattgaatactcagctttcatcagaaaatgttaccaaagttgagcaaaattcaccagcagtttgtgaaacaatttctgttcccaagtccatgtccactgaggaatataaatcaaaaattcaaaatgaaaatatgctacttctcgctttgctttcacaggcacgtaagactcagaagacagtattaaaagatgctaatcaaactattcaggattctaaaccagacagttgtgaaatgaatccaaatacccaaatgactggtaaccaactgaatttgaagaacatggaaactccaagtacttctaatgtaagtggcagggttttggacaactccttttgcagtggacaagaatcctcaacaaaaggaatgcctgctaaaagtgacagtagctgttccatggaagtgctagcaac

SEQ ID NO: 146016 - DNA, 362 bp, Homo sapiens
  Payload ID: 8952
  Gene Symbol: KIAA1551
  Gene Name: KIAA1551
  ENST ID: ENST00000540924
  CDS Start-End: 258-362
ggaccccacttgacttaaactctggggcccgggaggccgccggttttctccccgcttgccggggtggtcctcttccctttgtcggaccaaagaagtaaacactgtgtggagagggactgacgtgtttggagggaaatgggaatgtacacgataattaaagagtaaagttgtgctcaacgattcctgacattcagacaactgacttgtaactgacttataactgacttgtaatacactgctactatatcaaaccgacaatgaattggaatgaaaaaccaaagagtgctacattaccaccactgtatcctaaaagccagccaccttttttgcaccagtctttaataaaccaaattaccacaaca

SEQ ID NO: 146017 - DNA, 2933 bp, Homo sapiens
  Payload ID: 8953
  Gene Symbol: KIAA1586
  Gene Name: KIAA1586
  Uniprot ID: Q9HCI6
  ENST ID: ENST00000370733
  CDS Start-End: 208-2571
gagaaagaggctccggggagatagcggaccagtgagggctgcccctcttttgaagcggttttcgtctctttccgccagtggcctcccagctcacgcaggggcgggtcccggtagcgcgaggcggtgcagggcgggaaggggagtggtggcggctgcggcagtagggacagcaggagcagtggtgctgtcagcgcggccgtcggagacatgggagacccggggtcggaaataatagaatctgtccctccagctggccctgaggcatctgagtcaacaacggatgaaaatgaagacgacattcagtttgtcagtgaaggaccatcgagacctgttcttgaatacatcgatctggtctgtggtgatgatgaaaaccctagcgcctattatagtgatattctgtttcctaaaatgccaaaacgacagggtgattttttgcattttttaaatgtgaagaaggtgaaaacagacacagaaaataatgaagtgagcaaaaatcactgcagattgtctaaggcaaaggaaccacatttcgagtatattgaacaaccaatcattgaagaaaagccatcactttcatcaaagaaagaaatagataatcttgtgcttccagattgttggaatgaaaaacaagcatttatgtttacagaacaatacaaatggcttgaaataaaagaaggtaaattaggatgtaaggattgttcagcagttcggcatttgggatcgaaagcagaaaagcatgtccatgtgtccaaggaatggattgcatatttagtaacccctaatggcagtaataaaactactaggcaagcttctctacgaaaaaaaattagggaacatgatgtttctaaagcccatggtaaaattcaggatttgttaaaggaatcaactaatgattcaatttgtaatttagtgcataaacaaaataataaaaatattgatgctactgtaaaagttttcaatactgtttacagtttagtaaaacataacagacctttatctgatattgagggggcaagagaattacaggaaaaaaatggagaggtaaattgtttaaatacacgttacagtgcaacaagaatagcagaacatattgcaaaagaaatgaagatgaagatatttaagaatattatagaagagaatgccaaaatctgtatcataattgatgaggcatctacagtttcaaagaaaaccaccctagtgatttatctccagtgcacaattcagtcagctcctgcacctgttatgttatttgtggctttaaaagaattggtgtcaactatagcagagtgtattgtcaatacattattgactactttaaatgattgtggttttacaaatgaatatttgaaagcaaatttaattgcattttgttctgatggtgctaatacaatcctgggaagaaagtctggagtagctacaaaattgttagaaaattttcctgaaatcatcatttggaactgtttaaatcatcgattacaattgtcacttgatgattctatatccgaaataaaacaaattaatcatttaaaaatatttattgataaaatttattctatttatcatcaacctaataaaaatcaaaccaagcttctaggaactgtagctaaagaacttgaaactgaaattattaaaattggtcgagtaatgggaccaagatgggcggcatgtagtttacaagctgctactgctgtatggcatgcatatcctatattatatatgcatttttctcattcttactctggtttggcgaagagattagctaacattaatttcttacaagaccttgctttaatgattgacattcttgaagaattttcagtactttcaactgcattacagtcaagatcaactaatattaagaaagcacaaaaattgatcaaacgtaccataagagctttggaaaatttaaaaattggtactggaaagtatgaatctcaaattgaagatttgatcaagtcagataagtttaaagatattccatttaataaaaacaataaatttaatgctcttcctaggagtatattactagacaatataattcagcacatgaacctacgccttttatctgacagaaaccatgaagatatttttaattactttgatttgctggaaccttccacatggccttatgaagaaataacttcaccatggatagctggtgaaaaaacattatttcatttgtgtaaaattttaaaatatgaagttgatttgaatgattttcgggaatttgtaaataataatataaaatcaaacaatgtttcaattcctacaactatatacaaagctaaaaagatagttagcaccattgcaatcaatagtgctgaagctgaaaggggtttcaatttaatgaacataatttgtacaagggtgagaaatagtttaacaatagatcatgtatcagatttaatgacaataaatttactggggaaagaattagcagattgggatgcaacaccgtttgtaaaatcttggtcaaattgcaaccacaggttggctacagatacaagagttcggcaaaagtcaacaaaagtcttccatgagaatcaattggctatatggaacttaaaatagaatattgtatacgttttttgtcatctgtaaattatgtactacacatcctttatatacataaaggtcttttttttttttggaaagccagttaaacttttatcagcatgttgctgtttaaaaggcgttctttaagaagataatcttgaagattggttttagaagctatagttttttagagattggcccatgtttgctagagtgggtcataatacatattccatgaagttctgtacagaacaaacaccgtttataattttgtactgttttactttaagtaaggatgcaaaaaatagcaggactcagctaagttctaagccctggaggttatattaaataaaagagaaatggaataaaaactgtaa

SEQ ID NO: 146018 - DNA, 2883 bp, Homo sapiens
  Payload ID: 8953
  Gene Symbol: KIAA1586
  Gene Name: KIAA1586
  ENST ID: ENST00000545356
  CDS Start-End: 225-2507
aggaagcccgggaatgagagaaagaggctccggggagatagcggaccagtgagggctgcccctcttttgaagcggttttcgtctctttccgccagtggcctcccagctcacgcaggggcgggtcccggtagcgcgaggcggtgcagggcgggaaggggagtggtggcggctgcggcagtagggacagcaggagcagtggtgctgtcagcgcggccgtcggagacatgggagacccggggtcggaaataatagaatctgtccctccagctggccctgaggcatctgagtcaacaacggatgaaaatgaagacgacattcagtttgtcagtattctgtttcctaaaatgccaaaacgacagggtgattttttgcattttttaaatgtgaagaaggtgaaaacagacacagaaaataatgaagtgagcaaaaatcactgcagattgtctaaggcaaaggaaccacatttcgagtatattgaacaaccaatcattgaagaaaagccatcactttcatcaaagaaagaaatagataatcttgtgcttccagattgttggaatgaaaaacaagcatttatgtttacagaacaatacaaatggcttgaaataaaagaaggtaaattaggatgtaaggattgttcagcagttcggcatttgggatcgaaagcagaaaagcatgtccatgtgtccaaggaatggattgcatatttagtaacccctaatggcagtaataaaactactaggcaagcttctctacgaaaaaaaattagggaacatgatgtttctaaagcccatggtaaaattcaggatttgttaaaggaatcaactaatgattcaatttgtaatttagtgcataaacaaaataataaaaatattgatgctactgtaaaagttttcaatactgtttacagtttagtaaaacataacagacctttatctgatattgagggggcaagagaattacaggaaaaaaatggagaggtaaattgtttaaatacacgttacagtgcaacaagaatagcagaacatattgcaaaagaaatgaagatgaagatatttaagaatattatagaagagaatgccaaaatctgtatcataattgatgaggcatctacagtttcaaagaaaaccaccctagtgatttatctccagtgcacaattcagtcagctcctgcacctgttatgttatttgtggctttaaaagaattggtgtcaactatagcagagtgtattgtcaatacattattgactactttaaatgattgtggttttacaaatgaatatttgaaagcaaatttaattgcattttgttctgatggtgctaatacaatcctgggaagaaagtctggagtagctacaaaattgttagaaaattttcctgaaatcatcatttggaactgtttaaatcatcgattacaattgtcacttgatgattctatatccgaaataaaacaaattaatcatttaaaaatatttattgataaaatttattctatttatcatcaacctaataaaaatcaaaccaagcttctaggaactgtagctaaagaacttgaaactgaaattattaaaattggtcgagtaatgggaccaagatgggcggcatgtagtttacaagctgctactgctgtatggcatgcatatcctatattatatatgcatttttctcattcttactctggtttggcgaagagattagctaacattaatttcttacaagaccttgctttaatgattgacattcttgaagaattttcagtactttcaactgcattacagtcaagatcaactaatattaagaaagcacaaaaattgatcaaacgtaccataagagctttggaaaatttaaaaattggtactggaaagtatgaatctcaaattgaagatttgatcaagtcagataagtttaaagatattccatttaataaaaacaataaatttaatgctcttcctaggagtatattactagacaatataattcagcacatgaacctacgccttttatctgacagaaaccatgaagatatttttaattactttgatttgctggaaccttccacatggccttatgaagaaataacttcaccatggatagctggtgaaaaaacattatttcatttgtgtaaaattttaaaatatgaagttgatttgaatgattttcgggaatttgtaaataataatataaaatcaaacaatgtttcaattcctacaactatatacaaagctaaaaagatagttagcaccattgcaatcaatagtgctgaagctgaaaggggtttcaatttaatgaacataatttgtacaagggtgagaaatagtttaacaatagatcatgtatcagatttaatgacaataaatttactggggaaagaattagcagattgggatgcaacaccgtttgtaaaatcttggtcaaattgcaaccacaggttggctacagatacaagagttcggcaaaagtcaacaaaagtcttccatgagaatcaattggctatatggaacttaaaatagaatattgtatacgttttttgtcatctgtaaattatgtactacacatcctttatatacataaaggtcttttttttttttggaaagccagttaaacttttatcagcatgttgctgtttaaaaggcgttctttaagaagataatcttgaagattggttttagaagctatagttttttagagattggcccatgtttgctagagtgggtcataatacatattccatgaagttctgtacagaacaaacaccgtttataattttgtactgttttactttaagtaaggatgcaaaaaatagcaggactcagctaagttctaagccctggaggttatattaaataaaagagaaatggaataaaaactgtaagccttttggctctt

SEQ ID NO: 146019 - DNA, 3309 bp, Homo sapiens
  Payload ID: 8954
  Gene Symbol: KIAA1614
  Gene Name: KIAA1614
  Uniprot ID: Q5VZ46
  ENST ID: ENST00000367587
  CDS Start-End: 360-2795
agatcctcttgaggtctctgcctccagtgcctgagcagatgtccaaggccgggccagctccccagcccccatccagagccacgcagggccatttcccagccccaggccccaggccccaggcccccaggctgggttccctgtgcgtgggtgctagaggaggaaggctgcacatgcagggctttttctggcacagccagtgcttgacactgctaaagccctcctaatctgcgttattttcctctaatccctcccccaccaccctggcctgtgtgccacgctgcaggaccgttggtcccaacccggagcctgtgctgagccccaggcatgaggaagccacgcatctgctgcagcgtgcccgcatgaaggccaggacccggcccctccgtgccagccatgacatcgtgcccaccattacccagggcagccgagatggccacagaagcccagcccgggaccccaggacgacccctgcctgcagagacagcctccagaacgggcacacgagcgattcctccagcggagagtccagcggtgggcacaggccgaggcggggcccctcgccgtcgcacgtgcgctttgaggatgagtccgcccgcgaagccgagttccgtcacctggagcggctgcagcagcgccagcgccaggtgctgagcaccgtgttgcaggccgcggaccagggccccctgcgctccaagcccgacctcgccgactacatcaacggggctccccggctccgggacgcggggcaggggacattccacaggcttgtgggcagcctggaccgcaggggacacccggcaccgccggcaccgggcagcgagaggaggtgccaggcctgcggcagctgcatcgacgacccgcgccccgcccaggggaaggcgccccccgtccccaggaccctccaggagctccaggctgcctgtgggatggagagggtgctgggtggcctgagctccccactccggctccttcctgcagagccccggctccacatggaatggatccgggaaacacacatcggagacaccgtgtgccctgcggaggtggactctgccctggacagcacagacaactctgacaactgcaggaccgacagtgaggaggcggggacctctcaggctggctgggcgtgtgggcggacccaaggcagcagcccgcgactgcgactgcggggctccaggcctcgaggccacaggtggtccaagaaggctgaggcggagctcccttggggccttcaggcccagcaacacctgcctagggctgatgatgtggaggtggaaaatgaggtgaaagagggcagaggacacacgcctgaaggaactctatttttgagagaagatgccaagcctcctgacctggagttgaagcgggtgtccctgggaccccagtggcagcctggaccagggctgggaagtcaccagcctcaccctttggattcccggactccatgcaggacagcctatgccaccaccgcccccatgacgcctgaatcatcggggccaggaggccaggcccaggttacagaaagccacgagtccctggaaattgtctctccttcctccctgcaacagagccatgcagagccttctgccccacaccaagcctggcagccaacagcttccttgtgtcctgaaggctgggcgccaacccctcccccttcgaggaaaaccacctcgccagtgtctcacaggaaggcagccctggctggactgctcaggctgggtgaccagacagagcctgtgggtatccctcggcctccttcaagaagcgcggttctcaggacctgtgagctgcccccatcacagacccagcccagccgccctcaggtcaggcacccactgctggccctgtccaccaacaactgcaacaacagcgcacctcgggggctgcaggagccctacgggggagccgtccacgagggtagggtggagaggggcccctgcagccgggaaccggagccgcccctggagaacagcagagatggaggaccccagggctttcttggctcagcagatgttgccaccatcaactccacgggcatcaccctctccctgtcctcagaggagtcagagtccagcaaggaatcagagggaagcctgcagaggacagggtcaggatctggaggacatgtgctgtcaagagcatcagcaggagctggcacaggacccggctccccctcggctgcccctttggaccagaacaagaaaaggagcagcagcatagcctccaccctggggctgaaaaagctcttctcagccctgggccagagttcccggcccaagctgggcaagtcccgcagctacagtgtggagcagttgcagcccgccccgcctggcctgacgtcacagtccagggccccatcgttacaatccctgcacccggtgtcaccctctcaccagcgtcggaaagctgcctcttttcagaacctccattctctgctgagcagcaaggggaaccggtccagcctctacctggtagcagggccaggggaccacagtgcagctggcaggccggccaagacttcaccacggcgtgccctcagtgtggaggacgtgggtgctcccagcctggctcgcaccgtgggccgcctggtggaggtgttcccagacggcaccagccagctgcagctgcagcgctccccagggggcactttcggcttctgcgtggcctctgggaatgggcgcccagactcaggtatgccctctcctcttcctcagccccatggctggggcggccttagcaaacaaggcagggccttctggctgtggtcagaggcttttctggtctttggctgagccgtgcagctctgggaattcagaaagcctctgactacaggactaggcttctcccctcaggggctctttctgaattgtccagggctctctaggagtctgcacctgcagagcctttgccctaggcaactgcagctgagagtgcgttggtggggagtgtgcgggagggggtagagttggcaggtttgactccactgtccccctgctgtctgatgacatcttgaaattagaagcttaggccgggcgcagtggctcatgcctgtaatcccagaactttgggaggccgaggcgcctggatcacctgaggtcaggagttcgagaccagtctggcccacatggtgaaacccatgtctactaaaaatacaaaattagctgggcgtggtggcgcatgcctataatcccagctacttgggaggctgaggcaggagaattgcttgaacccgggaggtagaggttgcagtgagccgagattgcgccattgcactccagcctgggcaacaagagcaaaacttcatct

SEQ ID NO: 146020 - DNA, 9654 bp, Homo sapiens
  Payload ID: 8954
  Gene Symbol: KIAA1614
  Gene Name: KIAA1614
  Uniprot ID: Q5VZ46
  ENST ID: ENST00000367588
  CDS Start-End: 56-3628
cagcagctggcctgggagggagaaggggctggagagggcctggcctctccgagggatggaggggacagaggcggcggcggccaaacccgcgggcggcagcccccaagggcccaagacagggagtggaacagccagccccgtggaggggacctcagctgtggagtggagtggtcctgagccacagctggataacggacaccccccaagaccctggccttgccctcaggaaaacagaacatccagcctgatggccccccagcctcccagggtatggggagtacagctccagggcccctctgtgctggaatccaaggtgagggctttgaaggagaagatgacagtggccaaacagggagtgagtccctgctctgcttcccaagagtggtcatcccccaagaaaccccaatgcagacgaggcaaggcagggagagccgggactccatcagaggggtctttcctgccaggtgctgtggtggctcctcgtacccaaaacctgcctgatgggcagctggacggcagcatcaatgaggagcaacccgccagggatggaggccccaggcttcccaggccgcctgcccctggacgtgagtactgcaacagggggagcccgtggcctccagaagccgaatggacacttcctgaccatgacagaggtccgctgctggggcccagctctttgcaacagagcccgatccatggagttactcccggacggcctgggggtcctggtcattgtaacaaaatcatccacattcccagcccaaggacaggaaggtcctacccttttccagatggcgtggtgacagaggcagatctggatagcacatccctgacctccgaggaggtctttgtccccaggacggccctgctgggtgagcgctggagagctggagacctggaggctctgggcgctgggagcagtgtcttgtccctgtctgatcgggtggagagaaaccgcctgttgctgcaggagatgctcaacgtttctgggcagagcccccgcaaggtgggaacccctgcctggactccatcctgggacacagctgcaccagagcgaccagtgggggatgtggactgggcctcgggcacctccttgcaggactccggccagaacaggaccgttggtcccaacccggagcctgtgctgagccccaggcatgaggaagccacgcatctgctgcagcgtgcccgcatgaaggccaggacccggcccctccgtgccagccatgacatcgtgcccaccattacccagggcagccgagatggccacagaagcccagcccgggaccccaggacgacccctgcctgcagagacagcctccagaacgggcacacgagcgattcctccagcggagagtccagcggtgggcacaggccgaggcggggcccctcgccgtcgcacgtgcgctttgaggatgagtccgcccgcgaagccgagttccgtcacctggagcggctgcagcagcgccagcgccaggtgctgagcaccgtgttgcaggccgcggaccagggccccctgcgctccaagcccgacctcgccgactacatcaacggggctccccggctccgggacgcggggcaggggacattccacaggcttgtgggcagcctggaccgcaggggacacccggcaccgccggcaccgggcagcgagaggaggtgccaggcctgcggcagctgcatcgacgacccgcgccccgcccaggggaaggcgccccccgtccccaggaccctccaggagctccaggctgcctgtgggatggagagggtgctgggtggcctgagctccccactccggctccttcctgcagagccccggctccacatggaatggatccgggaaacacacatcggagacaccgtgtgccctgcggaggtggactctgccctggacagcacagacaactctgacaactgcaggaccgacagtgaggaggcggggacctctcaggctggctgggcgtgtgggcggacccaaggcagcagcccgcgactgcgactgcggggctccaggcctcgaggccacaggtggtccaagaaggctgaggcggagctcccttggggccttcaggcccagcaacacctgcctagggctgatgatgtggaggtggaaaatgaggtgaaagagggcagaggacacacgcctgaaggaactctatttttgagagaagatgccaagcctcctgacctggagttgaagcgggtgtccctgggaccccagtggcagcctggaccagggctgggaagtcaccagcctcaccctttggattcccggactccatgcaggacagcctatgccaccaccgcccccatgacgcctgaatcatcggggccaggaggccaggcccaggttacagaaagccacgagtccctggaaattgtctctccttcctccctgcaacagagccatgcagagccttctgccccacaccaagcctggcagccaacagcttccttgtgtcctgaaggctgggcgccaacccctcccccttcgaggaaaaccacctcgccagtgtctcacaggaaggcagccctggctggactgctcaggctgggtgaccagacagagcctgtgggtatccctcggcctccttcaagaagcgcggttctcaggacctgtgagctgcccccatcacagacccagcccagccgccctcaggtcaggcacccactgctggccctgtccaccaacaactgcaacaacagcgcacctcgggggctgcaggagccctacgggggagccgtccacgagggtagggtggagaggggcccctgcagccgggaaccggagccgcccctggagaacagcagagatggaggaccccagggctttcttggctcagcagatgttgccaccatcaactccacgggcatcaccctctccctgtcctcagaggagtcagagtccagcaaggaatcagagggaagcctgcagaggacagggtcaggatctggaggacatgtgctgtcaagagcatcagcaggagctggcacaggacccggctccccctcggctgcccctttggaccagaacaagaaaaggagcagcagcatagcctccaccctggggctgaaaaagctcttctcagccctgggccagagttcccggcccaagctgggcaagtcccgcagctacagtgtggagcagttgcagcccgccccgcctggcctgacgtcacagtccagggccccatcgttacaatccctgcacccggtgtcaccctctcaccagcgtcggaaagctgcctcttttcagaacctccattctctgctgagcagcaaggggaaccggtccagcctctacctggtagcagggccaggggaccacagtgcagctggcaggccggccaagacttcaccacggcgtgccctcagtgtggaggacgtgggtgctcccagcctggctcgcaccgtgggccgcctggtggaggtgttcccagacggcaccagccagctgcagctgcagcgctccccagggggcactttcggcttctgcgtggcctctgggaatgggcgcccagactcaggtatgccctctcctcttcctcagccccatggctggggcggccttagcaaacaaggcagggccttctggctgtggtcagaggcttttctggtctttggctgagccgtgcagctctgggaattcagaaagcctctgactacaggactaggcttctcccctcaggggctctttctgaattgtccagggctctctaggagtctgcacctgcagagcctttgccctaggcaactgcagctgagagtgcgttggtggggagtgtgcgggagggggtagagttggcaggtttgactccactgtccccctgctgtctgatgacatcttgaaattagaagcttaggccgggcgcagtggctcatgcctgtaatcccagaactttgggaggccgaggcgcctggatcacctgaggtcaggagttcgagaccagtctggcccacatggtgaaacccatgtctactaaaaatacaaaattagctgggcgtggtggcgcatgcctataatcccagctacttgggaggctgaggcaggagaattgcttgaacccgggaggtagaggttgcagtgagccgagattgcgccattgcactccagcctgggcaacaagagcaaaacttcatctcaaaggaaaaaaaaaaagaaataaataaattagaattttgaaggccatctttgcagaggagagccagagggaaactgtctgtgcctgctggttctcagcagtccctttgatgtggctgcgttgaaacggttcctttcctccggctgtggagtatgtctgggcacgtggagcatgcctgtctgtctctgcatcccgtccctccctcaggcctgtgcccgatgattatgttcagatgaatcctggctgcaggcctctgactggggtgtgctctgggtctcaattcaacccaggcaatggcagggagaagtcctggacatcattctgcactctgaccagttctcagttccaccccatccatgagtctttcagggcaacgtgacttgcaaaagcccacgcccaaggtctgtggtccagaatgcatctcaagggcccataaaagacattccccagaggatcagggaaggaagacacgtatgtgagggtggggaaggaggggaggggaaggaaggagagagaaagggagagacagatacagaaagacgaacacagaagcctgctgcggccgggctctgccgatggggggttgagtcctgtgctttgatctcctagctcaatgctgtttagcctggaaaaaagtctgcctgctaccacatttgcagaccacagcatgagttctcatgtctgttccatcattgtttcagcaaatatatactaagcacctactatgtgttatagatacgggggatacagcagtaaatggaacagaccaaatccctatcctcatgaatatactacccagtgagcagttagattgtatctataaaatgtgtactcttgttatgtataatgtgctacgtatgtcagatggtgaaaagaaagttctgagaaacagacagataaagcaggtgtggcaggtgctggtatagacaggagtgtggggaggcttttctgagaagatgacacttgagcagggccgtggatggggcgaggaaggggccccatgggtgtctggggaagagcattccggcagactgaacagcaagtgcggagccctggtggaggggcgagcctggcctgtgagaactgtgagggtcaggctggacactgcagagcaggcaacgggttgggaggagcagagtttggaaagatggggttgtgccactgtaaggggctttggctttcatgccgaatgagatgggagccactagagggctcggagcgagcactgagactctctaatgtctatgagaatagaccccagtgggacacgggtggagccagggagccctgtgttgaagctatttcagcagtccaggacagagacagtggtgcctggactgggaacggctgtggagatggggagaggggagaggggacaggggttggattctggttgatttgactatttgctgatgagctggacatgtaagaggaagagaggacaggtctctgcctactctggacctcaggaggataaaaagtccttcctcacaggccttcccgtagcctcctctcccgttaggggagcaggacaggccccccggacaggtggtgtgaaggcagaggcagacaacgcagcatgtttgtgctccggcacctctgctggctatgtgatctagagcaggcgacatccccactgagcctcactcagttccctaatctgtgaaatgaggatgacaaaacctacctagaagagtcataaggagcatttggtaaggcacacaggaaagggcctagcatttttcttccctccccttcagaaagagaaagtctggggaagagaaccccagacagggaccagcgtgatccgcattcacctgtcgatgtgagtgcacacacaacaggtcattgtactctgccgcccaccctcccccagagtccctttttgctcccttgtaggcagtgggagcccctccctgtcacccgtcagggagctctgatgggcaggggtctctagtgacccagggcccccggcaccctcgcctgagttggtgccagctccccgttgtgcccaggcactccctggtcctgctgccatcatgggcgctggatggcacacaggggtccccacgcacatgaagcctggcgagtgctggggcctccgtgtcccaggccatcctccaacagcagagggtcgcttcttccaggctccaaggggctgtgaggagggctggcttgcgccccgcactgaaccggcaggatgctggtattaacttgctggctttcacatccgactctatatgagcctgtgagaacagcaggctttgccttctgcttctaattggatacaacatagagatcacacatcctcaacaaaggccatttccagcagacaataaatgcctatgacagcaggctgtcatatttgtgtcacgaatttcagttgcgaaacctacccgagtctccccaaaatggcaggcgtgacgtcagtgtctggcctagctctggcagcattctttcagggtttatcattagtccccacctgcaactcccacagcacatcagacacttctctgggtttgccccaggggccccttcttacctgccccctccccgtgccaccaacccgtagacagggagggcaagcagtgaaaggtccatctagaggaggtaaaagacagggctgagggaaaacgccttgtacagtcaggatggcagatgtactctgtcagggaagacagccccacagaaaaggctcggcttggccaagaagcaacaaaagggattctacacctcagaccagggagggggaatgtgtacaaagattggatttactaaattcagagccacagactttcaggtacttcggtgaagatcagtgctctttcaaacccacacttcagaggcaggctttaaaacgcctgacttctgtcagggccacaggctgggctgcccaaagctcctacggggctgggggatccgagagaggacttcccactagtccaagatgtggtgactagtttcaagccagagattgaggagcagacctgatgccctttcgggcccctgctaagaacctgattcgaggaaaaggaagtgaagacagtaacgcgtgggcagtggcctcatgtctgaaatgcagagtgagccgagctgggctgcgaacagcgagggtgccaaaggctgcgctgagcagcctgaattccgccagtgctgatgcccacaccaggggtgtgccccgcagtccctccagcaaactcagcttgtgtctcagcccctgtgtccacccagcatgaagcatgggcatcagggggtccagcctgccctgggagagccagcacctcacttactctcccaggtgggagcagctggaggggaatttgaaaggtttccagccgcggttgaggccggcgggcgggggttgggggcagggggcctcctcagctggacacttcccagcccagccagcccaagccccacagggcctgccccactgacggggggctccctgagagccggagcctggcaaagaagcagagaagctagttcccgcaggctggctcttggcaccttctagacccaggcagggcctctttggggtggggaggagggggcatgtgcagaagaggagagggagccaccgcagctttgaaatatgtggctagaatttttatttttcctggggttttttgctcagatgcttccccatcccaattgaggagccatatctgagtaagactgaggccagtgtcagtctttggcaatagagtgcagcaaaccaggcttggatgtggctcagccacttttgctcttccgatgataccttcccaccaccccggcctttacgctgggcctgggtgacctgaggcagcaactggatcatagtgccaggcactgagtaggtatggttcctaatttttaaaaactattttcctcccaattctacaagaaaagctcatctcagaaaaagattagctcactcactgtcaggtataaataaatgacaacagtttaacgcgttatttgcactaggagcatttccactttaaaagcagagacagtggaatggagttagaccatggaggaggcgcactgtatctatgtctaaagccagttgtggttgtgagatggaataatgaggggtgtgtgtatgtgtgcatgcgcacagagaagtgcctggtatgagcacctcctccctgtgccacacaaacagcacctcatcaacatggtcagcattccagagatgcacttcttcgatttgggtgtcattgtgaaattctcctgttttcctctgcagggatctacgtgcaggagatggctgacatgagcatggccaagctgtactcagggctgctgggggtgggcgatgagatcctcgaggtgaacggggccaaggtggcagggctgggcttggctcacattaaggagctcctggcccactcagagagcttgtcaatccgtgtcctgaggcagagacctgtcccacggtgacccagaagtgccgctgccctcactgtcacggcctcggaagccctgaagcactcagggtggttggcaggaacgtgctgcacagagctgctctgtggcggaaacagatcctggcagcatctaaccccttgggctgtggcagggcttctgtggtgggctgcctttgggagacgcaaggagcctgtttgcatattttgtttaaggccatttatccagaactagaaaaagaaaaaaatgggtctccttccatgtctgagggggtgtcaacatctacttgtacctttgttggcagggggagaagggagattcagtggatcctttggttgatgcctgagagccggcctcacctcctggtcccatgcctggtcaaaggctacagcctccaacactgtggaaccaaagaaagcacatgtccatattggccttgacccttccctatttcagccacgttcctccctactccattcactgcccttgccctttatccagaaatgggcaaagtgtcccggaataccagccttacagccattgaccatatatgccaaaccaaaatcagaacgtgtggtctggcaggagttttatgccccttcggggtgtgggaattctgggagatgttatctggtagccagaatattaaaaatttctaggaaaatttttttatacataaagttgaaaacaacaacaacaacaacaaagaccaatttcaggacgtgctactgtggtagccaggatccagctagtgggaccggccagaccagccccatgccaccccggccgctgcctctgcccaggtggaggcaagagttgctgcaacctgacctgtggcagcctccatcttagttctgtccagcttggagacagggctgcggcaggtgcctggccatcacagctgcatgctttctgcccagacctcctggcggtgctgtcggtgggcaggtgggtgggtgggcagcagggaagctgcagagcgcggctgggccatctgcctgggcctcagtgctgcctggagggctgggactctttgggagtggatggccatgtgtcagtcttaacttactaaaaagcaaagctaaagcttctctca

SEQ ID NO: 146021 - DNA, 6751 bp, Homo sapiens
  Payload ID: 8955
  Gene Symbol: KIAA1644
  Gene Name: KIAA1644
  Uniprot ID: Q3SXP7
  ENST ID: ENST00000381176
  CDS Start-End: 134-733
aaggttggtggcaaccaggagccggggaagaggccagcagctgcagggagaccgcagccagcggagggggcttctgatccctcagtcacagggctcggcaggcagctctggacggatcaatgcaagccagacgatgaccagttgtggccagcagtccttgaacgtgctcgccgtcctcttctcattgctgttttctgcagtcttgtctgcacatttccgggtctgtgaaccatacacagaccacaaaggccgctaccactttggcttccactgcccccggctctcggacaacaagaccttcatcctctgttgtcaccataacaacacggtcttcaaatactgctgcaacgagacggagttccaggcggtgatgcaggcgaacctcacggccagctccgagggttacatgcacaacaattacaccgccttgttgggagtgtggatctatggatttttcgtgttgatgctgctggttctggaccttttgtattactcggcaatgaactacgacatctgcaaggtctacctggcacggtggggcatccaaggacgatggatgaaacaggacccccggcggtgggggaaccccgctcgggcccctcggccgggtcagcgggccccacagccgcagcctcccccaggcccgctgccacaagccccacaggccgtgcacacattgcggggagatgctcacagcccaccgctgatgaccttccagagttcgtctgcctgaaaacgcttttgctgtgcctcaggatgggggagatgagatctgaagcacccggtgcagcctccgagaagaacaacttctacagagatgccagggacagccgaggtagcggcggtggcacaggaggaaatgctgcctgtgcccaaagcccccttccgcggacttctaagattaggagcaaactcaggggtaggggctgggggtgcaggggaggggattctgagccacctgtccgcaagcaatagtcctattttgggctggtggcttctgagaggtgactcattgtggactcaggatgaccaagacaaagcaactctggctgattccagccaggaggattgaggcctgtgagttatacctgtggttgaaaaccgaagcttcccttgcccctgctccctccagtagtggccccttggggctatttgtgtcagaatattgaatgtgcgtgtgtgtgtgcgtgtgtgtgatttggggtgttctttttgtttgcttggttggttggtttttattggggcttcccccctcaagttctctgatgggcatgagtcaccctccggctgggggttctcatccgtgtcaatgtccgagccgcaagcttattgctaagcacagggtacggcccctctgtgtctcggggagcactggggatttgaaaatgccagtcagggttgtttcttacagaattcgttcctgtaacaatagtaatactaagggctgcatctcaggctgaccacagggcaggtgccaagttaagtgttttcatgcactccctctctcaccacctgggaggcaggtatgattaaccccctgcagaaaaactcacagtggggaagcggtgccggaacccaaagtccaggctccaactccctggacgtgacatgctcgccagccggggtacaccctgcacaatgctgggagcatctccttgatgcctccaccatcaccgcctggagcgctgatccactcagcacattctggctaagcatctgctgtgtgccaggccccgtgctgggcagtgatgggaatgaaagatgagttagatctcatctctgcccccggggagcctcccatctggtgggagacacagacacgtggatctttgctggaaagggtaacaaggccatggaaacccaggcaggagcgttctagaaatccatccactttcaagtaggacttccatgcccgtaacatccacccaccgagctaatcacccccactcctgccccgctgccctgggacacctatgagatggcatcacctaaatcatcacaaacatctccaaaggccatgctgccagtgtagacacactcattccatgggtgttagtgataccaaatctcccccagctcttagctcgggaggccctgcttgatcaatgtgtgtgtcctctgacgcagtttcctcatttcatcagacctagtgttctcacactgaccacccatccattcaccagacacgacagtgagcaaggcaggtccctgctcactgtgctagctttctagctggggcaggaagacagtgaagaaggaaggtggcgaaggcagtgagtgctctgccgggaactcagtgccaggaactcagttcgagggacacgtgagtgagacccttgtggacctggggtggtctgggaaggccgccttgagcagatgattgaagcccagatttgaatgacacacaggagccagtaatgggcgttaaagataggaaaagagcattccaggcagaaggaacggctagtgcaaagatcctgcggcagccacaggcttggtggtttcaaggaagcacaagaaagccaggtggcacaagaaagccaggtggctggggacccagagggaaggcagaaggagatgagggtgatagtgcccagctctgggctctgctgtgagtcaagctgtgcaaacacaatgtcctgcctttggaaaagcagaacaaacttgctagggtataaagcatcctccattctgcctggctgtccatcctctcaacagccccatgaagaaggggctctccccattttatggacaagaagacagactcagctgggtcaagtggcttgcccaggatcacacaggtcagctgtggaagacccaggcccctggcttcagtctttgggtccagctgtctcctccaggcagtgctgccagtgtccaggcatatggcttggcaaagtgggagaacctctgcttggggtctcgattggagaaaggaatggcttcctctcccctgatgtgagccgtcccagggccatgttgccgtaagggggtgcacagcctgtccactagcccagctgcggaagccacagctgtgtcccacgtgcagtgcctcagaaggcagaggaagccttgaggtgggggcccaagacccagattctgacatcagctctgccactgagaacagcgtgacctcaggcaaggtctgttacctcagtttccccatcggtaagaggaaggagtcagatgggtatttaaggagtttgcaaccctcgtgtcctgctgtcctggacaatgctctgtaggtgcttcctctgccaaaaaggaactggtggccttgcctccctctcctggacacctggggtcaaaggtcactgccaaatagacagctagaactggggttcacctaagcatcccttgagatgtacaaccttctaggaggacattcctcctgcctgcccccctccccgcaagaggtcttttcaggaataactgaaaaacccatggggtttgtggtcctgctgctctgccaagtccctcttgggcagctgggctgaggactggaacattctgtggcaagcaggaggcctcagcagagatcaccaagacccagcacacctggtgcagacagccacggcatcctccttcctgcaggtcacccccacgagccacttaacctctcagagcctctgcttctcacctgtcaagtgtgtgaggtagggtaccagttagtcacggtacttgctgtctcacagaggagccgacaggtgagaacagtgtgcatgtgggtgtgaacactcagtgtggaaagcaggtgtgtgtgtattcaatcccccaatggtgtcaagggctcctcaaaatgccatgggtccccaggtcattgtgataaacactgtccccatcctgctgtggttgtggctggaaggtccctcaaggagtagactgtccctgagaacaagatggatgcagggtagtgacgagttcaagcatagctagagttactgttttttagcaactcaacctgattttttaagctgcctacttttactttttactgtgagcttctgtccatcaccatgtaatttgtaataataataatacaaaaagaaaaacgagagagagaagaggacaagatgtccacagaggaatctgcattcgaggctgtttgcagaactaccgcgtttgtaaggactgtttcccactgggaactgtgtgtaattaatgagcagttttatgctttccctctcgtctgtgtacggtgtgattgttgtgtgtttcagaatctctattcagaaccaatagctggtaatgcctgctggctcgctgccctcaagttagcctctgaacgtgccctgcacctagagaagcagccttctcacccgcctcacctggctgctccagcggccaggccagccacctgaccatgaccattgctgatgtgcaacaggccttaattgaaaaaacacacaagtacatacatgcacatgcgcgcacacacacaggtgatttcacaggtagatctggtccctcttgctgtctccaatgctctagaaagcagcaagtaggcagctgacagtgttcccagggtgagtggcatctcccctcatcatcagaaagattcagtcaaattttggcccagagctgaagaggaggacttgggaatgtcagggaaaacatgacagggctaggggttaacaggcttctttggccaggagatggtttccagttcaccgtcaacccaaaagctctcttcaggtcatggcaaacagaccagggctgtgggtgtggctgtgcttggcactgactcccccacaggccgctgtccaggttggctcaggattccagctgccatccccaggcaggcccctccgctggctcggctgctttcacaatcaccatgtctgtctattagagactgtgccattcaaggagacggggtccccgggggtgcagacttgtaaaattttttaatttttcaacttggctgaactggtccccatcaacaggaaaagccttcggaagtgaatttacagatttctcccatgtttgaaattaacataacatgaacccagaaggcagagcttgcagtgagctgagatcgcaccagtgcactccagcctgggcaacagagtgagactctgtctaggtaggtaggtaagaaggaaggaaggaagaacagacctggatggagttattgggaacatgtcttatcaatgttgaagggccccctatcactgtagggagacatccacgtgggttgttttcgtctgctgtgaaaatctagggttggaatcatggaagcaaactgcaggaattcttaatcatcctgctcacgtggtgggcatcagagggtgtctgcttggcccccacagcactgggacagtcagagaggccatgagtggatgacgccctgatcactgccctttgcagtccaggaatacctcactgggctggggccataccctgtgccctctggaagacaagcctgcgcacttactatgtgccagatgccatgcacagtgccctagttccttgctgtagcaccaacacgtcccacgctggtgcttaaatgcacgcaaacaactttggtggttgtggcccgaaaagctcaaatgttaaagttaagcagtcaggcaagctagaagaggtgaggagcctcctagaaaactcattcgatgacacgcgcttccctcacctattcagatacttgccgagtgcctgccacttgcctggccctgtacccagggcccatctgggagccattcctgctatagctgggaccacttgtgaaacggctagttgtgcctaacagacatgctcagattcacaaaatgaattcagaacacttacctgtcccacccgtgaaagtgaccttggaggtgtcattgccccccaccaccccagtttctagtccaagccaacagctggtgctagatagatgcttgatgaatgagcagatttgactgttagttactctgtacctaaaactcctatctttacatcaaagccctgacagatttgcccttgacagactgaaatccggggctgctgcagggttcacctccaggaggcaccattcacgacactgtcccataaatggtaatgggctcccagggatactgtttacatagactgcactgagaacggtgacccttaggtttgtacaatgaggtaccctgttgaatgaccctaaaccagcctccaaaatgtgcaggatcccacattggtcagcgccaaccctgagcacaggatctaaaactatagatgatatggccaccctggccacagctggaaccaagctggtggcccaagagagagcctcttcttggaattgcatgtcagtttctcatacgcagtttcttcctatttttcccatttcccgttttaaagctagtggcatacctcacagtcaaataaccaagtggtcagtgtctcgacaatgtgcagtaacgaggtgggggctgcaagggtgaggggctcagtcaccttaacaaggcaggagacctcccacaaaaggctgatgtgtcgtccccagggccagctggacaagggcatgcagcgcaggggtagggggatggaaatattttctctcccgtaaactctgacttcatgtgagcaggcatggggtctccctgagagctgataaccgggaaaaccaaaaccaataatattcctaataataatactagaatgtaagaataatcatgtgtttttcactgaccgctgttgctctgcttttgtctttatatacagtagtttttataacaatgtccctaggttttaataaaggagtgtcatgtcaactgttccc

SEQ ID NO: 146022 - DNA, 10490 bp, Homo sapiens
  Payload ID: 8956
  Gene Symbol: KIAA1671
  Gene Name: KIAA1671
  Uniprot ID: Q9BY89
  ENST ID: ENST00000358431
  CDS Start-End: 27-5447
acccccatgaatccacaaccataaccatggccacgcgggtcgaggtgggctccataacgcccttgacggccgtgccaggcctgggtgagatgggcaaggaggagaccctgacgaggacctacttcctccaggccggcgaagcctctggggctcccccagcccggatcttggaagcgaagagccccctgcggagcccggcccggttactccctctgccaaggctcgcccccaaacccttctcgaaggagcaggacgtgaaatctcctgtcccgtctctgcggcccagttcgactggaccttccccctctggggggctctctgaggagccagcagcaaaggatctggacaacaggatgcccggcttggtggggcaggaggtgggcagtggggagggcccgaggacgagctcgcccctcttcaacaaggctgtgttcctgcggcccagctccagcaccatgattctcttcgaaaccaccaaaagcggccccgctctggggaaggcggttagtgagggggcggaggaggccaagctaggtgtgtccggctcccggcctgaggtggctgccaagcccgccctgcccacccagaagcctgcggggacccttccccggtcagctcccctgtctcaggacacaaaaccacctgtaccccaagaggaggcaggccaagaccatcctccctcaaaggccagcagtgtggaggacacggcacgcccccttgtggagcccaggcctcgcctgaagagaaggcccgtgtctgccattttcacggagtccattcagcctcagaagccaggccccggcgcagcggccacagtgggcaaagtgccacccacccctcccgagaagacgtgggtgaggaagcccaggcccttgtccatggacctcacggcccggtttgagaacaaagaggccttgctgaggaaggtggccgatgaaggaagtggacccacagcaggggatatggctgggctagagaggcccagagcagcgtccaagctggacagggactgtttggtcaaggcggaggctcctcttcatgatcctgatttggacttcctggaggtggccaagaaaatccgtgaacggaaggagaagatgctttcgaagccggagatgggcagccccagagccctggtggggggctcatctggggtcacccccagcaatgaccagagtccctgggaagaaaaggccaagctggacccagagccagagaaggctgctgagtccccctcacccaggctgggaaggggcctagaacttgctgaggttaagagcagagtggcggatggggaggccgcggcagggggagagtgggcctccaggaggagtgtcaggaagtgcatcagcctgtttcgggaggacagcaccttggccttggcagtggggtctgaatctcccctggccacccctgcgtccccatcggcggcaccagagccggagaaaggggttgtgagcgttcaggaacggatcagaggctggactgccgagagctcagaggctaagcccgaggtcaggaggaggacgttccaggctcggccgctgtcggcggatttgaccaaattgttttcaagttcagcttccagcaacgaagtcaaatatgagaagagtgctgagctgagcggcgagtttcctaaggaaccgagagaaaagcaaaaggaggggcacagtttggatggagcatgcatcccgagaagcccctggaagcctgggacactccgggataagtccaggcagacggagcagaaggttagctctaaccaagaccccgacagctgtcgcggtggaagctcagtggaggccccgtgcccttctgacgtcactccagaggatgaccggagcttccagactgtgtgggccacagtatttgagcaccacgtggagagacacacagtggctgaccagtcgggacgttgtctctccaccacaccccctggtgacatggcccatgcccgtgtctcagaacccaggccgaggcctgagatgggctcttggctgggcagggacccaccagacatgacaaaactgaagaaagagaactccagagggtttgacaatcccgagacggagaaattgggaccaaccacccttttgaatggtgaactgagaccgtatcacacgcctctccgggacaaataccctttgtctgaaaaccacaataataacaccttcctcaaacacttggaaaatcctcccacatcgcagagaattgagcccagatatgacattgtgcatgcagtgggagagcgtgtgcacagcgaggccatctcaccggcaccggaggagaaagcggtcacgctccgcagcctcaggtcttggctctcactgaaggacaggcagctgtcccaggaggtcacccctgctgacctggagtgtggtttggaaggtcaggcggggtccgtccaaagggccagtttgatttgggaagctcgaggcatgcctgaggctagtggaccgaagtttgggggcaattgcccgtttcccaaatggacaggcggggcagtggtgagctcgcacaaagccaccgtggcagtcagcgaagagcactgtgctcccggggccacctccgtcagggctatcaaggctgccatctgggaaagccagcatgaggggccagagggggccagaagcaagccaggagtgggagcaaggggcccaccccagggatgccccctcgatcctctttccagggctacgaatgggccttctgactcccaagcacgaacacatccagatgcatttgctgtgcagaaagggcccttcattgtagccgccagggagggtgatccagggccggcccaggtgccacagcctgcagtcagaatgcggaaagccggcgccatggaccagagaatggacagatggcggcggcggactttaccccccaacgtgaaatttgatacattcagttctcttgtcccagaggactctccacatgtggggcacagacgaacagattatgtgagccccacagccagtgccttaagaaaacctcaactatcccactacagggtggagacccaggaggtgaacccaggtgcttcacgggaccagacttccccagcagtgaagcaagggtcacctgtggaacccaaggcgacattttttgcagtcacctatcagattcccaatactcaaaaggcaaagggtgtggttctgtcaggagctgaaagcttgctggaacattctagaaaaatcactccaccctcgtctcctcattctttaacatccactttggtttctcttggtcatgaagaggcattggagatggcaggcagtaaaaactggatgaagggacgagagcatgaaaatgcaagcattttaaaaactctgaagccaacagaccgtccatcatctcttggggcctggagtctggaccctttcaatggaagaatcattgatgtggatgccttatggagtcatcggggatcagaagatggccctcgtcctcaaagcaattggaaggaaagtgcgaacaagatgtcccccagcggcggagctccccaaaccaccccgactctgaggagtcgtccaaaagatcttcctgtgagaaggaagactgatgtgatcagtgacacgttcccaggtaaaatcagagatggctacagatccagcgttcttgacattgacgccctgatggcagagtaccaggagctgtcgctgaaagtccctggggaggctcaggagaggaggagtcccaccgtggagcccagtacgttgcctcgggagaggcctgttcagctgggcggggtggagcagagaaggaggagcctgaaggagatgcccgataccgggggtctctggaaaccggccagttctgccgaaataaatcacagtttcactcctggcttaggcaagcagctggcagagaccttggagacagccatgggcaccaaatctagccctcccttctgggctctgccaccctcggctccttctgaaaggtatccagggggctctcctatacctgcggatcccaggaaaaaaacggggtttgctgaggatgacagaaaggcctttgccagtaaacatcatgttgcaaagtgtcagaattacctggctgagtcaaagccctctggtcgggaggatccaggcagtggggtcagggtgtcacccaaatcgccccccactgaccagaagaaagggaccccaaggaaatccaccgggcggggagaggaggacagtgtggcccagtggggtgaccacccacgtgactgtggacgggtgccgctggatatcaagagggcctactcagagaaggggccccctgccaacatccgagagggcctgtccatcatgcatgaagccagagagaggaggcgagagcagcccaaagggaggcccagccttactggagagaatttggaggccaaaatgggaccctgttggtgggagtcagggactggagacagtcacaaggtgctgccacgggacctggagaaggaggatgccccccaggagaaggagcgaccgctccagcaggtgtcccctgtggcctcggttccctggagaagccacagcttctgcaaagacaggaggagtgggccctttgtggaccagctgaagcagtgtttctcccggcagcccactgaacccaaggacactgacaccctcgtgcacgaagccggcagccagtatgggacgtggacagagcagtgccagagtggggagagcttggccactgagtccccagatagcagtgccacatcgacaaggaaacagccccccagcagccgtttgtcttctctgtcctcccaaacggagcccacctcggcaggggaccagtatgactgctccagggaccagcggagcaccagcgtggaccactccagcactgacctggaatccaccgatgggatggaggggccgcctccaccggacgcctgccctgaaaagagagtagatgacttctccttcattgatcaaacctcagtcctcgactcaagtgccctcaagacccgggtgcagctcagcaagagaagccgccgccgggcccccatctcccactccctccggcgcagccgatttagtgagtccgagagcagatcacctttggaggatgagactgacaacacgtggatgttcaaagactcaacggaggagaaatcacccaggaaggaggagtcggatgaggaggagacggcatccaaagctgagaggacccctgtcagccatcctcagaggatgcctgcgtttccaggcatggatccggcagtgctaaaggctcagctgcacaagaggccagaggtggacagtcctggcgagacccccagctgggcaccccaacccaagagccccaagtcccccttccagcctggggtgctgggcagtcgcgtgctgccttccagcatggacaaggatgagaggtcggatgaaccctctccccagtggctaaaggaattgaaatccaagaagaggcaaagtctttatgagaaccaagtttgaccaggcagggaacactgccacatctacgtaacagaagccttaaccatcagaacccgcagacgaggccgagctgctgccgtttcttcctgcacaacgcttacgtgcctgggcccttcccattggattgagaacgctatccagtgcccctgtcctcgccaggctctccctggatccagacgggaagacccaacctccaggagcactcgctcatctccccagacagcacttcaggctgggaaaggagccaggctgcccagaaacgtccatgtgggtggttttgctttttatgtaaaaatttgcatttctacctattttagacaccttcatcagctccaagaacatcagtgtgaggctggaattgtctccccaggttctgaaaaacacctgcatttgtgaaagcacctcctcacccgaccccggggcaggtctttttttggaaggacatttccaaggaagatcaaactgttcattttctgctgtagtctcggtgcagggtattaccgctgggttgaggttttctattctttttttttggtgagttccttcttccccttgaggaatcagcagttccaatttttaaacatactctccctgattatgtgtatttctctttctagtggggctgtgtgcatcgttggcctatgttattgtatgtcatttttgtttgctttagaaggcgataaagcaataattcagctaattttctttgaaacttgataggtatatatgtgtttacgttaaaggacaggaggaaagatgtgcgaataatttgttctgaagtatccagtcacctcaggttatcttatccctatccaagctgtttagaagttataattgtcactcttgtatttatttccatggcttcttttcatttgagctctggtttcggtagggtgacctttgccccttggccttaagggttcataaactgcagcccaagtggtggtgcctttgcttatgaatcatcagacctgccctagtaatctttttctccagagtcttctttgaacatgacgtgggctgctggcatggaggagttgttccaaactggcctcagaacagatgcatgaatgaagggtactttttgcttttgctcacctcattttccttcatctttcttgatgaatccattatttgcaaatgctgtcaaaacatgctttccttctccctggctacctctcaggagttcatttgtctctctgtctcagcttcctccctcatcttcctttacccctcttctctgtcttagtgggtggatgggcatggatagaaatcctctgtttctttaggttaggataaacacctgggccctggtgaggcagttgctgttcagcaccagggacagcaactgcagggctgtgaggccggagcccaccttgtgtcctgttcgatgagctttggttactgatgagcaattgccagatcatgtcacccacccagccttttacacctgggagcctcatgcatctgggtttgggagtttggccctgctgatgatagtttgttttctcttcattccctgaattagtcatcagttctccgtggccatttggggattcatgcctgcaactgcttcagtcgaattcttttttaaagatccagtttatgttttataataattttgatcttatggctttcaacgtcaataggatcccctttaaaaataccctgctagtgttttgttttgttttgtttttctgagacaaggtcttactctgttgctcaagctggagtggagtggcacgatcatagctcactaacacctgggctcaagtgattctcccacctcagcctcccaagtagctgggactacaggtgtatgctaccatgaccagctaatttttaaatatttttgtagagacaagggtcttaccatgttgcccaggctggtctcgaacttctgggctcaagcaattgtccctcctcagcctcccaaagtgctcggattacagacatgagccactgcacctggcctgaaacacattcctagtcttttgatcctgacttcttatctgggctgctgtctctctttccttcaggtggaaaggaccccttggtaccatctcaagcagtaggaaaggacctgctcttacatatattgatggtcctcatgcaaaactctcaattcttaattagtcatgtctcagctcaaggatatcagacaggaatgaaacacacttgaaaatgagattgacctggagattttttttccctaatctctcataccttaattggaaaaataatcaattaattctatgttaattaggatatacaaagttcaccctccttgaaagtgactagggcaagccctgaagatcttcctcacctccttttatttttctataaccttgtctcctccagcaccacagggaagacaatcacagtgggtcaagagcgaccctctttcacgtgggctctgccatgacctctgagacctgcttatgatcagtgcaatgaagttagaagtaactgatgattgggagcctttgcagatagctgggcaaatgggtgatttacttatccccattctaaatggagtgagctctctttgaggctaagcaaggaggcgttgtatgctagtttctagactttgcctggagacccctttggaaatctgtcttctttttaaactcacttaatatgccttaatcatctgtgtgtaatggagtcatccgctcctcaatctaaccctcctcccctggggctttggctgtcctcaatgagagtttcatgcagaatggaaaatcctctatatgtacaatctctctccccctcatttctcttcctcctcacctccaccacccctttgcacatcagcattttaacagctgatcttttgagaagcctgtatctttttcctcttcagtagatacccttcttcatggtcctttgcctaatcaaacagaggcttttggcctttgaaaatccatgacaaggcctcagaaatcagtgttgtggaggattactccatgccaccggagaaactctggtgaaagagaaacctcgtggtctttaggatgttgggattttgagtgaacctgacctgatagcctcaggattcagggaaaggacaatcagatggcggtgttttccagggggacgcgccaaatcatgtggtttcagacaattgtgtttgcctttgtgcctccctggaagggaggccaactaagggtatcaccaagaagccaaaagagaaataggcatgagcctgtggttttaaactttacaggctgggcaaaggatttagaaagacccttagcatgattttcctaaaagagaccttagctgctccaacctggtgctgatagctgctttgttgatctatgctttaaaatttttctttataatgcccccagatggctcctggaactagtcgtaattgcaaactgtaaaaatccctcctccccagtgtagatatttaaaccagagtaagtgatggggagacattctgtggtctctgaatgtgccttccccctcaccgtgtgttaaaacacaaaagccgaagttccatggcatcatgattccgaggggctggagggataggacccactccacatctaaaggggatctgctttgggctcggtcccattagcgagtgggggactcttgctgtgtgctaagaggctgctaggactcacccagttggaattctgggtgggctcaggaagtttagagccacgtaaaaagctggtaggcatgagtgtgccaggtctttgccagcctgcgtctccttttgcaccccccaatccagagtttgctttcttttgactaaattggctcctgcagggggaagggcagaaagctaggccctctgctctggaaagtcggcctgaggtttccggcaagttaacccttaaaatggacacccctcagcccgccctcccctttggccttcccagaatctccttcagtggttgctctcacacctgtgccataacatcatcttccatgacttggacgggcacttccttgacaattcctattggcatcacacgggctacaaattatgctgttttctaaagaatttgaacttttttttttttcttttcttgagacacggtcttgctctgttggccaggctggaatgcagtggcacaatcatagctcactccagcctccaactcctgggctcaagcaatcctctcatctccacctccagagtagcctagatgacaggcgcacatcaccacgcccagctgatcttttaaatctgttttgtagaaacaggatctcactatattgcccaagctggtcttaaacttggtctcaagtgattctactgcctcagcctcccaaagtgctgggattacaggcctgagccaccatgcccagctgaatttgagctttttaataatctcattccacatagccttatagatcctgtaaatagggggggtcacaaaagtaatatattgtgttatggaagataattttgtactgtgctgtttcctaaatcataccaatatcctaaagtcatgcacttcccagatgatcgtgatcctccaaatgctttgtaagatggggcagggcgtggaaatatatatatatacacacacacacagagacacacacacacacaagtatagtatatattttcctaacctttcttctgggtccttcctcagatctttgagtcacgatagaaaaggagctcgagttctttgtgtaggaaagttaagcttcctgcctgcggtgttcttgcaattgccttaggaattcacaagctctaggagttctgaacggaaggcagacgagaggcactttatccagtcccagaaagaatctctaaccgtgtgactgagaagtcatctagaaaaacttatatttttaatgtaaaaacaaatggggcttaccagacctcacagagtattggacgtctacaagtgcttttatattttgtaactgtaaagaagtttcatatgcacagaagagcagttggaaatctggtcgactgcaataaaacaagatgacctttgcatgtacaaagatgttgcattcagactatgaaaatagcaaataaagctttggtgcaagttgcattgg

SEQ ID NO: 146023 - DNA, 7864 bp, Homo sapiens
  Payload ID: 8956
  Gene Symbol: KIAA1671
  Gene Name: KIAA1671
  Uniprot ID: Q9BY89
  ENST ID: ENST00000406486
  CDS Start-End: 388-5808
gcgggcaggtggcggcgcggcgcgggctggcggtggctccacgacagggtcttactctgtcacccaggctggcgtgccatggtgcagtcatagctcactgcagcctcaaattcatgggctcaagcaattcacctcagcctcccaaagtgctggaactacaagcatacaccaccatacccaacctgctgaaactcagcctgctgggacgagtcttctttcccccttcttgtttctgccatggaagtgtgtggacagccccattcatgatgacatgtgacactactggcttttcccggcagtcacaccccctgacccagggcctgccagcttggcaattgcttctccattcttgaagttcctaacccccatgaatccacaaccataaccatggccacgcgggtcgaggtgggctccataacgcccttgacggccgtgccaggcctgggtgagatgggcaaggaggagaccctgacgaggacctacttcctccaggccggcgaagcctctggggctcccccagcccggatcttggaagcgaagagccccctgcggagcccggcccggttactccctctgccaaggctcgcccccaaacccttctcgaaggagcaggacgtgaaatctcctgtcccgtctctgcggcccagttcgactggaccttccccctctggggggctctctgaggagccagcagcaaaggatctggacaacaggatgcccggcttggtggggcaggaggtgggcagtggggagggcccgaggacgagctcgcccctcttcaacaaggctgtgttcctgcggcccagctccagcaccatgattctcttcgaaaccaccaaaagcggccccgctctggggaaggcggttagtgagggggcggaggaggccaagctaggtgtgtccggctcccggcctgaggtggctgccaagcccgccctgcccacccagaagcctgcggggacccttccccggtcagctcccctgtctcaggacacaaaaccacctgtaccccaagaggaggcaggccaagaccatcctccctcaaaggccagcagtgtggaggacacggcacgcccccttgtggagcccaggcctcgcctgaagagaaggcccgtgtctgccattttcacggagtccattcagcctcagaagccaggccccggcgcagcggccacagtgggcaaagtgccacccacccctcccgagaagacgtgggtgaggaagcccaggcccttgtccatggacctcacggcccggtttgagaacaaagaggccttgctgaggaaggtggccgatgaaggaagtggacccacagcaggggatatggctgggctagagaggcccagagcagcgtccaagctggacagggactgtttggtcaaggcggaggctcctcttcatgatcctgatttggacttcctggaggtggccaagaaaatccgtgaacggaaggagaagatgctttcgaagccggagatgggcagccccagagccctggtggggggctcatctggggtcacccccagcaatgaccagagtccctgggaagaaaaggccaagctggacccagagccagagaaggctgctgagtccccctcacccaggctgggaaggggcctagaacttgctgaggttaagagcagagtggcggatggggaggccgcggcagggggagagtgggcctccaggaggagtgtcaggaagtgcatcagcctgtttcgggaggacagcaccttggccttggcagtggggtctgaatctcccctggccacccctgcgtccccatcggcggcaccagagccggagaaaggggttgtgagcgttcaggaacggatcagaggctggactgccgagagctcagaggctaagcccgaggtcaggaggaggacgttccaggctcggccgctgtcggcggatttgaccaaattgttttcaagttcagcttccagcaacgaagtcaaatatgagaagagtgctgagctgagcggcgagtttcctaaggaaccgagagaaaagcaaaaggaggggcacagtttggatggagcatgcatcccgagaagcccctggaagcctgggacactccgggataagtccaggcagacggagcagaaggttagctctaaccaagaccccgacagctgtcgcggtggaagctcagtggaggccccgtgcccttctgacgtcactccagaggatgaccggagcttccagactgtgtgggccacagtatttgagcaccacgtggagagacacacagtggctgaccagtcgggacgttgtctctccaccacaccccctggtgacatggcccatgcccgtgtctcagaacccaggccgaggcctgagatgggctcttggctgggcagggacccaccagacatgacaaaactgaagaaagagaactccagagggtttgacaatcccgagacggagaaattgggaccaaccacccttttgaatggtgaactgagaccgtatcacacgcctctccgggacaaataccctttgtctgaaaaccacaataataacaccttcctcaaacacttggaaaatcctcccacatcgcagagaattgagcccagatatgacattgtgcatgcagtgggagagcgtgtgcacagcgaggccatctcaccggcaccggaggagaaagcggtcacgctccgcagcctcaggtcttggctctcactgaaggacaggcagctgtcccaggaggtcacccctgctgacctggagtgtggtttggaaggtcaggcggggtccgtccaaagggccagtttgatttgggaagctcgaggcatgcctgaggctagtggaccgaagtttgggggcaattgcccgtttcccaaatggacaggcggggcagtggtgagctcgcacaaagccaccgtggcagtcagcgaagagcactgtgctcccggggccacctccgtcagggctatcaaggctgccatctgggaaagccagcatgaggggccagagggggccagaagcaagccaggagtgggagcaaggggcccaccccagggatgccccctcgatcctctttccagggctacgaatgggccttctgactcccaagcacgaacacatccagatgcatttgctgtgcagaaagggcccttcattgtagccgccagggagggtgatccagggccggcccaggtgccacagcctgcagtcagaatgcggaaagccggcgccatggaccagagaatggacagatggcggcggcggactttaccccccaacgtgaaatttgatacattcagttctcttgtcccagaggactctccacatgtggggcacagacgaacagattatgtgagccccacagccagtgccttaagaaaacctcaactatcccactacagggtggagacccaggaggtgaacccaggtgcttcacgggaccagacttccccagcagtgaagcaagggtcacctgtggaacccaaggcgacattttttgcagtcacctatcagattcccaatactcaaaaggcaaagggtgtggttctgtcaggagctgaaagcttgctggaacattctagaaaaatcactccaccctcgtctcctcattctttaacatccactttggtttctcttggtcatgaagaggcattggagatggcaggcagtaaaaactggatgaagggacgagagcatgaaaatgcaagcattttaaaaactctgaagccaacagaccgtccatcatctcttggggcctggagtctggaccctttcaatggaagaatcattgatgtggatgccttatggagtcatcggggatcagaagatggccctcgtcctcaaagcaattggaaggaaagtgcgaacaagatgtcccccagcggcggagctccccaaaccaccccgactctgaggagtcgtccaaaagatcttcctgtgagaaggaagactgatgtgatcagtgacacgttcccaggtaaaatcagagatggctacagatccagcgttcttgacattgacgccctgatggcagagtaccaggagctgtcgctgaaagtccctggggaggctcaggagaggaggagtcccaccgtggagcccagtacgttgcctcgggagaggcctgttcagctgggcggggtggagcagagaaggaggagcctgaaggagatgcccgataccgggggtctctggaaaccggccagttctgccgaaataaatcacagtttcactcctggcttaggcaagcagctggcagagaccttggagacagccatgggcaccaaatctagccctcccttctgggctctgccaccctcggctccttctgaaaggtatccagggggctctcctatacctgcggatcccaggaaaaaaacggggtttgctgaggatgacagaaaggcctttgccagtaaacatcatgttgcaaagtgtcagaattacctggctgagtcaaagccctctggtcgggaggatccaggcagtggggtcagggtgtcacccaaatcgccccccactgaccagaagaaagggaccccaaggaaatccaccgggcggggagaggaggacagtgtggcccagtggggtgaccacccacgtgactgtggacgggtgccgctggatatcaagagggcctactcagagaaggggccccctgccaacatccgagagggcctgtccatcatgcatgaagccagagagaggaggcgagagcagcccaaagggaggcccagccttactggagagaatttggaggccaaaatgggaccctgttggtgggagtcagggactggagacagtcacaaggtgctgccacgggacctggagaaggaggatgccccccaggagaaggagcgaccgctccagcaggtgtcccctgtggcctcggttccctggagaagccacagcttctgcaaagacaggaggagtgggccctttgtggaccagctgaagcagtgtttctcccggcagcccactgaacccaaggacactgacaccctcgtgcacgaagccggcagccagtatgggacgtggacagagcagtgccagagtggggagagcttggccactgagtccccagatagcagtgccacatcgacaaggaaacagccccccagcagccgtttgtcttctctgtcctcccaaacggagcccacctcggcaggggaccagtatgactgctccagggaccagcggagcaccagcgtggaccactccagcactgacctggaatccaccgatgggatggaggggccgcctccaccggacgcctgccctgaaaagagagtagatgacttctccttcattgatcaaacctcagtcctcgactcaagtgccctcaagacccgggtgcagctcagcaagagaagccgccgccgggcccccatctcccactccctccggcgcagccgatttagtgagtccgagagcagatcacctttggaggatgagactgacaacacgtggatgttcaaagactcaacggaggagaaatcacccaggaaggaggagtcggatgaggaggagacggcatccaaagctgagaggacccctgtcagccatcctcagaggatgcctgcgtttccaggcatggatccggcagtgctaaaggctcagctgcacaagaggccagaggtggacagtcctggcgagacccccagctgggcaccccaacccaagagccccaagtcccccttccagcctggggtgctgggcagtcgcgtgctgccttccagcatggacaaggatgagaggtcggatgaaccctctccccagtggctaaaggaattgaaatccaagaagaggcaaagtctttatgagaaccaagtttgaccaggcagggaacactgccacatctacgtaacagaagccttaaccatcagaacccgcagacgaggccgagctgctgccgtttcttcctgcacaacgcttacgtgcctgggcccttcccattggattgagaacgctatccagtgcccctgtcctcgccaggctctccctggatccagacgggaagacccaacctccaggagcactcgctcatctccccagacagcacttcaggctgggaaaggagccaggctgcccagaaacgtccatgtgggtggttttgctttttatgtaaaaatttgcatttctacctattttagacaccttcatcagctccaagaacatcagtgtgaggctggaattgtctccccaggttctgaaaaacacctgcatttgtgaaagcacctcctcacccgaccccggggcaggtctttttttggaaggacatttccaaggaagatcaaactgttcattttctgctgtagtctcggtgcagggtattaccgctgggttgaggttttctattctttttttttggtgagttccttcttccccttgaggaatcagcagttccaatttttaaacatactctccctgattatgtgtatttctctttctagtggggctgtgtgcatcgttggcctatgttattgtatgtcatttttgtttgctttagaaggcgataaagcaataattcagctaattttctttgaaacttgataggtatatatgtgtttacgttaaaggacaggaggaaagatgtgcgaataatttgttctgaagtatccagtcacctcaggttatcttatccctatccaagctgtttagaagttataattgtcactcttgtatttatttccatggcttcttttcatttgagctctggtttcggtagggtgacctttgccccttggccttaagggttcataaactgcagcccaagtggtggtgcctttgcttatgaatcatcagacctgccctagtaatctttttctccagagtcttctttgaacatgacgtgggctgctggcatggaggagttgttccaaactggcctcagaacagatgcatgaatgaagggtactttttgcttttgctcacctcattttccttcatctttcttgatgaatccattatttgcaaatgctgtcaaaacatgctttccttctccctggctacctctcaggagttcatttgtctctctgtctcagcttcctccctcatcttcctttacccctcttctctgtcttagtgggtggatgggcatggatagaaatcctctgtttctttaggttaggataaacacctgggccctggtgaggcagttgctgttcagcaccagggacagcaactgcagggctgtgaggccggagcccaccttgtgtcctgttcgatgagctttggttactgatgagcaattgccagatcatgtcacccacccagccttttacacctgggagcctcatgcatctgggtttgggagtttggccctgctgatgatagtttgttttctcttcattccctgaattagtcatcagttctccgtggccatttggggattcatgcctgcaactgcttcagtcgaattcttttttaaagatccagtttatgttttataataattttgatcttatggctttcaacgtcaataggatcccctttaaaaataccctgctagtgttttgttttgttttgtttttctgagacaaggtcttactctgttgctcaagctggagtggagtggcacgatcatagctcactaacacctgggctcaagtgattctcccacctcagcctcccaagtagctgggactacaggtgtatgctaccatgaccagctaatttttaaatatttttgtagagacaagggtcttaccatgttgcccaggctggtctcgaacttctgggctcaagcaattgtccctcctcagcctcccaaagtgctcggattacagacatgagccactgcacctggcctgaaacacattcctagtcttttgatcctgacttcttatctgggctgctgtctctctttccttcaggtggaaaggaccccttg

SEQ ID NO: 146024 - DNA, 6386 bp, Homo sapiens
  Payload ID: 8956
  Gene Symbol: KIAA1671
  Gene Name: KIAA1671
  Uniprot ID: Q9BY89
  ENST ID: ENST00000401395
  CDS Start-End: 398-1339
gtgcacacattcagttcccgggcatcaccttctctcttcttgccttcttgccgtacaactgaaaaccctaaaaccctccgtgcctacggctcccgggagggtgagggtccaggcagctgggttcagaaggatccacccctggacccgccccactggacgagaagccagagatgccccgggcggggctcataggaccgagtggtggcttctcagttccccaggcagccgtggccattagtggagccgactggctggtcccctggccgtgagccggcttctgaatgatttatgccgccttgaacttgactccagcgtgacaggagtgagaagagccgctcccgctagaggaaagctggaaaccgtactgtgctcaccacataacctctgggtgctggaaatggagtattactactgccccagcctgctgaagctcttgcgctacctctgggaccagctgaagcagtgtttctcccggcagcccactgaacccaaggacactgacaccctcgtgcacgaagccggcagccagtatgggacgtggacagagcagtgccagagtggggagagcttggccactgagtccccagatagcagtgccacatcgacaaggaaacagccccccagcagccgtttgtcttctctgtcctcccaaacggagcccacctcggcaggggaccagtatgactgctccagggaccagcggagcaccagcgtggaccactccagcactgacctggaatccaccgatgggatggaggggccgcctccaccggacgcctgccctgaaaagagagtagatgacttctccttcattgatcaaacctcagtcctcgactcaagtgccctcaagacccgggtgcagctcagcaagagaagccgccgccgggcccccatctcccactccctccggcgcagccgatttagtgagtccgagagcagatcacctttggaggatgagactgacaacacgtggatgttcaaagactcaacggaggagaaatcacccaggaaggaggagtcggatgaggaggagacggcatccaaagctgagaggacccctgtcagccatcctcagaggatgcctgcgtttccaggcatggatccggcagtgctaaaggctcagctgcacaagaggccagaggtggacagtcctggcgagacccccagctgggcaccccaacccaagagccccaagtcccccttccagcctggggtgctgggcagtcgcgtgctgccttccagcatggacaaggatgagaggtcggatgaaccctctccccagtggctaaaggaattgaaatccaagaagaggcaaagtctttatgagaaccaagtttgaccaggcagggaacactgccacatctacgtaacagaagccttaaccatcagaacccgcagacgaggccgagctgctgccgtttcttcctgcacaacgcttacgtgcctgggcccttcccattggattgagaacgctatccagtgcccctgtcctcgccaggctctccctggatccagacgggaagacccaacctccaggagcactcgctcatctccccagacagcacttcaggctgggaaaggagccaggctgcccagaaacgtccatgtgggtggttttgctttttatgtaaaaatttgcatttctacctattttagacaccttcatcagctccaagaacatcagtgtgaggctggaattgtctccccaggttctgaaaaacacctgcatttgtgaaagcacctcctcacccgaccccggggcaggtctttttttggaaggacatttccaaggaagatcaaactgttcattttctgctgtagtctcggtgcagggtattaccgctgggttgaggttttctattctttttttttggtgagttccttcttccccttgaggaatcagcagttccaatttttaaacatactctccctgattatgtgtatttctctttctagtggggctgtgtgcatcgttggcctatgttattgtatgtcatttttgtttgctttagaaggcgataaagcaataattcagctaattttctttgaaacttgataggtatatatgtgtttacgttaaaggacaggaggaaagatgtgcgaataatttgttctgaagtatccagtcacctcaggttatcttatccctatccaagctgtttagaagttataattgtcactcttgtatttatttccatggcttcttttcatttgagctctggtttcggtagggtgacctttgccccttggccttaagggttcataaactgcagcccaagtggtggtgcctttgcttatgaatcatcagacctgccctagtaatctttttctccagagtcttctttgaacatgacgtgggctgctggcatggaggagttgttccaaactggcctcagaacagatgcatgaatgaagggtactttttgcttttgctcacctcattttccttcatctttcttgatgaatccattatttgcaaatgctgtcaaaacatgctttccttctccctggctacctctcaggagttcatttgtctctctgtctcagcttcctccctcatcttcctttacccctcttctctgtcttagtgggtggatgggcatggatagaaatcctctgtttctttaggttaggataaacacctgggccctggtgaggcagttgctgttcagcaccagggacagcaactgcagggctgtgaggccggagcccaccttgtgtcctgttcgatgagctttggttactgatgagcaattgccagatcatgtcacccacccagccttttacacctgggagcctcatgcatctgggtttgggagtttggccctgctgatgatagtttgttttctcttcattccctgaattagtcatcagttctccgtggccatttggggattcatgcctgcaactgcttcagtcgaattcttttttaaagatccagtttatgttttataataattttgatcttatggctttcaacgtcaataggatcccctttaaaaataccctgctagtgttttgttttgttttgtttttctgagacaaggtcttactctgttgctcaagctggagtggagtggcacgatcatagctcactaacacctgggctcaagtgattctcccacctcagcctcccaagtagctgggactacaggtgtatgctaccatgaccagctaatttttaaatatttttgtagagacaagggtcttaccatgttgcccaggctggtctcgaacttctgggctcaagcaattgtccctcctcagcctcccaaagtgctcggattacagacatgagccactgcacctggcctgaaacacattcctagtcttttgatcctgacttcttatctgggctgctgtctctctttccttcaggtggaaaggaccccttggtaccatctcaagcagtaggaaaggacctgctcttacatatattgatggtcctcatgcaaaactctcaattcttaattagtcatgtctcagctcaaggatatcagacaggaatgaaacacacttgaaaatgagattgacctggagattttttttccctaatctctcataccttaattggaaaaataatcaattaattctatgttaattaggatatacaaagttcaccctccttgaaagtgactagggcaagccctgaagatcttcctcacctccttttatttttctataaccttgtctcctccagcaccacagggaagacaatcacagtgggtcaagagcgaccctctttcacgtgggctctgccatgacctctgagacctgcttatgatcagtgcaatgaagttagaagtaactgatgattgggagcctttgcagatagctgggcaaatgggtgatttacttatccccattctaaatggagtgagctctctttgaggctaagcaaggaggcgttgtatgctagtttctagactttgcctggagacccctttggaaatctgtcttctttttaaactcacttaatatgccttaatcatctgtgtgtaatggagtcatccgctcctcaatctaaccctcctcccctggggctttggctgtcctcaatgagagtttcatgcagaatggaaaatcctctatatgtacaatctctctccccctcatttctcttcctcctcacctccaccacccctttgcacatcagcattttaacagctgatcttttgagaagcctgtatctttttcctcttcagtagatacccttcttcatggtcctttgcctaatcaaacagaggcttttggcctttgaaaatccatgacaaggcctcagaaatcagtgttgtggaggattactccatgccaccggagaaactctggtgaaagagaaacctcgtggtctttaggatgttgggattttgagtgaacctgacctgatagcctcaggattcagggaaaggacaatcagatggcggtgttttccagggggacgcgccaaatcatgtggtttcagacaattgtgtttgcctttgtgcctccctggaagggaggccaactaagggtatcaccaagaagccaaaagagaaataggcatgagcctgtggttttaaactttacaggctgggcaaaggatttagaaagacccttagcatgattttcctaaaagagaccttagctgctccaacctggtgctgatagctgctttgttgatctatgctttaaaatttttctttataatgcccccagatggctcctggaactagtcgtaattgcaaactgtaaaaatccctcctccccagtgtagatatttaaaccagagtaagtgatggggagacattctgtggtctctgaatgtgccttccccctcaccgtgtgttaaaacacaaaagccgaagttccatggcatcatgattccgaggggctggagggataggacccactccacatctaaaggggatctgctttgggctcggtcccattagcgagtgggggactcttgctgtgtgctaagaggctgctaggactcacccagttggaattctgggtgggctcaggaagtttagagccacgtaaaaagctggtaggcatgagtgtgccaggtctttgccagcctgcgtctccttttgcaccccccaatccagagtttgctttcttttgactaaattggctcctgcagggggaagggcagaaagctaggccctctgctctggaaagtcggcctgaggtttccggcaagttaacccttaaaatggacacccctcagcccgccctcccctttggccttcccagaatctccttcagtggttgctctcacacctgtgccataacatcatcttccatgacttggacgggcacttccttgacaattcctattggcatcacacgggctacaaattatgctgttttctaaagaatttgaacttttttttttttcttttcttgagacacggtcttgctctgttggccaggctggaatgcagtggcacaatcatagctcactccagcctccaactcctgggctcaagcaatcctctcatctccacctccagagtagcctagatgacaggcgcacatcaccacgcccagctgatcttttaaatctgttttgtagaaacaggatctcactatattgcccaagctggtcttaaacttggtctcaagtgattctactgcctcagcctcccaaagtgctgggattacaggcctgagccaccatgcccagctgaatttgagctttttaataatctcattccacatagccttatagatcctgtaaatagggggggtcacaaaagtaatatattgtgttatggaagataattttgtactgtgctgtttcctaaatcataccaatatcctaaagtcatgcacttcccagatgatcgtgatcctccaaatgctttgtaagatggggcagggcgtggaaatatatatatatacacacacacacagagacacacacacacacaagtatagtatatattttcctaacctttcttctgggtccttcctcagatctttgagtcacgatagaaaaggagctcgagttctttgtgtaggaaagttaagcttcctgcctgcggtgttcttgcaattgccttaggaattcacaagctctaggagttctgaacggaaggcagacgagaggcactttatccagtcccagaaagaatctctaaccgtgtgactgagaagtcatctagaaaaacttatatttttaatgtaaaaacaaatggggcttaccagacctcacagagtattggacgtctacaagtgcttttatattttgtaactgtaaagaagtttcatatgcacagaagagcagttggaaatctggtcgactgcaataaaacaagatgacctttgcatgtacaaagatgttgcattcagactatgaaaatagcaaataaagctttggtgcaagttgcattggagaa

SEQ ID NO: 146025 - DNA, 4402 bp, Homo sapiens
  Payload ID: 8957
  Gene Symbol: KIAA1683
  Gene Name: KIAA1683
  Uniprot ID: Q9H0B3
  ENST ID: ENST00000392413
  CDS Start-End: 217-4320
agagctgccagggattggccagaacttggctttgagtcacaaagctgctgcggcaccagggctccaagactggccgttcagactgctaggtttagcttcaggggcagcccagggcagtgttgctgcatattgcatggatgaaaggctgaaggctgcctcctcttgcaggctggcttctgagattgcaccttcttctcctgctactcctccaaatctatgacccttcaaggcagagctgacctgtccggtaatcaaggcaatgcagccggccgcctagctacagttcacgagccagttgtcacccagtgggcggtgcatcctccagcccccgctcaccccagtctcctggacaaaatggagaaagcgcctccacagccccagcacgagggcctcaagtccaaggagcatcttccgcaacagcctgccgaaggcaagacggcgtcccgccgcgtcccacgcctccgggctgtggtcgagagccaggccttcaagaacatcctggtagacgagatggacatgatgcacgcccgtgcagccacgctcatccaagccaactggaggggctattggctccggcagaagctgatttcccagatgatggcggccaaggccatccaggaggcctggcggcgcttcaacaagagacacatccttcactccagcaagtcgttggtaaagaaaacgagggcggaggagggggacataccttatcacgccccacagcaggtgcgcttccagcatccggaagagaaccgccttctgtccccgcccatcatggtgaacaaggagacccagttcccttcctgtgacaatctggtcctctgcagaccccagtcgtcccccctcctgcagcccccagcagctcagggtaccccagagccctgtgtgcagggtcctcatgctgccagagtccgggggctggccttcctgccacaccagacggtcaccatcagatttccctgcccagtgagtctggacgcaaaatgccagccatgcctgctgaccagaaccatcagaagcacctgcctcgtccacatagagggtgactcagtgaagaccaaacgtgtaagtgcccggaccaacaaagccagggctccggagacaccattgtccagaaggtatgaccaggcagttacgagaccatccagagcccaaacccagggccctgtgaaagcagagacccccaaagcccccttccagatatgtccagggcccatgatcaccaagactctactccagacatatccagtggtctccgtgaccctgccacagacatatccagcgtccacgatgaccaccaccccacccaagactagcccagttcccaaagtaacaataatcaagaccccagcccagatgtatccggggcccacagtgaccaaaactgcacctcacacatgccccatgcccacaatgaccaagatccaggtacaccccacagcctccagaactggcaccccacggcagacatgccctgcgaccatcacggcaaagaaccgacctcaggtttcccttctggcttccatcatgaagagcctgccccaggtatgcccggggcctgcgatggcaaagaccccaccccagatgcacccggtcaccaccccagccaaaaacccattgcaaacatgtctgtcagccacaatgtccaagacttcatcccagaggagcccagttggggtgaccaagccctcaccccagacccgcctgccagccatgataaccaagaccccagcccagttacgctcggtggccaccatcctcaagactctgtgtctggcctctccaacagtggcaaatgtcaaggctccaccccaagtggcggtagcagccggaactcccaacacctcaggctccatccatgagaacccacccaaggccaaggccaccgtgaatgtgaagcaggctgcaaaggtggtgaaagcctcatccccctcctatttggctgaggggaagatcaggtgcctggctcaaccacatccgggaactggggtccccagggctgcagctgagcttcctttggaagccgagaaaatcaagactggcacccagaaacaggcgaaaacagacatggcatttaagaccagtgtggcagtggaaatggctggggctccatcctggacaaaagttgctgaggaaggggacaagccacctcacgtgtatgtgcctgtagacatggctgtcaccctgccccggggacagctggctgccccactgaccaatgcctcatcccagagacatccaccctgcctgtcccagagaccactggccgccccgctgaccaaggcctcatctcagggacatctgcccactgagctgaccaagaccccatccctggcccatctggacacctgtctgagcaagatgcattcccagacacatctggccacaggtgccgtgaaggtccagtcccaagcgcctctagccacctgtctgaccaagacgcagtcccgggggcagccgatcacagacataaccacgtgcctcatcccagcgcaccaggctgctgatctcagcagcaacacccactcccaggtgctcctaacagggtccaaggtgtccaaccacgcctgccagcgcctcggtggcctcagcgccccaccctgggccaagccagaggacagacagacccagccacagccccacggacacgtgccggggaagaccactcaggggggaccatgcccggcagcctgtgaggtccagggtatgctggtgccgccgatggcacccaccggccattccacatgcaacgttgagtcctggggagacaacggagccacacgtgcccagccatcaatgcccggccaggcggtgccctgccaggaggacacggtaggctccctgctggcctccttgtgtgctgaagtagctggtgtgctggcatcccaggaggatctccgcactctgttggccaaagccctctcccagggagaagtctgggcagctctgaaccaggccctgtccaaggaggtcctgggtgccactgtcaccaaagccctgccccagagcatgctgagcatggcgctggtgaaggcgctgtcctggagtgagctgcgcctgaccctgtcccgagccctgtcccggggcgagctgcgggcggaactcaccaaggtcatgcagggtaaattggccgaggtgcttagcaaggctttgacggaggaggagtgggtggctctgagccaggccctgtgtcagggtgagctgggtgctctcctgagccagtcttggtgtcgggtggccctgaggactggaaccatcctccccaaggccgcctcgaaatcaacaggaagcggggtgactaagacgccggccctggtgaaggtggcctgcaggaggagtccatcggccgcatgggggccctccctgggccccgtgagaccacagaccagcaagggccccgcggacgctggtgtggttggtggccaatcgtggaaccgcgcatgggagccagccaggggtgctgcgtcctgggacacctggcgcaacaaggcggtggtgcctcccaggcggtccggggagccaatggtgtccatgcaggctgcagaggagatccgcatcctcgcagtgatcactatccaggcgggcgtccgtggctacctggcgcgtcgcaggatccggctgtggcaccggggggccatggtcatccaagctacttggcgcggctaccgtgtgcggcggaacctggcacacctctgcagagccaccacgaccatccagtctgcctggcgcggctacagcacccgccgggaccaagcccggcactggcagatgctccaccccgtcacgtgggtggagctgggcagccgggccggggtcatgtctgaccgaagctggttccaggatggcagagccaggacagtatctgaccatcgctgcttccagtcctgccaggcacacgcttgcagcgtctgccactccctgagctccaggatcgggagcccgcccagcgtggtgatgctagtgggctccagccctcgcacctgtcatacctgtggacgcacacagcccacccgtgtggtgcagggcatgggccagggcactgagggccccggggcagtgtcttgggcctccgcctaccagctggctgccctgagtcccaggcagccgcatcgccaggacaaagcggccacagccatccagtccgcctggaggggctttaagatccgccagcagatgaggcagcagcaaatggcagcgaagatagttcaagccacctggcgaggccaccatacccggagctgtctgaagaacacagaggcgctcttgggaccagcagacccctcggccagctcacggcacatgcattggcctggcatctaggaccctggctccctgcagtggggacttcgtgggaggcactcatggctctctgggtctaatgaataaagtcctccacagccta

SEQ ID NO: 146026 - DNA, 3819 bp, Homo sapiens
  Payload ID: 8957
  Gene Symbol: KIAA1683
  Gene Name: KIAA1683
  Uniprot ID: Q9H0B3
  ENST ID: ENST00000600328
  CDS Start-End: 195-3737
aacttggctttgagtcacaaagctgctgcggcaccagggctccaagactggccgttcagactgctaggtttagcttcaggggcagcccagggcagtgttgctgcatattgcatggatgaaaggctgaaggctgcctcctcttgcaggctggcttctgagattgcaccttcttctcctgctactcctccaaatctatgacccttcaaggcagagctgacctgtccggtaatcaaggcaatgcagccggccgcctagctacagttcacgagccagttgtcacccagtgggcggtgcatcctccagcccccgctcaccccagtctcctggacaaaatggagaaagcgcctccacagccccagcacgagggcctcaagtccaaggagcatcttccgcaacagcctgccgaaggcaagacggcgtcccgccgcgtcccacgcctccgggctgtggtcgagagccaggccttcaagaacatcctggtagacgagatggacatgatgcacgcccgtgcagccacgctcatccaagccaactggaggggctattggctccggcagaagctgatttcccagatgatggcggccaaggccatccaggaggcctggcggcgcttcaacaagagacacatccttcactccagcaagtcgttggtaaagaaaacgagggcggaggagggggacataccttatcacgccccacagcaggtgcgcttccagcatccggaagagaaccgccttctgtccccgcccatcatggtgaacaaggagacccagttcccttcctgtgacaatctggtcctctgcagaccccagtcgtcccccctcctgcagcccccagcagctcagggtaccccagagccctgtgtgcagggtcctcatgctgccagagtccgggggctggccttcctgccacaccagacggtcaccatcagatttccctgcccagtgagtctggacgcaaaatgccagccatgcctgctgaccagaaccatcagaagcacctgcctcgtccacatagagggtgactcagtgaagaccaaacgtgtaagtgcccggaccaacaaagccagggctccggagacaccattgtccagaaggtatgaccaggcagttacgagaccatccagagcccaaacccagggccctgtgaaagcagagacccccaaagcccccttccagatatgtccagggcccatgatcaccaagactctactccagacatatccagtggtctccgtgaccctgccacagacatatccagcgtccacgatgaccaccaccccacccaagactagcccagttcccaaagtaacaataatcaagaccccagcccagatgtatccggggcccacagtgaccaaaactgcacctcacacatgccccatgcccacaatgaccaagatccaggtacaccccacagcctccagaactggcaccccacggcagacatgccctgcgaccatcacggcaaagaaccgacctcaggtttcccttctggcttccatcatgaagagcctgccccaggtatgcccggggcctgcgatggcaaagaccccaccccagatgcacccggtcaccaccccagccaaaaacccattgcaaacatgtctgtcagccacaatgtccaagacttcatcccagaggagcccagttggggtgaccaagccctcaccccagacccgcctgccagccatgataaccaagaccccagcccagttacgctcggtggccaccatcctcaagactctgtgtctggcctctccaacagtggcaaatgtcaaggctccaccccaagtggcggtagcagccggaactcccaacacctcaggctccatccatgagaacccacccaaggccaaggccaccgtgaatgtgaagcaggctgcaaaggtggtgaaagcctcatccccctcctatttggctgaggggaagatcaggtgcctggctcaaccacatccgggaactggggtccccagggctgcagctgagcttcctttggaagccgagaaaatcaagactggcacccagaaacaggcgaaaacagacatggcatttaagaccagtgtggcagtggaaatggctggggctccatcctggacaaaagttgctgaggaaggggacaagccacctcacgtgtatgtgcctgtagacatggctgtcaccctgccccggggacagctggctgccccactgaccaatgcctcatcccagagacatccaccctgcctgtcccagagaccactggccgccccgctgaccaaggcctcatctcagggacatctgcccactgagctgaccaagaccccatccctggcccatctggacacctgtctgagcaagatgcattcccagacacatctggccacaggtgccgtgaaggtccagtcccaagcgcctctagccacctgtctgaccaagacgcagtcccgggggcagccgatcacagacataaccacgtgcctcatcccagcgcaccaggctgctgatctcagcagcaacacccactcccaggtgctcctaacagggtccaaggtgtccaaccacgcctgccagcgcctcggtggcctcagcgccccaccctgggccaagccagaggacagacagacccagccacagccccacggacacgtgccggggaagaccactcaggggggaccatgcccggcagcctgtgaggtccagggtatgctggtgccgccgatggcacccaccggccattccacatgcaacgttgagtcctggggagacaacggagccacacgtgcccagccatcaatgcccggccaggcggtgccctgccaggaggacacgggccccgcggacgctggtgtggttggtggccaatcgtggaaccgcgcatgggagccagccaggggtgctgcgtcctgggacacctggcgcaacaaggcggtggtgcctcccaggcggtccggggagccaatggtgtccatgcaggctgcagaggagatccgcatcctcgcagtgatcactatccaggcgggcgtccgtggctacctggcgcgtcgcaggatccggctgtggcaccggggggccatggtcatccaagctacttggcgcggctaccgtgtgcggcggaacctggcacacctctgcagagccaccacgaccatccagtctgcctggcgcggctacagcacccgccgggaccaagcccggcactggcagatgctccaccccgtcacgtgggtggagctgggcagccgggccggggtcatgtctgaccgaagctggttccaggatggcagagccaggacagtatctgaccatcgctgcttccagtcctgccaggcacacgcttgcagcgtctgccactccctgagctccaggatcgggagcccgcccagcgtggtgatgctagtgggctccagccctcgcacctgtcatacctgtggacgcacacagcccacccgtgtggtgcagggcatgggccagggcactgagggccccggggcagtgtcttgggcctccgcctaccagctggctgccctgagtcccaggcagccgcatcgccaggacaaagcggccacagccatccagtccgcctggaggggctttaagatccgccagcagatgaggcagcagcaaatggcagcgaagatagttcaagccacctggcgaggccaccatacccggagctgtctgaagaacacagaggcgctcttgggaccagcagacccctcggccagctcacggcacatgcattggcctggcatctaggaccctggctccctgcagtggggacttcgtgggaggcactcatggctctctgggtctaatgaataaagtcctccacagccta

SEQ ID NO: 146027 - DNA, 3871 bp, Homo sapiens
  Payload ID: 8957
  Gene Symbol: KIAA1683
  Gene Name: KIAA1683
  Uniprot ID: Q9H0B3
  ENST ID: ENST00000600359
  CDS Start-End: 385-3789
agggattggccagaacttggctttgagtcacaaagctgctgcggcaccagggctccaagactggccgttcagactgctaggtttagcttcaggggcagcccagggcagtgttgctgcatattgcatggatgaaaggctgaaggctgcctcctcttgcaggctggcttctgagattgcaccttcttctcctgctactcctccaaatctatgacccttcaaggacctgctacaccctgaccaccccctgccgcccccacaggcagagctgacctgtccggtaatcaaggcaatgcagccggccgcctagctacagttcacgagccagttgtcacccagtgggcggtgcatcctccagcccccgctcaccccagtctcctggacaaaatggagaaagcgcctccacagccccagcacgagggcctcaagtccaaggagcatcttccgcaacagcctgccgaaggcaagacggcgtcccgccgcgtcccacgcctccgggctgtggtcgagagccaggccttcaagaacatcctggtagacgagatggacatgatgcacgcccgtgcagccacgctcatccaagccaactggaggggctattggctccggcagaagctgatttcccagatgatggcggccaaggccatccaggaggcctggcggcgcttcaacaagagacacatccttcactccagcaagtcgttggtaaagaaaacgagggcggaggagggggacataccttatcacgccccacagcaggtgcgcttccagcatccggaagagaaccgccttctgtccccgcccatcatggtgaacaaggagacccagttcccttcctgtgacaatctggtcctctgcagaccccagtcgtcccccctcctgcagcccccagcagctcagggtaccccagagccctgtgtgcagggtcctcatgctgccagagtccgggggctggccttcctgccacaccagacggtcaccatcagatttccctgcccagtgagtctggacgcaaaatgccagccatgcctgctgaccagaaccatcagaagcacctgcctcgtccacatagagggtgactcagtgaagaccaaacgtgtaagtgcccggaccaacaaagccagggctccggagacaccattgtccagaaggtatgaccaggcagttacgagaccatccagagcccaaacccagggccctgtgaaagcagagacccccaaagcccccttccagatatgtccagggcccatgatcaccaagactctactccagacatatccagtggtctccgtgaccctgccacagacatatccagcgtccacgatgaccaccaccccacccaagactagcccagttcccaaagtaacaataatcaagaccccagcccagatgtatccggggcccacagtgaccaaaactgcacctcacacatgccccatgcccacaatgaccaagatccaggtacaccccacagcctccagaactggcaccccacggcagacatgccctgcgaccatcacggcaaagaaccgacctcaggtttcccttctggcttccatcatgaagagcctgccccaggtatgcccggggcctgcgatggcaaagaccccaccccagatgcacccggtcaccaccccagccaaaaacccattgcaaacatgtctgtcagccacaatgtccaagacttcatcccagaggagcccagttggggtgaccaagccctcaccccagacccgcctgccagccatgataaccaagaccccagcccagttacgctcggtggccaccatcctcaagactctgtgtctggcctctccaacagtggcaaatgtcaaggctccaccccaagtggcggtagcagccggaactcccaacacctcaggctccatccatgagaacccacccaaggccaaggccaccgtgaatgtgaagcaggctgcaaaggtggtgaaagcctcatccccctcctatttggctgaggggaagatcaggtgcctggctcaaccacatccgggaactggggtccccagggctgcagctgagcttcctttggaagccgagaaaatcaagactggcacccagaaacaggcgaaaacagacatggcatttaagaccagtgtggcagtggaaatggctggggctccatcctggacaaaagttgctgaggaaggggacaagccacctcacgtgtatgtgcctgtagacatggctgtcaccctgccccggggacagctggctgccccactgaccaatgcctcatcccagagacatccaccctgcctgtcccagagaccactggccgccccgctgaccaaggcctcatctcagggacatctgcccactgagctgaccaagaccccatccctggcccatctggacacctgtctgagcaagatgcattcccagacacatctggccacaggtgccgtgaaggtccagtcccaagcgcctctagccacctgtctgaccaagacgcagtcccgggggcagccgatcacagacataaccacgtgcctcatcccagcgcaccaggctgctgatctcagcagcaacacccactcccaggtgctcctaacagggtccaaggtgtccaaccacgcctgccagcgcctcggtggcctcagcgccccaccctgggccaagccagaggacagacagacccagccacagccccacggacacgtgccggggaagaccactcaggggggaccatgcccggcagcctgtgaggtccagggtatgctggtgccgccgatggcacccaccggccattccacatgcaacgttgagtcctggggagacaacggagccacacgtgcccagccatcaatgcccggccaggcggtgccctgccaggaggacacgggccccgcggacgctggtgtggttggtggccaatcgtggaaccgcgcatgggagccagccaggggtgctgcgtcctgggacacctggcgcaacaaggcggtggtgcctcccaggcggtccggggagccaatggtgtccatgcaggctgcagaggagatccgcatcctcgcagtgatcactatccaggcgggcgtccgtggctacctggcgcgtcgcaggatccggctgtggcaccggggggccatggtcatccaagctacttggcgcggctaccgtgtgcggcggaacctggcacacctctgcagagccaccacgaccatccagtctgcctggcgcggctacagcacccgccgggaccaagcccggcactggcagatgctccaccccgtcacgtgggtggagctgggcagccgggccggggtcatgtctgaccgaagctggttccaggatggcagagccaggacagtatctgaccatcgctgcttccagtcctgccaggcacacgcttgcagcgtctgccactccctgagctccaggatcgggagcccgcccagcgtggtgatgctagtgggctccagccctcgcacctgtcatacctgtggacgcacacagcccacccgtgtggtgcagggcatgggccagggcactgagggccccggggcagtgtcttgggcctccgcctaccagctggctgccctgagtcccaggcagccgcatcgccaggacaaagcggccacagccatccagtccgcctggaggggctttaagatccgccagcagatgaggcagcagcaaatggcagcgaagatagttcaagccacctggcgaggccaccatacccggagctgtctgaagaacacagaggcgctcttgggaccagcagacccctcggccagctcacggcacatgcattggcctggcatctaggaccctggctccctgcagtggggacttcgtgggaggcactcatggctctctgggtctaatgaataaagtcctccacagccta

SEQ ID NO: 146028 - DNA, 533 bp, Homo sapiens
  Payload ID: 8957
  Gene Symbol: KIAA1683
  Gene Name: KIAA1683
  ENST ID: ENST00000599528
  CDS Start-End: 511-533
agactgctaggtttagcttcaggggcagcccagggcagtgttgctgcatattgcatggatgaaaggctgaaggctgcctcctcttgcaggctggcttctgagattgcaccttcttctcctgctactcctccaaatctatgacccttcaagaaaagtagccagccaggcatggtggcgtgcacctgtaatcccagctactcgggaggctgaggcaggagaatcgcttgaacccaggaggcggaggttgtggtgagccaagatcacagcattgcactccagcctgggcaacaagagcaaaactctgtctcaaaaaaaaaaaaaaaaagaaaagaaaaaagaaaagcaggacctgctacaccctgaccaccccctgccgcccccacaggcagagctgacctgtccggtaatcaaggcaatgcagccggccgcctagctacagttcacgagccagttgtcacccagtgggcggtgcatcctccagcccccgctcaccccagtctcctggacaaaatggagaaagcgcctccacagcc

SEQ ID NO: 146029 - DNA, 537 bp, Homo sapiens
  Payload ID: 8957
  Gene Symbol: KIAA1683
  Gene Name: KIAA1683
  ENST ID: ENST00000593659
  CDS Start-End: 472-537
agactgctaggtttagcttcaggggcagcccagggcagtgttgctgcatattgcatggatgaaaggctgaaggctgcctcctcttgcaggctggcttctgagattgcaccttcttctcctgctactcctccaaatctatgacccttcaagaaaagtagccagccaggcatggtggcgtgcacctgtaatcccagctactcgggaggctgaggcaggagaatcgcttgaacccaggaggcggaggttgtggtgagccaagatcacagcattgcactccagcctgggcaacaagagcaaaactctgtctcaaaaaaaaaaaaaaaaagaaaagaaaaaagaaaagcaggcagagctgacctgtccggtaatcaaggcaatgcagccggccgcctagctacagttcacgagccagttgtcacccagtgggcggtgcatcctccagcccccgctcaccccagtctcctggacaaaatggagaaagcgcctccacagccccagcacgagggcctcaagtccaaggagcatcttccgcaacag

SEQ ID NO: 146030 - DNA, 535 bp, Homo sapiens
  Payload ID: 8957
  Gene Symbol: KIAA1683
  Gene Name: KIAA1683
  ENST ID: ENST00000595654
  CDS Start-End: 253-535
caggggcagcccagggcagtgttgctgcatattgcatggatgaaaggctgaaggctgcctcctcttgcaggctggcttctgagattgcaccttcttctcctgctactcctccaaatctatgacccttcaagagctgacctgtccggtaatcaaggcaatgcagccggccgcctagctacagttcacgagccagttgtcacccagtgggcggtgcatcctccagcccccgctcaccccagtctcctggacaaaatggagaaagcgcctccacagccccagcacgagggcctcaagtccaaggagcatcttccgcaacagcctgccgaaggcaagacggcgtcccgccgcgtcccacgcctccgggctgtggtcgagagccaggccttcaagaacatcctggtagacgagatggacatgatgcacgcccgtgcagccacgctcatccaagccaactggaggggctattggctccggcagaagctgatttcccagatgatggcggccaaggccatccaggaggcctggcggcgcttca

SEQ ID NO: 146031 - DNA, 632 bp, Homo sapiens
  Payload ID: 8957
  Gene Symbol: KIAA1683
  Gene Name: KIAA1683
  ENST ID: ENST00000608950
  CDS Start-End: 183-632
acaaagctgctgcggcaccagggctccaagactggccgttcagactgctaggtttagcttcaggggcagccagcccagggcagtgttgctgcatattgcatggatgaaaggctgaaggctgcctcctcttgcaggctggcttctgagattgcaccttcttctcctgctactcctccaaatctatgacccttcaaggcagagctgacctgtccggtaatcaaggcaatgcagccggccgcctagctacagttcacgagccagttgtcacccagtgggcggtgcatcctccagcccccgctcaccccagtctcctggacaaaatggagaaagcgcctccacagccccagcacgagggcctcaagtccaaggagcatcttccgcaacagcctgccgaaggcaagacggcgtcccgccgcgtcccacgcctccgggctgtggtcgagagccaggccttcaagaacatcctggtagacgagatggacatgatgcacgcccgtgcagccacgctcatccaagccaactggaggggctattggctccggcagaagctgatttcccagatgatggcggccaaggccatccaggaggcctggcggcgcttcaacaagagacacatccttcactccagcaag

SEQ ID NO: 146032 - DNA, 2684 bp, Homo sapiens
  Payload ID: 8957
  Gene Symbol: KIAA1683
  Gene Name: KIAA1683
  ENST ID: ENST00000612316
  CDS Start-End: 217-2601
agagctgccagggattggccagaacttggctttgagtcacaaagctgctgcggcaccagggctccaagactggccgttcagactgctaggtttagcttcaggggcagcccagggcagtgttgctgcatattgcatggatgaaaggctgaaggctgcctcctcttgcaggctggcttctgagattgcaccttcttctcctgctactcctccaaatctatgacccttcaaggcagagctgacctgtccggtaatcaaggcaatgcagccggccgcctagctacagttcacgagccagttgtcacccagtgggcggtgcatcctccagcccccgctcaccccagtctcctggacaaaatggagaaagcgcctccacagccccagcacgagggcctcaagtccaaggagcatcttccgcaacagcctgccgaaggcaagacggcgtcccgccgcgtcccacgcctccgggctgtggtcgagagccaggccttcaagaacatcctggtagacgagatggacatgatgcacgcccgtgcagccacgctcatccaagccaactggaggggctattggctccggcagaagctgatttcccagatgatggcggccaaggccatccaggaggcctggcggcgcttcaacaagagacacatccttcactccagcaagtcgttggtaaagaaaacgagggcggaggagggggacataccttatcacgccccacagcaggtgcgcttccagcatccggaagagaaccgccttctgtccccgcccatcatggtgaacaaggagacccagttcccttcctgtgacaatctggtcctctgcagaccccagtcgtcccccctcctgcagcccccagcagctcagggtaccccagagccctgtgtgcagggtcctcatgctgccagagtccgggggctggccttcctgccacaccagacggtcaccatcagatttccctgcccagtgagtctggacgcaaaatgccagccatgcctgctgaccagaaccatcagaagcacctgcctcgtccacatagagggtgactcagtgaagaccaatgcctcatcccagagacatccaccctgcctgtcccagagaccactggccgccccgctgaccaaggcctcatctcagggacatctgcccactgagctgaccaagaccccatccctggcccatctggacacctgtctgagcaagatgcattcccagacacatctggccacaggtgccgtgaaggtccagtcccaagcgcctctagccacctgtctgaccaagacgcagtcccgggggcagccgatcacagacataaccacgtgcctcatcccagcgcaccaggctgctgatctcagcagcaacacccactcccaggtgctcctaacagggtccaaggtgtccaaccacgcctgccagcgcctcggtggcctcagcgccccaccctgggccaagccagaggacagacagacccagccacagccccacggacacgtgccggggaagaccactcaggggggaccatgcccggcagcctgtgaggtccagggtatgctggtgccgccgatggcacccaccggccattccacatgcaacgttgagtcctggggagacaacggagccacacgtgcccagccatcaatgcccggccaggcggtgccctgccaggaggacacgggccccgcggacgctggtgtggttggtggccaatcgtggaaccgcgcatgggagccagccaggggtgctgcgtcctgggacacctggcgcaacaaggcggtggtgcctcccaggcggtccggggagccaatggtgtccatgcaggctgcagaggagatccgcatcctcgcagtgatcactatccaggcgggcgtccgtggctacctggcgcgtcgcaggatccggctgtggcaccggggggccatggtcatccaagctacttggcgcggctaccgtgtgcggcggaacctggcacacctctgcagagccaccacgaccatccagtctgcctggcgcggctacagcacccgccgggaccaagcccggcactggcagatgctccaccccgtcacgtgggtggagctgggcagccgggccggggtcatgtctgaccgaagctggttccaggatggcagagccaggacagtatctgaccatcgctgcttccagtcctgccaggcacacgcttgcagcgtctgccactccctgagctccaggatcgggagcccgcccagcgtggtgatgctagtgggctccagccctcgcacctgtcatacctgtggacgcacacagcccacccgtgtggtgcagggcatgggccagggcactgagggccccggggcagtgtcttgggcctccgcctaccagctggctgccctgagtcccaggcagccgcatcgccaggacaaagcggccacagccatccagtccgcctggaggggctttaagatccgccagcagatgaggcagcagcaaatggcagcgaagatagttcaagccacctggcgaggccaccatacccggagctgtctgaagaacacagaggcgctcttgggaccagcagacccctcggccagctcacggcacatgcattggcctggcatctaggaccctggctccctgcagtggggacttcgtgggaggcactcatggctctctgggtctaatgaataaagtcctccacagcctag

SEQ ID NO: 146033 - DNA, 7610 bp, Homo sapiens
  Payload ID: 8958
  Gene Symbol: KIAA1715
  Gene Name: KIAA1715
  Uniprot ID: Q9C0E8
  ENST ID: ENST00000272748
  CDS Start-End: 249-1535
agcggcgcgcgccgaccgcggcgccaattggcgagcggctggagcgcggggtttcatgggaaggagttggcccggcttgtctctctgtcagtggcggctgctgcctgctctggaggcaggctgggcggtggcggccgagactggcgggggtggacgcccgggccgggctgcgcccgcttcttgcagctgtgaattcctttggacaattgatgatatttatcattgtgcccagtttctacaaataaaagatgggtggattattttctcgatggaggacaaaaccttcaactgtagaagttctagaaagtatagataaggaaattcaagcattggaagaatttagggaaaaaaatcagagattacaaaaattatgggttggaagattaattctgtattcctcagttctctatctgtttacatgcttaattgtatatttgtggtatcttcctgatgaatttacagcaagacttgccatgacactcccattttttgcttttccattgatcatctggagcataagaacagtaattattttcttcttttccaagagaacagaaagaaataatgaagcattggatgatttaaaatcccagaggaaaaaaatacttgaagaagtcatggaaaaagaaacttacaagacggctaaattaattcttgaaaggtttgatccggactcaaagaaagcaaaggagtgtgagccgccatctgctggagcagctgtaactgcaagacctggacaagagattcgtcagcgaactgcagctcaaagaaacctttctccaacaccagcaagccctaaccagggccctcctccacaagttccagtatctcctggaccaccaaaggacagttctgcccctggtggacccccagaaaggactgttactccagccctatcatcaaatgtgttaccaagacatcttggatcccctgctacttcagtgcctggaatgggtcttcatcctccaggtccacctttagcaagacctattctcccccgagaacgaggtgctttggatagaattgttgaatatttggttggtgatggtccacaaaacaggtatgcacttatatgtcagcagtgtttttctcataatggcatggctttgaaggaagaatttgaatacattgcttttcgatgtgcctactgttttttcttgaaccctgcaagaaaaaccagacctcaggctccaagacttcctgagtttagttttgagaagaggcaggtggtggaaggttcaagttcagttggtcccttgccatcaggaagtgtgctttcatcagacaaccagtttaatgaagaatctttagaacacgatgttcttgatgataatacagagcagacagatgacaaaataccagctacagaacagacaaaccaagtgattgaaaaagcatctgactcagaggaaccagaggagaaacaagagactgagaatgaggaagcctcagtgattgaaaccaactccacagttcctggagctgattctattcctgatcctgaactaagtggagaatctttgacggcagagtagtaaatgcttccacgtgccttcaactggatatttatagtcttactgatgtcagttattgctttttcggtggcacttactttttttgcccctctaagggtatgcttgtgtatcatttgaattcagattgcctagctatttgaacatctcaaagttatatatactgggtattaaaattaaaagcaagttatatcagtgaagtaagatccttttgaatgtacaaagacccacactattgagacagcttttagatacttttttgtccattctaaaagtaagcaaacatgattgccttcttgttttctgtatgtataacccgtaaatatccattttgacataggaagaactttggttaagagtaagttctctaattgtgtttgttttaaggaatgaaacttggttaagattttgactacttcattattaaaaattgatagaattttagctcctgagatatttacaactgggagaaatgtctatttaggtgtttacattaagcggtatgaaagttgttaccacataggcactggtacgaattctcaataagaatgcagtggaacagttaagtagaactgtaactacgttggcactggtacgaattctcagtgagaatgcaatgaaacagtcaactgcagtgtttctttttgatgtcttttattttacaactgggccaaaggcacattatgtatataattagtttatatttacacactagcatataggaaatatttctgcacttgaccctatttgaattctgagcattatttataagtataaaatgatgatatataagtgaattttgtgctcttgtttgtattttattaaggaaaatgaaaataatctggcatcagtttcattttgctaaatatctagtcttcttcaaacagtatcttggtgggtgacttggctacctgaaaaatcttaggaggaatagctcacaatacaataaatctgtagattctgcttagagcaaattatggtacttttattcagacttgtttcctttctagttaacagaaatagtgacatttagaggttttaatcagaagttaggtttttctgattcaggaacatcgtaggccagccatttgtaatttttaactttgagaaacaaattttgtgagaataggtagtgggttgctggtagttaattggatttaatatttgtattaaggattaactggaaaaaatgtgtctcagtgctaattcttggacctttaatacagtgtgcttatctgttacggcctccttttatctctcttctccaatattaaaaaaaatggaaatcaaattattatgctgaagggaaaaatatacctgtataagaatggtgtgtttggctaatgtttctaagttgcacacagtttattaacaactgaacaaaacatttttatcatttaaaaatctatttttatgatttaatatctcatatgtgacagtttttttttttttttttttttggaactcaatctgttaacagtctgggacatccggtatagtaaccagagtttttgagcctgccgtattgggcttaaatttcaggtctgtagtcttgggcaagtcacctataaactcactgagattattttttcatctgtaaaatgggaagagttatgtttatttttgaagggtattaggataattaaaaataatgtaatgtgcctagcacactacctgaaaacgatggcatttgttcttattaatgtctttaaaatatgcaaggaccataagtttttcctcttgcagatgaggaaagtaaaaaataatacgaacatgtaattcagcttctcagattcaagccaatgttttttgcatcaacttttctatattgtatgtatgtatataaatacatagattaaggaaataggaaactgaaactctgtggaatataaactttttaaaaataatttcatcaggttttttgtatgttactgacccatatggattttagtaacatcttgcttagtcatgttgttataaaacattcaaattctgatatacattgcttgaaaatgagtgagtacctcagagaaatttgatagactcaaacagatagtatgagaaatatctttgaaagaaatatggaggaaggttaaaaggggattagtaaaattaatgcgataggtaacatgtttgtaaccatatagtatccttttagatacaaaagcttattttcattattattataataaacagttaatggttgaaacttagtaaaatgtcctatttctgattattaagactagtataaatgagaaaatccaagctattaagtaccattagctacagtgatcttagcttccttgcttacaattgttcagtgggtcatctaaattcttctatgtcctgagcatgatctacaaacatggtctagcttctgtctctccgtcttcccgccatcattgtgctgtagccatatggaactcctttcagttctctgaccatgccctttcctgcctcagatttcagcttaaattttgcctcctcagagagatgccttcccaaactccccatctgaagctggcctctgccttttactccctatcatgtcactctctgctcaccatccttatcacaatgtgtatttgatttgtttgctagtttactgtcttcacaacataatgtccgtttgtgcaagggtcttatttttcttattcatgtctgtatctcaagggtctagcacaatgcttgatgcatattgtgtgaataaatactttgttgccaaatccagtgaaaactctcagttcttgtttcactgcttggcagtattgacattgaatattctctgagatactttttttcttttggcttttcatatatcacactattattctcttatttctctggcctcttgctctcaacgtcctgtaagtgttggtgttccttaagttctacctagtgtcatcatttcttcattctgcatattctttccctagggtttcttcccaacaccaaaggacttaccatctgtctctctgaatctcagatctccagctttgatctgtttcctttactttagagctatatatttgcctgcctactggcctgtctctcacaatccatatattcaagaatgaacactatactttgcttcaaaccttcagaacattcaaaccgtttatgtttctcatctaatcaaatagagttactctctaagccagaagctgtaaactcatctcttttccctttattcaagctgtcaatttttgtctcctaaacatcttctagttatattctcatttctctgttcacattgcattaataatgatgataaacatttgcattcttattctgtgccaggcaacatgctaactgctgtatatatattattatatttgtactttggcaagaatcctgtgaagatttttatctttggactactagaagagaaagctgagttgtagagagagtatgtatttaagtccgtttgggctgctataacagaataccacagactgggtaacgtgatgaacaaaaatttatttggctcacagttctggaacctgggaaatccaaaggcatgatgctagcatctggtgagggcctttgtgctttgtcatcccatgccagaaggcagaagggtaagagagggcaagagtgagcaagagatggaagttgcaacctcaagctcttttataatgagcattaatccattcatgagggcttcaccctcatgacctaaacatctccattaggctccaccttccaatgcaacagttagcataagttttcaacacatgctttttgtagcattcaaaccatagcaggaagcaactttgcttaaaattgtatacctggtaagtggaaaaagagggatttgaatataggcaaatgacttcagaggatttactcttaatttctgttgtactgccttctaatcttggcctccatcatttcagattaccaaagctgtctcttaactggtttctttgtctccaaccttgtgcacttgctatctattctgtgtgctgcagcctgagtttttaaaaaacagaaaatgaggggccaggtgtggtggtggctcacgcctgtaatcccagcaagttgggaggctgaggcgggcagatcatctggggtcaggagttcgagaccagcctgaccaacgtggagaaacactatctctactaaaaatacaaaattagccaggcgtggtggtgcatgcctgtaatcctagctactcaggagcctgaggcaggagaattgcttgaacacgggaggcagaggttgcagtgagcagagattgcgccattgtactccagcctgggcaacaagagtgaaactccatctcaaaaaaaaaaaagaaagaaagaaaatgaatctgccacgccattgcttagaccctttaatgactcttgagtgttcttgggatgaggtccaaatttactaataaggcctgcaaagccctgtgtaattttgctcctagttatggctggcatctgcaccacaactacagccactgccacctccccctgccacacacacattttaaaagtaacaatagtagtgttttctgtgttttgcatatgcagtcttttctcatctcccagccttcttgagcttttcctctgcctgagatacgctcccactcacatagacattgggggcactaaataaaaatagctgtttaattgaattggaatcgttccacttggaacccaagtttggaaattttgctacttcttgttaagctaggccttttattcttgaagttgctatttctcatacaaactcattttatgcattagacacacagtcactattgttatggagaacatagttgtatcagaagaggtatagctttgggtgtggatgtgcgtgtgtcaggggaaagatattctgattatatgatgattttcataaaatatagtatgctgagtttccgaaaatcctaaatgacttagaaatggtgctatatgtggtttgtttgacccctgcaaatctcatgttgaaatttgatccccattgctggaggtgttttgagcatggagcggatccctcatgaatgtcttggcgttgtccttgcagtaatgagttcttgctctatttttcctcccctggaagctgattgtttaaaagagcctggtatcctccctccctttcttctttgcttcctctctcttgctgtgtgatctctgcacacaccagctcccctttgctttctgccatgagtggtctgaggctctcaccagaagccaagcagaggctggcaccatgcttctagtacagcctgcagaactgtaagccaaataaacttcttctttgttttttttttttgtttgttttgtttttttttcagtaaattacccagcctcaggtattccttaacaacacaaatgggctaagacacagggtcatagggatagcaggcacctgagccaagccagaacttagatctcaactgttaatgcaggatgatttgtattgaaccatgaattttacactgcctctcaatgttggtgtcagcatttaaggttatttaaaaaatacaacctgaaggttacataaagtttcatttaaaaaataagaccttataagtctacttttatttccagtggacagcaactacttaatcgtcttaaaactttcttcttacaatattactttacaatattacctgttggatttattatctgtgtacaaatcagttagttgaagggccaaagaataaaggcattttgtgaattatgaatagctattttgaaatggtcatggagactagctactctagaaaattgggagaatatactgtattaagttactatctggtataacttcaattaattgtgaaaattgtagcagagatctagatatagtttatgaacttctaaagagacattaaagggaattcaagtacttgtgtaaagatgaaccaaggtagagatgattgtgaattggtgatctgctgtatgttacagttatgtaatttgacttgtttcaaaattattaaagttttaagtgtatgcattctactggtcaataagtaaatatattcaggctctgaatgtagacagataaatatataaatatagaaagtacatttgttagaatacaaacaagaataaaaattgagtacagaat

SEQ ID NO: 146034 - DNA, 528 bp, Homo sapiens
  Payload ID: 8958
  Gene Symbol: KIAA1715
  Gene Name: KIAA1715
  ENST ID: ENST00000392540
  CDS Start-End: 187-528
ctctgtcagtggcggctgctgcctgctctggaggcaggctgggcggtggcggccgagactggcgggggtggacgcccgggccgggctgcgcccgcttcttgcagctgtgaattcctttggacaattgatgatatttatcattgtgcccagtttctacaaataaaagatgggtggattattttctcgatggagggtaagacaaaaccttcaactgtagaagttctagaaagtatagataaggaaattcaagcattggaagaatttagggaaaaaaatcagagattacaaaaattatgggttggaagattaattctgtattcctcagttctctatctgtttacatgcttaattgtatatttgtggtatcttcctgatgaatttacagcaagacttgccatgacactcccattttttgcttttccattgatcatctggagcataagaacagtaattattttcttcttttccaagagaacagaaagaaataatgaagcattggatgatttaaaatcccagaggaaaaaaata

SEQ ID NO: 146035 - DNA, 2028 bp, Homo sapiens
  Payload ID: 8958
  Gene Symbol: KIAA1715
  Gene Name: KIAA1715
  Uniprot ID: Q9C0E8
  ENST ID: ENST00000409660
  CDS Start-End: 317-1234
ccggcttgtctctctgtcagtggcggctgctgcctgctctggaggcaggctgggcggtggcggccgagactggcgggggtggacgcccgggccgggctgcgcccgcttcttgcagctgtgaattcctttggacaattgatgatatttatcattgtgcccagtttctacaaataaaagatgggtggattattttctcgatggaggcatctggagcataagaacagtaattattttcttcttttccaagagaacagaaagaaataatgaagcattggatgatttaaaatcccagaggaaaaaaatacttgaagaagtcatggaaaaagaaacttacaagacggctaaattaattcttgaaaggtttgatccggactcaaagaaagcaaaggagtgtgagccgccatctgctggagcagctgtaactgcaagacctggacaagagattcgtcagcgaactgcagctcaaagaaacctttctccaacaccagcaagccctaaccagggccctcctccacaagttccagtatctcctggaccaccaaaggacagttctgcccctggtggacccccagaaaggactgttactccagccctatcatcaaatgtgttaccaagacatcttggatcccctgctacttcagtgcctggaatgggtcttcatcctccaggtccacctttagcaagacctattctcccccgagaacgaggtgctttggatagaattgttgaatatttggttggtgatggtccacaaaacaggtatgcacttatatgtcagcagtgtttttctcataatggcatggctttgaaggaagaatttgaatacattgcttttcgatgtgcctactgttttttcttgaaccctgcaagaaaaaccagacctcaggctccaagacttcctgagtttagttttgagaagaggcaggtggtggaaggttcaagttcagttggtcccttgccatcaggaagtgtgctttcatcagacaaccagtttaatgaagaatctttagaacacgatgttcttgatgataatacagagcagacagatgacaaaataccagctacagaacagacaaaccaagtgattgaaaaagcatctgactcagaggaaccagaggagaaacaagagactgagaatgaggaagcctcagtgattgaaaccaactccacagttcctggagctgattctattcctgatcctgaactaagtggagaatctttgacggcagagtagtaaatgcttccacgtgccttcaactggatatttatagtcttactgatgtcagttattgctttttcggtggcacttactttttttgcccctctaagggtatgcttgtgtatcatttgaattcagattgcctagctatttgaacatctcaaagttatatatactgggtattaaaattaaaagcaagttatatcagtgaagtaagatccttttgaatgtacaaagacccacactattgagacagcttttagatacttttttgtccattctaaaagtaagcaaacatgattgccttcttgttttctgtatgtataacccgtaaatatccattttgacataggaagaactttggttaagagtaagttctctaattgtgtttgttttaaggaatgaaacttggttaagattttgactacttcattattaaaaattgatagaattttagctcctgagatatttacaactgggagaaatgtctatttaggtgtttacattaagcggtatgaaagttgttaccacataggcactggtacgaattctcaataagaatgcagtggaacagttaagtagaactgtaactacgttggcactggtacgaattctcagtgagaatgcaatgaaacagtcaactgcagtgtttctttttgatgtcttttattttacaactgggccaaaggcacattatgtatataattagtttatatttacacactagcatataggaaatatttctgcacttgaccctatttgaattctgagcattatttataagtataaaatgatgatatataagtgaa

SEQ ID NO: 146036 - DNA, 639 bp, Homo sapiens
  Payload ID: 8958
  Gene Symbol: KIAA1715
  Gene Name: KIAA1715
  ENST ID: ENST00000445472
  CDS Start-End: 391-639
ctttttgacgtccaagagtgacagagcctcaagcactcctggggaccgggctgacttttctccactggcttggttgggaactggcttcttcggagctgtgtagtcttaatttgctttgctgctggctggctgacagctgatgggggactcctcaggacggactcccttccagatgcacccatctccatccttctcaactccccaacctttgtcctccccactcttcgctcgcgcggcggtctgagaccaccaggaccagtttcaggggtttccttctccagcgagacttggcagaacaggctttaaaagcaaaggaggcagcggaagactgtgaattcctttggacaattgatgatatttatcattgtgcccagtttctacaaataaaagatgggtggattattttctcgatggaggacaaaaccttcaactgtagaagttctagaaagtatagataaggaaattcaagcattggaagaatttagggaaaaaaatcagagattacaaaaattatgggttggaagattaattctgtattcctcagttctctatctgtttacatgcttaattgtatatttgtggtatcttcctgatgaatttacagcaagacttgccatgacactcccattttttgctttt

SEQ ID NO: 146037 - DNA, 539 bp, Homo sapiens
  Payload ID: 8958
  Gene Symbol: KIAA1715
  Gene Name: KIAA1715
  ENST ID: ENST00000431754
  CDS Start-End: 1-210
ggatcccctgctacttcagtgcctggaatgggtcttcatcctccaggtccacctttagcaagacctattctcccccgagaacgaggtgctttggatagaattgttgaatatttggttggtgatggtccacaaaacagcttttcgatgtgcctactgttttttcttgaaccctgcaagaaaaaccagacctcaggctccaagacttcctgagtttagttttgagaagaggcaggtggtggaaggttcaagttcagttggtcccttgccatcaggaagtgtgctttcatcagacaaccagtttaatgaagaatctttagaacacgatgttcttgatgataatacagagcagacagatgacaaaataccagctacagaacagacaaaccaagtgattgaaaaagcatctgactcagaggaaccagaggagaaacaagagactgagaatgaggaagcctcagtgattgaaaccaactccacagttcctggagctgattctattcctgatcctgaactaagtggagaatctttgacggcagagt

SEQ ID NO: 146038 - DNA, 7647 bp, Homo sapiens
  Payload ID: 8958
  Gene Symbol: KIAA1715
  Gene Name: KIAA1715
  Uniprot ID: Q9C0E8
  ENST ID: ENST00000544803
  CDS Start-End: 198-1577
tttcatgggaaggagttggcccggcttgtctctctgtcagtggcggctgctgcctgctctggaggcaggctgggcggtggcggccgagactggcgggggtggacgcccgggccgggctgcgcccgcttcttgcagctgtgaattcctttggacaattgatgatatttatcattgtgcccagtttctacaaataaaagatgggtggattattttctcgatggaggacaaaaccttcaactgtagaagttctagaaagtatagataaggaaattcaagcattggaagaatttagggaaaaaaatcagagattacaaaaattatgggttggaagattaattctgtattcctcagttctctatctgtttacatgcttaattgtatatttgtggtatcttcctgatgaatttacagcaagacttgccatgacactcccattttttgcttttccattgatcatctggagcataagaacagtaattattttcttcttttccaagagaacagaaagaaataatgaagcattggatgatttaaaatcccagaggaaaaaaatacttgaagaagtcatggaaaaagaaacttacaagacggctaaattaattcttgaaaggtttgatccggactcaaagaaagcaaaggagtgtgagccgccatctgctggagcagctgtaactgcaagacctggacaagagattcgtcagcgaactgcagctcaaagaaacctttctccaacaccagcaagccctaaccagggccctcctccacaagttccagtatctcctggaccaccaaaggacagttctgcccctggtggacccccagaaaggactgttactccagccctatcatcaaatgtgttaccaagacatcttggatcccctgctacttcagtgcctggaatggagatggggcttcctcatattgcccaggctggtcttgaacacctgagctcaagtgatctgtctacctcgacctctcaaagtgctgggattacaggtcttcatcctccaggtccacctttagcaagacctattctcccccgagaacgaggtgctttggatagaattgttgaatatttggttggtgatggtccacaaaacaggtatgcacttatatgtcagcagtgtttttctcataatggcatggctttgaaggaagaatttgaatacattgcttttcgatgtgcctactgttttttcttgaaccctgcaagaaaaaccagacctcaggctccaagacttcctgagtttagttttgagaagaggcaggtggtggaaggttcaagttcagttggtcccttgccatcaggaagtgtgctttcatcagacaaccagtttaatgaagaatctttagaacacgatgttcttgatgataatacagagcagacagatgacaaaataccagctacagaacagacaaaccaagtgattgaaaaagcatctgactcagaggaaccagaggagaaacaagagactgagaatgaggaagcctcagtgattgaaaccaactccacagttcctggagctgattctattcctgatcctgaactaagtggagaatctttgacggcagagtagtaaatgcttccacgtgccttcaactggatatttatagtcttactgatgtcagttattgctttttcggtggcacttactttttttgcccctctaagggtatgcttgtgtatcatttgaattcagattgcctagctatttgaacatctcaaagttatatatactgggtattaaaattaaaagcaagttatatcagtgaagtaagatccttttgaatgtacaaagacccacactattgagacagcttttagatacttttttgtccattctaaaagtaagcaaacatgattgccttcttgttttctgtatgtataacccgtaaatatccattttgacataggaagaactttggttaagagtaagttctctaattgtgtttgttttaaggaatgaaacttggttaagattttgactacttcattattaaaaattgatagaattttagctcctgagatatttacaactgggagaaatgtctatttaggtgtttacattaagcggtatgaaagttgttaccacataggcactggtacgaattctcaataagaatgcagtggaacagttaagtagaactgtaactacgttggcactggtacgaattctcagtgagaatgcaatgaaacagtcaactgcagtgtttctttttgatgtcttttattttacaactgggccaaaggcacattatgtatataattagtttatatttacacactagcatataggaaatatttctgcacttgaccctatttgaattctgagcattatttataagtataaaatgatgatatataagtgaattttgtgctcttgtttgtattttattaaggaaaatgaaaataatctggcatcagtttcattttgctaaatatctagtcttcttcaaacagtatcttggtgggtgacttggctacctgaaaaatcttaggaggaatagctcacaatacaataaatctgtagattctgcttagagcaaattatggtacttttattcagacttgtttcctttctagttaacagaaatagtgacatttagaggttttaatcagaagttaggtttttctgattcaggaacatcgtaggccagccatttgtaatttttaactttgagaaacaaattttgtgagaataggtagtgggttgctggtagttaattggatttaatatttgtattaaggattaactggaaaaaatgtgtctcagtgctaattcttggacctttaatacagtgtgcttatctgttacggcctccttttatctctcttctccaatattaaaaaaaatggaaatcaaattattatgctgaagggaaaaatatacctgtataagaatggtgtgtttggctaatgtttctaagttgcacacagtttattaacaactgaacaaaacatttttatcatttaaaaatctatttttatgatttaatatctcatatgtgacagtttttttttttttttttttttggaactcaatctgttaacagtctgggacatccggtatagtaaccagagtttttgagcctgccgtattgggcttaaatttcaggtctgtagtcttgggcaagtcacctataaactcactgagattattttttcatctgtaaaatgggaagagttatgtttatttttgaagggtattaggataattaaaaataatgtaatgtgcctagcacactacctgaaaacgatggcatttgttcttattaatgtctttaaaatatgcaaggaccataagtttttcctcttgcagatgaggaaagtaaaaaataatacgaacatgtaattcagcttctcagattcaagccaatgttttttgcatcaacttttctatattgtatgtatgtatataaatacatagattaaggaaataggaaactgaaactctgtggaatataaactttttaaaaataatttcatcaggttttttgtatgttactgacccatatggattttagtaacatcttgcttagtcatgttgttataaaacattcaaattctgatatacattgcttgaaaatgagtgagtacctcagagaaatttgatagactcaaacagatagtatgagaaatatctttgaaagaaatatggaggaaggttaaaaggggattagtaaaattaatgcgataggtaacatgtttgtaaccatatagtatccttttagatacaaaagcttattttcattattattataataaacagttaatggttgaaacttagtaaaatgtcctatttctgattattaagactagtataaatgagaaaatccaagctattaagtaccattagctacagtgatcttagcttccttgcttacaattgttcagtgggtcatctaaattcttctatgtcctgagcatgatctacaaacatggtctagcttctgtctctccgtcttcccgccatcattgtgctgtagccatatggaactcctttcagttctctgaccatgccctttcctgcctcagatttcagcttaaattttgcctcctcagagagatgccttcccaaactccccatctgaagctggcctctgccttttactccctatcatgtcactctctgctcaccatccttatcacaatgtgtatttgatttgtttgctagtttactgtcttcacaacataatgtccgtttgtgcaagggtcttatttttcttattcatgtctgtatctcaagggtctagcacaatgcttgatgcatattgtgtgaataaatactttgttgccaaatccagtgaaaactctcagttcttgtttcactgcttggcagtattgacattgaatattctctgagatactttttttcttttggcttttcatatatcacactattattctcttatttctctggcctcttgctctcaacgtcctgtaagtgttggtgttccttaagttctacctagtgtcatcatttcttcattctgcatattctttccctagggtttcttcccaacaccaaaggacttaccatctgtctctctgaatctcagatctccagctttgatctgtttcctttactttagagctatatatttgcctgcctactggcctgtctctcacaatccatatattcaagaatgaacactatactttgcttcaaaccttcagaacattcaaaccgtttatgtttctcatctaatcaaatagagttactctctaagccagaagctgtaaactcatctcttttccctttattcaagctgtcaatttttgtctcctaaacatcttctagttatattctcatttctctgttcacattgcattaataatgatgataaacatttgcattcttattctgtgccaggcaacatgctaactgctgtatatatattattatatttgtactttggcaagaatcctgtgaagatttttatctttggactactagaagagaaagctgagttgtagagagagtatgtatttaagtccgtttgggctgctataacagaataccacagactgggtaacgtgatgaacaaaaatttatttggctcacagttctggaacctgggaaatccaaaggcatgatgctagcatctggtgagggcctttgtgctttgtcatcccatgccagaaggcagaagggtaagagagggcaagagtgagcaagagatggaagttgcaacctcaagctcttttataatgagcattaatccattcatgagggcttcaccctcatgacctaaacatctccattaggctccaccttccaatgcaacagttagcataagttttcaacacatgctttttgtagcattcaaaccatagcaggaagcaactttgcttaaaattgtatacctggtaagtggaaaaagagggatttgaatataggcaaatgacttcagaggatttactcttaatttctgttgtactgccttctaatcttggcctccatcatttcagattaccaaagctgtctcttaactggtttctttgtctccaaccttgtgcacttgctatctattctgtgtgctgcagcctgagtttttaaaaaacagaaaatgaggggccaggtgtggtggtggctcacgcctgtaatcccagcaagttgggaggctgaggcgggcagatcatctggggtcaggagttcgagaccagcctgaccaacgtggagaaacactatctctactaaaaatacaaaattagccaggcgtggtggtgcatgcctgtaatcctagctactcaggagcctgaggcaggagaattgcttgaacacgggaggcagaggttgcagtgagcagagattgcgccattgtactccagcctgggcaacaagagtgaaactccatctcaaaaaaaaaaaagaaagaaagaaaatgaatctgccacgccattgcttagaccctttaatgactcttgagtgttcttgggatgaggtccaaatttactaataaggcctgcaaagccctgtgtaattttgctcctagttatggctggcatctgcaccacaactacagccactgccacctccccctgccacacacacattttaaaagtaacaatagtagtgttttctgtgttttgcatatgcagtcttttctcatctcccagccttcttgagcttttcctctgcctgagatacgctcccactcacatagacattgggggcactaaataaaaatagctgtttaattgaattggaatcgttccacttggaacccaagtttggaaattttgctacttcttgttaagctaggccttttattcttgaagttgctatttctcatacaaactcattttatgcattagacacacagtcactattgttatggagaacatagttgtatcagaagaggtatagctttgggtgtggatgtgcgtgtgtcaggggaaagatattctgattatatgatgattttcataaaatatagtatgctgagtttccgaaaatcctaaatgacttagaaatggtgctatatgtggtttgtttgacccctgcaaatctcatgttgaaatttgatccccattgctggaggtgttttgagcatggagcggatccctcatgaatgtcttggcgttgtccttgcagtaatgagttcttgctctatttttcctcccctggaagctgattgtttaaaagagcctggtatcctccctccctttcttctttgcttcctctctcttgctgtgtgatctctgcacacaccagctcccctttgctttctgccatgagtggtctgaggctctcaccagaagccaagcagaggctggcaccatgcttctagtacagcctgcagaactgtaagccaaataaacttcttctttgttttttttttttgtttgttttgtttttttttcagtaaattacccagcctcaggtattccttaacaacacaaatgggctaagacacagggtcatagggatagcaggcacctgagccaagccagaacttagatctcaactgttaatgcaggatgatttgtattgaaccatgaattttacactgcctctcaatgttggtgtcagcatttaaggttatttaaaaaatacaacctgaaggttacataaagtttcatttaaaaaataagaccttataagtctacttttatttccagtggacagcaactacttaatcgtcttaaaactttcttcttacaatattactttacaatattacctgttggatttattatctgtgtacaaatcagttagttgaagggccaaagaataaaggcattttgtgaattatgaatagctattttgaaatggtcatggagactagctactctagaaaattgggagaatatactgtattaagttactatctggtataacttcaattaattgtgaaaattgtagcagagatctagatatagtttatgaacttctaaagagacattaaagggaattcaagtacttgtgtaaagatgaaccaaggtagagatgattgtgaattggtgatctgctgtatgttacagttatgtaatttgacttgtttcaaaattattaaagttttaagtgtatgcattctactggtcaataagtaaatatattcaggctctgaatgtagacagataaatatataaatatagaaagtacatttgttagaatacaaacaagaataaaaattgagtac

SEQ ID NO: 146039 - DNA, 6429 bp, Homo sapiens
  Payload ID: 8959
  Gene Symbol: KIAA1755
  Gene Name: KIAA1755
  Uniprot ID: Q5JYT7
  ENST ID: ENST00000279024
  CDS Start-End: 273-3875
gtctggtggcccgacccgcgccgcccgcggctcccttatgtctctcgccgtctccagcctcagtccctctctgtctctctctcagtctctctccctgtcctccccggccgctcctccgagatgacgccggggtcggtgccccgggcctgccctatcccctggctccagggctaggcgggaccgagggctgccccagacagacggacccgcggacccacagaccccgcgcccaggagaggagccgcgccgcccgccgctggcagcccgtcaccatggaccctccatccctcgacacagccatccagcatgccctggcgggcctctatcctcctttcgaggccacagcacccaccgtcctgggtcaggtgttccgtctcctggactctggcttccagggggatgggctgagcttccttctggatttcctgatccctgccaagcgcctgtgtgagcaagtgcgagaagcagcctgtgctccctactcacactgcctcttcttacacgagggctggccactctgtctgagggatgaagttgtggtccacttggcacccctcaaccctctcttattgcgccagggtgacttctacctccaagtggagccccaggaggagcagtctgtctgcatcatgatcaaatgcctctccctggacctctgcacagtggacaagaagcctgttccagagccagcctaccctatacttttcacccaagaatggctggaggccatcaacagtgactttgagggaaatcccctacacaactgcttggtagcatcagaaaatgggattgcccctgtgccttggaccaagataaccagcccagagtttgtggatgacagaccccaagtagtgaatgccctctgccaagcctgggggccccttccattagaggcactggatttgagcagccctcaagagttgcaccaggccagctccccagacaaccaggtgcttcctgcccagagtttggccaagggtaagggcaggacatatgggagcaagtatccaggactcatcaaggtggagcaagcccggtgtggggaggtggctttcaggatggacgaggtggtcagccaggacttcgagggagactatgtggctctcctaggcttttcccaagagagcagaggagagtctcccagtagggaggcaggcacatccagtgggtgtacttctggggcactagaggagatagctggaactaaggaaactcccttatttcaaaagatactgcctctctcagaggccaatgaaggaccttccttgggaaatcgggcttgcacaaagccagaaagctctgaggagaggccctataatttgggcttcaggagaaaggtcaatcttaaagcacccacccacaactcagaaaggccgccccaaggctcctacatgaatgtccttgaggacgcactggactgtgcctctggtctcagggcaggtgtctcacaagagccagctgcctccaagatgcagggacctctaggaaacccagagaatatggtgcagctcaggcctggaccaagacaagcctcctctccccgcctgtccccagcttctcctgcagctgcagcctctgaaacaaagatagaggtgaagaccaaagagagaaatgggagacttcccaagcccatgccctgccctagcagaaacacctcctcccctgagccccccactcctgggctcaaattctcattcttgagagggcagaggcaaccctctgtgaccccggagaaagcctcactccagcacaatgggccctggaaagtcctgtgttccctctactctcctaaacccaaccgagccaaatctttggggaaagctggaacaactcagaccaaaacatctggcccagccactgcccccagcccactgactgaggaaaaggctgccttgccagaagcttctgcaggctccccagaaagaggccccaccctggaggaggagcccccagggcctgagcccaggattggggctctaggtgtcaaggttttccgctccaggatagcatgcctgccaggtggccgggacagggccgggcggcccctgcttctggtgtcaactacagagggggcctgggaggcaccatggtgcacagtttcagaggtcaccaagctactgtcctacctgtgtaccatccccaggcctgaagataaagccaaggggctggcggtcctgattgacgccaggagacagcccccacagcccggtctggtcagcgccctgcaggccacccaggctcaggtcccagcctctatccgggctattctcttcctgggggagaaggaggcggctctccagctgcagacattacctgacgtccaggtggaggtgctgacctcattgaaggccctcagccaccatgtggaccccagccagctgcccgcagtcctggaaggccccttcccctactgccacaccgagtgggttcatttcttccagaagctggaccctttccttgctgacctccaccaggcctcttccctgctacaagcttccatcgaggaattcgagaaggccgacccccctggggggatgcaggaggctaccaggtgcctgagcaagtccaaggagctgatggaggctgtgctgagggaccccggcctactgggcctccagcgggaaggtggagccaccctggccaggctgcagcatgatgccagcaggctggacttcagccctgatgtcaggagccatctggctgcagccactgccttgtacagccttgtggacgagcagcttcatgttctggtcaccgcttccaacagcctcctggggaagctggagctccgtgtccgcctgggccgcctggaagctgccattcaccaggtcagcgactggatggagcaggaaggaaggcggtgcctgcaatcactgacccccaaggatggaagtttggagacagtggagaaagcccacgcagaatttgagaacttcttcctccaggctgcagcccagtaccgccgaggcctggagctgtccaagcaggccgctcagctgggagctacagccagaggggctggggaggcagaacgtgcagagttcccagagctggcagcctttgcctctacccagcgggccttccaggctgagctgacccacttttacatggcggccgagcggcaacgcacggacctcgagacgctgctccacctgcaccgcttctgcaagaggatgacctggttccacatggactgtcaggacctgatggcccagctcaggctggacaagacctcaagggtcagtcctggggaccagcgccgcctccaccgctacctgcagcgactggcatctgagttccctgctgagaagctcgcagccgtggggctgcaggtggcctccctgagccgggcaggcctgggccaggagctatgggaggaggcccggatcaggcatgaggagatccggatgctcctggagaaggcactgacccacagctcttgcccagaggctccagctgctcactcagcgcgcccagaacgaagaggggtggcagccaagggccagggtgtgagtgtagaggtcacttccaaggggaggtgggatcagcctccactagactcactgggcatggaccatttgccaaagtcctattggcctcctgggccccccagaggggaacagaacagaactttccaggcaggctctccaccccaggaagctggccaggctgcagaggctgaagacggcaaaggctcccacaagctgcctgaccctgcccgcgagcatttgcttgccaccaccttcttccggcagcagccccccaggcagagccaggtccctcgcctcactgggggcagcttctcctcagaggggacagactcacagacatcccttgaggactcaccccagacaagtccccttgcctccctctagctgagaggccccttcagtcgcaccagcctccaggagcactgggccagggcccagctggaggggtagctgggagctctggtcagtcccagtgagacgtcaccatggagcactggttttacattctgcctctgctgggaggatgagaactgtcgacctgcccctggctccagaaaactcctggaagacccgatcttcacccatgcagaatagcaagagtgggcgtcagaaccagggcacaataaatggtgtgattggctccatccctccaggctctcattgtggaaagacctgtcggcacagacccctccagaggtctcgctcgcaggcaggcagacacccacctgcagctcaggaacatacacagctctcccctcgggtacgagggccagtgttgcccttaggcagaatcctcggggagattcgggagtgcttccttgtcttggattccaggaaaatggaccctgagatgaggatttaaggatcagtgtgtttggtgctgatccaggaacctctgctgggggagtaggaggcgaatctgcaaagggaataaagagtatgttgtcaagcaaattttcttttttttaatttttaaaacttcattgtattttatgtttagagatggggcctcactacattgcccaggctggtctcaaactcctgggctcaagtgatcctcttgccttggcctgccaaagtgctgggattgccttttccgcccaccccccccgaccccaccagagacagggtctcactctggtgtccaggctggagtgcagtggtgcaatcatagccttaaattcctgggttcaaccaatcctcccacctcagcctcctaagtagctgggactacagttatgcaccaccatgctcagcttattatttatttattttttgtagacatggggtcttgctatgttgcccaggcaggctgatctcaagctcaagtgatcctctggactcagcctcccaaagtgctgggattatacgtatgagccactgtgccccaccctcatacaaatttccatgttggcaactgtagctggatctttctggagatctctgaaagacagcatggaatccttgaacaccccctgaggcgtgaggcatccagagcatttatctgccaaccctcaggagctggcactcgtagacagcacgcacagccagctccattggtcttggcaaagagaattgcctcctggagccagaggccggttcctgtgcttagaaaggaaggacatgtcttctgtgctccctgtctcacaaggcctcttcagcaggcatgggaccttcattctcaagttcaaggaaccctgtggaaccttgtccttgtcctccagagagaatcctctccgccttagaggtccctcctctctctcacctccccaccaagcctccctgaactcaatgtcttctgtccccttccctgcccaacttccacttctctatgcccagcctctgtggcccagtaccattggggttctgtgggcagctgggtcctggtggttggggaccgtgggaaggggcctatctgtcggatcttagatggagcatccagaagccccacccttcatactggccagagtggcccctgccagcgcctctctggagtgtcattaagctgaaagtgtttgccttacctctgcagtaggatgcattactgaagtggcctcttggtcacctagctctgaattttcctggctccagaaagaggctgtggggcacaggtcccccacaatgaggctgtgaaggggagagaggcaggcctgggccaggcacaggaggacaactagggcttctcaggagctgtctcagccaagagtcacacacttgatacctaaaatggcttcaggaatcttccaagactgaagacttccccaggtgtggtctagggcctgcctgcctcagagccatgagcagagccggtcaaaaggcttcctagggaatcctaccccagacattaaaatagactcttggtgctggcaggtggctggaatctgcgtttgtagccaagtgctcttcctgtgtgactcagcaaagtgggggtgcatttggggaacacccggggctggggcctgagtcctccacccaaagccaggtttgattcttgcattcccctccctgccttccatccagacaggcccaaagatgcaagaggcgttgatcagcccatctccatccatgcctgttgcctcagagagggccgacggcttttaaaatgctgttgccatagcaacagcatccagccagtgggtaccacaggcagggagccacagaaactggggtgctgggatggaaactgacttgtgagagaccacagctactgctagaaggaaggggggcaaagcgggcacaggtaatctaagaatacttgggcgggaggagtccccaaggttaccttgtgcatccctctgtccccagaaagaactgtaccccaacaatctctcccctcactgcatcccctggggaagaagggaatgcagaaatgaaatgtcataatgagtaacaatgtataaaaatatcgaataataacagctaacatttcttttgcatt

SEQ ID NO: 146040 - DNA, 798 bp, Homo sapiens
  Payload ID: 8959
  Gene Symbol: KIAA1755
  Gene Name: KIAA1755
  ENST ID: ENST00000435901
  CDS Start-End: 1-798
cgggctattctcttcctgggggagaaggaggcggctctccagctgcagacattacctgacgtccagaagctggaccctttccttgctgacctccaccaggcctcttccctgctacaagcttccatcgaggaattcgagaaggccgacccccctggggggatgcaggaggctaccaggtgcctgagcaagtccaaggagctgatggaggctgtgctgagggaccccggcctactgggcctccagcgggaaggtggagccaccctggccaggctgcagcatgatgccagcaggctggacttcagccctgatgtcaggagccatctggctgcagccactgccttgtacagccttgtggacgagcagcttcatgttctggtcaccgcttccaacagcctcctggggaagctggagctccgtgtccgcctgggccgcctggaagctgccattcaccaggtcagcgactggatggagcaggaaggaaggcggtgcctgcaatcactgacccccaaggatggaagtttggagacagtggagaaagcccacgcagaatttgagaacttcttcctccaggctgcagcccagtaccgccgaggcctggagctgtccaagcaggccgctcagctgggagctacagccagaggggctggggaggcagaacgtgcagagttcccagagctggcagcctttgcctctacccagcgggccttccaggctgagctgacccacttttacatggcggccgagcggcaacgcacggacctcgagacgctgctccacctgcaccgcttctgcaagagg

SEQ ID NO: 146041 - DNA, 208 bp, Homo sapiens
  Payload ID: 8959
  Gene Symbol: KIAA1755
  Gene Name: KIAA1755
  ENST ID: ENST00000611812
  CDS Start-End: 1-116
ccccagggcctgagcccaggattggggctctaggtgtcaaggttttccgctccaggatagcatgcctgccaggatcatctttcctctttggctctgggccattcccatcaggatgagaacacgctgcaatattgcccagcttgaaatgagctattctaggcccccgtgttcccaccctcacccttttacattaaaactccacaaagca

SEQ ID NO: 146042 - DNA, 2557 bp, Homo sapiens
  Payload ID: 8959
  Gene Symbol: KIAA1755
  Gene Name: KIAA1755
  ENST ID: ENST00000496900
  CDS Start-End: 273-2471
gtctggtggcccgacccgcgccgcccgcggctcccttatgtctctcgccgtctccagcctcagtccctctctgtctctctctcagtctctctccctgtcctccccggccgctcctccgagatgacgccggggtcggtgccccgggcctgccctatcccctggctccagggctaggcgggaccgagggctgccccagacagacggacccgcggacccacagaccccgcgcccaggagaggagccgcgccgcccgccgctggcagcccgtcaccatggaccctccatccctcgacacagccatccagcatgccctggcgggcctctatcctcctttcgaggccacagcacccaccgtcctgggtcaggtgttccgtctcctggactctggcttccagggggatgggctgagcttccttctggatttcctgatccctgccaagcgcctgtgtgagcaagtgcgagaagcagcctgtgctccctactcacactgcctcttcttacacgagggctggccactctgtctgagggatgaagttgtggtccacttggcacccctcaaccctctcttattgcgccagggtgacttctacctccaagtggagccccaggaggagcagtctgtctgcatcatgatcaaatgcctctccctggacctctgcacagtggacaagaagcctgttccagagccagcctaccctatacttttcacccaagaatggctggaggccatcaacagtgactttgagggaaatcccctacacaactgcttggtagcatcagaaaatgggattgcccctgtgccttggaccaagataaccagcccagagtttgtggatgacagaccccaagtagtgaatgccctctgccaagcctgggggccccttccattagaggcactggatttgagcagccctcaagagttgcaccaggccagctccccagacaaccaggtgcttcctgcccagagtttggccaagggtaagggcaggacatatgggagcaagtatccaggactcatcaaggtggagcaagcccggtgtggggaggtggctttcaggatggacgaggtggtcagccaggacttcgagggagactatgtggctctcctaggcttttcccaagagagcagaggagagtctcccagtagggaggcaggcacatccagtgggtgtacttctggggcactagaggagatagctggaactaaggaaactcccttatttcaaaagatactgcctctctcagaggccaatgaaggaccttccttgggaaatcgggcttgcacaaagccagaaagctctgaggagaggccctataatttgggcttcaggagaaaggtcaatcttaaagcacccacccacaactcagaaaggccgccccaaggctcctacatgaatgtccttgaggacgcactggactgtgcctctggtctcagggcaggtgtctcacaagagccagctgcctccaagatgcagggacctctaggaaacccagagaatatggtgcagctcaggcctggaccaagacaagcctcctctccccgcctgtccccagcttctcctgcagctgcagcctctgaaacaaagatagaggtgaagaccaaagagagaaatgggagacttcccaagcccatgccctgccctagcagaaacacctcctcccctgagccccccactcctgggctcaaattctcattcttgagagggcagaggcaaccctctgtgaccccggagaaagcctcactccagcacaatgggccctggaaagtcctgtgttccctctactctcctaaacccaaccgagccaaatctttggggaaagctggaacaactcagaccaaaacatctggcccagccactgcccccagcccactgactgaggaaaaggctgccttgccagaagcttctgcaggctccccagaaagaggccccaccctggaggaggagcccccagggcctgagcccaggattggggctctaggtgtcaaggttttccgctccaggatagcatgcctgccaggtggccgggacagggccgggcggcccctgcttctggtgtcaactacagagggggcctgggaggcaccatggtgcacagtttcagaggtcaccaagctactgtcctacctgtgtaccatccccaggcctgaagataaagccaaggggctggcggtcctgattgacgccaggagacagcccccacagcccggtctggtcagcgccctgcaggccacccaggctcaggtcccagcctctatccgggctattctcttcctgggggagaaggaggcggctctccagctgcagacattacctgacgtccaggtggaggtgctgacctcattgaaggccctcagccaccatgtggaccccagccagctgcccgcagtcctggaaggccccttcccctactgccacaccgagtgggttcatttcttccaggtgtttaccgtcacagcctttagcccctgacccccactccttctcttcttctcttcactcttctgtcccatggatccatcaaccctgctatgctaaaaaataaacggtcactcaac

SEQ ID NO: 146043 - DNA, 3116 bp, Homo sapiens
  Payload ID: 8960
  Gene Symbol: KIAA1841
  Gene Name: KIAA1841
  Uniprot ID: Q6NSI8
  ENST ID: ENST00000295031
  CDS Start-End: 378-2501
acccgcccggtccatgtccctgcagaccgtcccgcccgcgcacagcggcgggaaccccagcttctgcgcgcccggccgcgccccgggcctctgccccgcctcgctcccgctgcccggcgcctttgtccgctctgcgcccctggagtttctgtgcctccacgggcgggagcggggcgcgaaggtctgggggtgccccgaggacgcgccgcgtagtgagcctccgggcccaagatgaggaaattgaggcacagagattaactaatctgaaccagataatgccataagtagtagaactgcgatgcaaacttggacagtctgactccagagtctgcacacttaaccactccactattctggccttctacaagttccaaaagatgagtcgtggatattcagaaaacaacaatttcctgaacaataataaccaaatggtattggacatgatcctttatccattaattggaatccctcagactatcaactgggaaactatagcaaggctcgtgcctggattaacaccaaaagagtgtgcaaaaaggtttgatgaattaaagagcagtggaagctcgcctgttgacaaccagtataattccctaatggctgctggagagagtcctgttgaaactttagccacatatatcaaatcctcacttcttgacatacatggagaatttcaggagactccagttggacatgatgcagtttccaaaactggaagacatagtatagcttccacaaggaattgttcttcagaaagtgaaaattgtactactcataatggtggagaaatgactgaagaatctgaagggccaaacatggtgatccatgtgtgtgatgaagcaaaaaacttgaaagaagattttacttgcccgcgagatcttttgatatcagaaatgaagtactttgctgaatatttatctatggatgcccagcgctgggaagaggtggacatttcagttcattgcgacgttcacattttcaactggttgataaaatacattaaaaggaacactaaggagaataaagattgtgagatgcccactttagagccaggaaatgtcatttcaattcttatttcttcggagtttttaaaaatggattcactagttgaacagtgtattcagtattgccacaaaaatatgaatgccatagtagctaccccatgcaacatgaactgtattaatgcaaatcttctcacacgtatagctgatctgttctcacacaatgaagttgatgatttaaaggacaaaaaagataaatttaaaagcaaacttttttgtaagaagattgaaagactgtttgatcctgagtacttgaatccagattctcggagtaatgcagcaacattgtatagatgctgtttgtgtaagaaacttttaacaaaagaaacagaaagaagaattccttgcattcctggaaaaatcaatgtggatcgacgtggaaatattgtctatattcacataagagataagacatgggatgttcatgagtatttgaatagtcttttcgaagaattaaaatcttggagagatgtatactggcgattgtggggaacaatcaattggctgacttgttcaagatgttatcaggcctttctctgtattgaattttcacattgtcaataccactcagaaacagtggtttatcctactgcagcaagttcattgaatactgttggcactggaatttatccctgctgtaaccaaaaggttcttcggtttgatcctactcagcttacaaagggctgtaaagtgagggaccacatggttacacttcgtgatcaaggtgaaggcggagatttgccgtcctgtcccactgctagaatgttggacgatttgcacaagtacagagatgtcattgttgtgcctttttcaaaagatacagttagtgatgttggggttggcctctgtgatgaaaagggtatagaatgtgatgttttactggagccaaatacaccatggggtcccaaaactggggagctcaatgctttcttgtcattgaaaaactggactctacaactgaaacaacagtcactgttttcagaagaagaagaatataccactggatctgaggtcactgaagatgaagttggagatgaagaagaagtatccaagaaacaaaggaaaaaggagaagccaaagaagttcactagacaaccaaaaaagcaggtatcttcaccctgtgcccagaggaaagaaaaggcattggagaagtcagcttctagagatgtgtctcctttcgttatgagtatgcagaagaataagtgggatgccacaagatccttgagattcaaccaggatgcacaaagagaagacgatcaacggcgaatgactgaaattacagggcacctaataaaaatgagattgggggatctggaccgagtcaagtcaaaggaagcaaaagaaacagacaaactgagacccagagacggcactgtgtctaagagcaacagaaaaagtggtttgagcagtgtgctcttgatgacagtgttgctgtgttaaacgaattaatacatgaaaggacttggaatactgcttgacatatcgtgaggcagagacacaaagatatggaagaacattggacagatttacatcgatatattaattaaggtgatttcagagttggagcaggagaggaagccttatagatatttttttttctttttgcttgcttgtattttctttttaattattattcagtatttcaagtagacagaaaagtacagaggataatacaacaaatatccaggtacccaccacccagcatttttacatagtagcatttgatgttttgaaataagacataaaacattccaaataccctatcaccgaggatcctgcatcctcttcttttcccagaagtgaacatttctctgaatttgatgcttattatgcccatgcatgttgttatacttttactacatattttatgtagctacagcataatatgctatgtttactttatatagtgacctcatactatacatatcctcatgcaattttttagactctgtttgagaattatatattttgattcaggtagcttaagtttattttagctactcagtagtaatgtattctattaatctactaatatatatttcttgtctatggaca

SEQ ID NO: 146044 - DNA, 2149 bp, Homo sapiens
  Payload ID: 8960
  Gene Symbol: KIAA1841
  Gene Name: KIAA1841
  Uniprot ID: Q6NSI8
  ENST ID: ENST00000356719
  CDS Start-End: 26-2149
tcttccctatccctagttccaaaagatgagtcgtggatattcagaaaacaacaatttcctgaacaataataaccaaatggtattggacatgatcctttatccattaattggaatccctcagactatcaactgggaaactatagcaaggctcgtgcctggattaacaccaaaagagtgtgcaaaaaggtttgatgaattaaagagcagtggaagctcgcctgttgacaaccagtataattccctaatggctgctggagagagtcctgttgaaactttagccacatatatcaaatcctcacttcttgacatacatggagaatttcaggagactccagttggacatgatgcagtttccaaaactggaagacatagtatagcttccacaaggaattgttcttcagaaagtgaaaattgtactactcataatggtggagaaatgactgaagaatctgaagggccaaacatggtgatccatgtgtgtgatgaagcaaaaaacttgaaagaagattttacttgcccgcgagatcttttgatatcagaaatgaagtactttgctgaatatttatctatggatgcccagcgctgggaagaggtggacatttcagttcattgcgacgttcacattttcaactggttgataaaatacattaaaaggaacactaaggagaataaagattgtgagatgcccactttagagccaggaaatgtcatttcaattcttatttcttcggagtttttaaaaatggattcactagttgaacagtgtattcagtattgccacaaaaatatgaatgccatagtagctaccccatgcaacatgaactgtattaatgcaaatcttctcacacgtatagctgatctgttctcacacaatgaagttgatgatttaaaggacaaaaaagataaatttaaaagcaaacttttttgtaagaagattgaaagactgtttgatcctgagtacttgaatccagattctcggagtaatgcagcaacattgtatagatgctgtttgtgtaagaaacttttaacaaaagaaacagaaagaagaattccttgcattcctggaaaaatcaatgtggatcgacgtggaaatattgtctatattcacataagagataagacatgggatgttcatgagtatttgaatagtcttttcgaagaattaaaatcttggagagatgtatactggcgattgtggggaacaatcaattggctgacttgttcaagatgttatcaggcctttctctgtattgaattttcacattgtcaataccactcagaaacagtggtttatcctactgcagcaagttcattgaatactgttggcactggaatttatccctgctgtaaccaaaaggttcttcggtttgatcctactcagcttacaaagggctgtaaagtgagggaccacatggttacacttcgtgatcaaggtgaaggcggagatttgccgtcctgtcccactgctagaatgttggacgatttgcacaagtacagagatgtcattgttgtgcctttttcaaaagatacagttagtgatgttggggttggcctctgtgatgaaaagggtatagaatgtgatgttttactggagccaaatacaccatggggtcccaaaactggggagctcaatgctttcttgtcattgaaaaactggactctacaactgaaacaacagtcactgttttcagaagaagaagaatataccactggatctgaggtcactgaagatgaagttggagatgaagaagaagtatccaagaaacaaaggaaaaaggagaagccaaagaagttcactagacaaccaaaaaagcaggtatcttcaccctgtgcccagaggaaagaaaaggcattggagaagtcagcttctagagatgtgtctcctttcgttatgagtatgcagaagaataagtgggatgccacaagatccttgagattcaaccaggatgcacaaagagaagacgatcaacggcgaatgactgaaattacagggcacctaataaaaatgagattgggggatctggaccgagtcaagtcaaaggaagcaaaagaaacagacaaactgagacccagagacggcactgtgtctaagagcaacagaaaaagtggtttgagcagtgtgctcttgatgacagtgttgctgtgttaa

SEQ ID NO: 146045 - DNA, 4516 bp, Homo sapiens
  Payload ID: 8960
  Gene Symbol: KIAA1841
  Gene Name: KIAA1841
  Uniprot ID: Q6NSI8
  ENST ID: ENST00000402291
  CDS Start-End: 242-2398
gggctcggtagcggcagcttcagggcgcgagcgcgggcggtgccgaccactgcaggtaacagaggcgctgcgagggcagccgcggccctgtggagatgaggaaattgaggcacagagattaactaatctgaaccagataatgccataagtagtagaactgcgatgcaaacttggacagtctgactccagagtctgcacacttaaccactccactattctggccttctacaagttccaaaagatgagtcgtggatattcagaaaacaacaatttcctgaacaataataaccaaatggtattggacatgatcctttatccattaattggaatccctcagactatcaactgggaaactatagcaaggctcgtgcctggattaacaccaaaagagtgtgcaaaaaggtttgatgaattaaagagcagtggaagctcgcctgttgacaaccagtataattccctaatggctgctggagagagtcctgttgaaactttagccacatatatcaaatcctcacttcttgacatacatggagaatttcaggagactccagttggacatgatgcagtttccaaaactggaagacatagtatagcttccacaaggaattgttcttcagaaagtgaaaattgtactactcataatggtggagaaatgactgaagaatctgaagggccaaacatggtgatccatgtgtgtgatgaagcaaaaaacttgaaagaagattttacttgcccgcgagatcttttgatatcagaaatgaagtactttgctgaatatttatctatggatgcccagcgctgggaagaggtggacatttcagttcattgcgacgttcacattttcaactggttgataaaatacattaaaaggaacactaaggagaataaagattgtgagatgcccactttagagccaggaaatgtcatttcaattcttatttcttcggagtttttaaaaatggattcactagttgaacagtgtattcagtattgccacaaaaatatgaatgccatagtagctaccccatgcaacatgaactgtattaatgcaaatcttctcacacgtatagctgatctgttctcacacaatgaagttgatgatttaaaggacaaaaaagataaatttaaaagcaaacttttttgtaagaagattgaaagactgtttgatcctgagtacttgaatccagattctcggagtaatgcagcaacattgtatagatgctgtttgtgtaagaaacttttaacaaaagaaacagaaagaagaattccttgcattcctggaaaaatcaatgtggatcgacgtggaaatattgtctatattcacataagagataagacatgggatgttcatgagtatttgaatagtcttttcgaagaattaaaatcttggagagatgtatactggcgattgtggggaacaatcaattggctgacttgttcaagatgttatcaggcctttctctgtattgaattttcacattgtcaataccactcagaaacagtggtttatcctactgcagcaagttcattgaatactgttggcactggaatttatccctgctgtaaccaaaaggttcttcggtttgatcctactcagcttacaaagggctgtaaagtgagggaccacatggttacacttcgtgatcaaggtgaaggcggagatttgccgtcctgtcccactgctagaatgttggacgatttgcacaagtacagagatgtcattgttgtgcctttttcaaaagatacagttagtgatgttggggttggcctctgtgatgaaaagggtatagaatgtgatgttttactggagccaaatacaccatggggtcccaaaactggggagctcaatgctttcttgtcattgaaaaactggactctacaactgaaacaacagtcactgttttcagaagaagaagaatataccactggatctgaggtcactgaagatgaagttggagatgaagaagaagtatccaagaaacaaaggaaaaaggagaagccaaagaagttcactagacaaccaaaaaagcaggtatcttcaccctgtgcccagaggaaagaaaaggcattggagaagtcagcttctagagatgtgtctcctttcgttatgagtatgcagaagaataagtgggatgccacaagatccttgagattcaaccaggatgcacaaagagaagacgatcaacggcgaatgactgaaattacagggcacctaataaaaatgagattgggggatctggaccgagtcaagtcaaaggaagcaaaagaatttgcaggaggtatttattccaggctggaagcacaaatcaaggcctcagtgccagttagtgcacgccaaagcagctcagagaaaaacacaaggtctaaaagtcgttttggtcaagggcgtcctgcataaagtaccttaaaatataagtaaaaagagagaaggcactcttctggacatctgaaattgctcacttcttgaagatcttcagaacaatgacttccaactgttttatgttattattattttaatccacataaatcataattctaaaagaaatgcatagttaggttttatgaaaatctaattgtaaatatgaaactttttaaatctgattttcttctaatatcattctaggctatgtagaaagcaattatttacaaatttgcatagttgagactcccagtgttttcctttatttatttgaaaaagaaaggcctaaactgtcaggtagccaagtttttttaagaccttaaaagttaggggaacacaactggtagtgttaccatgcatggcactgattgtagtatgtctttggagctgtaaatcttgagatagcattgagaactgcaggttgtgtgacgaaattcccaatgatgctaattttaagtctgcatgaatattaaggagtgacaggtctcaagactgcattaaatgaagtttcagggtaaggtatttcagtactgtgttgggcagaagggttaatttttttcagcattatatcgtggaaagtacaatgttaatccaacttttttttctttcagtttttaatgcttatctattgatcatctgagctggaattactgattattactctgtcctctgtgaaactagtggcattctgaatttggtaaaataaccattgatagttttaggatagtaaatcatttctgttatatgagacacccactgtacagttctcagggctctaaaacccaaccatatttctgtaaccattcaaataactccttaaaacagttatacttgctagttcggtctaaaattttccaaatacattagataggtgaaaatttgcatatattcaagaaaaatcaaaataaaattctattttataaatcatgtttaaatttttctagccaggcagaaagagtgctcagggaaaatttgttccaaactataaccatataataaattatgtgtttgtaaattatatgtaggtctctgaaaaactttaagatgcactgtttctatttttttaagtcttaatttgccttataactgacatttcttcaaattattcagagaacagactttaataatgtgtgacaaaagagcaatttccattgaaatattgaagtgttacactcagtttacacgtacagaaatcattctttttagtgagtcttttagttgataaatgaagctagatgttatttgataactggctttgccaaggtttttgaactgctgtttagaaattttgttcccatttatatttgtttcaattgtttgatactgtggaaatagacttttattttcgaaagaaaatgtcttgtagtacatattatatgtaagtactctgttaaataccagagttttttttgtagtttactgtgttttctgattaaaggatttggatttgtacatgtaaacagtgctgtaatggtcacgactagataaggaaaaaatatatatgctcttttgatttttaactgatggtaaaaaggcaaactgcttctcccctgggaggcctataccactgaattaatttttacaaaccagagtttatcagaatttgattctcttcagaatgcttttggccaggtgtagtggctcacgccagtaatcccagcactttgggaggccgaggcgggcagatcacctgaggtcaggagtttgagaccagcctggccaacgtggtgaaaccctatctctactaaaaatacaaaaagattagccaggcatggtggcatacacctgtagtcccagctactcgggaggctgaggcacaagaattgtttgaacccgggtggcagaggttgcagtgagctgagatcatgtttctgcgctcctagcctgggtgacagagcaagactccatctcaatttaaaacaaaaaaagaatgtgtttttaattttgttaatgtttgtctgttatacatagcactggtaccgcaaacattttacttaaactcttaatagcatttctttcgccagatactttaatatttcaccttacattaatcctggattcacatttctttaattgaaataaatgttaatgacaaaa

SEQ ID NO: 146046 - DNA, 4472 bp, Homo sapiens
  Payload ID: 8960
  Gene Symbol: KIAA1841
  Gene Name: KIAA1841
  ENST ID: ENST00000453186
  CDS Start-End: 295-645
agccgcctgcaagcgggcgggggcggggtgtgaggcgctgcggacggggttgcgggctcggtagcggcagcttcagggcgcgagcgcgggcggtgccgaccactgcaggtaacagaggcgctgcgagggcagccgcggccctgtggagatgaggaaattgaggcacagagattaactaatctgaaccagataatgccataagtagtagaactgcgatgcaaacttggacagtctgactccagagtctgcacacttaaccactccactattctggccttctacaagttccaaaagatgagtcgtggatattcagaaaacaacaatttcctgaacaataataaccaaatggtattggacatgatcctttatccattaattggaatccctcagactatcaactgggaaactatagcaaggctcgtgcctggattaacaccaaaagagtgtgcaaaaaggtttgatgaattaaagagcagtggaagctcgcctgttgacaaccagtataattccctaatggctgctggagagagtcctgttgaaactttagccacatatatcaaatcctcacttcttgacatacatggagaatttcaggagactccagttggacatgatgcagtttccaaaactggccaaacatggtgatccatgtgtgtgatgaagcaaaaaacttgaaagaagattttacttgcccgcgagatcttttgatatcagaaatgaagtactttgctgaatatttatctatggatgcccagcgctgggaagaggtggacatttcagttcattgcgacgttcacattttcaactggttgataaaatacattaaaaggaacactaaggagaataaagattgtgagatgcccactttagagccaggaaatgtcatttcaattcttatttcttcggagtttttaaaaatggattcactagttgaacagtgtattcagtattgccacaaaaatatgaatgccatagtagctaccccatgcaacatgaactgtattaatgcaaatcttctcacacgtatagctgatctgttctcacacaatgaagttgatgatttaaaggacaaaaaagataaatttaaaagcaaacttttttgtaagaagattgaaagactgtttgatcctgagtacttgaatccagattctcggagtaatgcagcaacattgtatagatgctgtttgtgtaagaaacttttaacaaaagaaacagaaagaagaattccttgcattcctggaaaaatcaatgtggatcgacgtggaaatattgtctatattcacataagagataagacatgggatgttcatgagtatttgaatagtcttttcgaagaattaaaatcttggagagatgtatactggcgattgtggggaacaatcaattggctgacttgttcaagatgttatcaggcctttctctgtattgaattttcacattgtcaataccactcagaaacagtggtttatcctactgcagcaagttcattgaatactgttggcactggaatttatccctgctgtaaccaaaaggttcttcggtttgatcctactcagcttacaaagggctgtaaagtgagggaccacatggttacacttcgtgatcaaggtgaaggcggagatttgccgtcctgtcccactgctagaatgttggacgatttgcacaagtacagagatgtcattgttgtgcctttttcaaaagatacagttagtgatgttggggttggcctctgtgatgaaaagggtatagaatgtgatgttttactggagccaaatacaccatggggtcccaaaactggggagctcaatgctttcttgtcattgaaaaactggactctacaactgaaacaacagtcactgttttcagaagaagaagaatataccactggatctgaggtcactgaagatgaagttggagatgaagaagaagtatccaagaaacaaaggaaaaaggagaagccaaagaagttcactagacaaccaaaaaagcaggtatcttcaccctgtgcccagaggaaagaaaaggcattggagaagtcagcttctagagatgtgtctcctttcgttatgagtatgcagaagaataagtgggatgccacaagatccttgagattcaaccaggatgcacaaagagaagacgatcaacggcgaatgactgaaattacagggcacctaataaaaatgagattgggggatctggaccgagtcaagtcaaaggaagcaaaagaatttgcaggaggtatttattccaggctggaagcacaaatcaaggcctcagtgccagttagtgcacgccaaagcagctcagagaaaaacacaaggtctaaaagtcgttttggtcaagggcgtcctgcataaagtaccttaaaatataagtaaaaagagagaaggcactcttctggacatctgaaattgctcacttcttgaagatcttcagaacaatgacttccaactgttttatgttattattattttaatccacataaatcataattctaaaagaaatgcatagttaggttttatgaaaatctaattgtaaatatgaaactttttaaatctgattttcttctaatatcattctaggctatgtagaaagcaattatttacaaatttgcatagttgagactcccagtgttttcctttatttatttgaaaaagaaaggcctaaactgtcaggtagccaagtttttttaagaccttaaaagttaggggaacacaactggtagtgttaccatgcatggcactgattgtagtatgtctttggagctgtaaatcttgagatagcattgagaactgcaggttgtgtgacgaaattcccaatgatgctaattttaagtctgcatgaatattaaggagtgacaggtctcaagactgcattaaatgaagtttcagggtaaggtatttcagtactgtgttgggcagaagggttaatttttttcagcattatatcgtggaaagtacaatgttaatccaacttttttttctttcagtttttaatgcttatctattgatcatctgagctggaattactgattattactctgtcctctgtgaaactagtggcattctgaatttggtaaaataaccattgatagttttaggatagtaaatcatttctgttatatgagacacccactgtacagttctcagggctctaaaacccaaccatatttctgtaaccattcaaataactccttaaaacagttatacttgctagttcggtctaaaattttccaaatacattagataggtgaaaatttgcatatattcaagaaaaatcaaaataaaattctattttataaatcatgtttaaatttttctagccaggcagaaagagtgctcagggaaaatttgttccaaactataaccatataataaattatgtgtttgtaaattatatgtaggtctctgaaaaactttaagatgcactgtttctatttttttaagtcttaatttgccttataactgacatttcttcaaattattcagagaacagactttaataatgtgtgacaaaagagcaatttccattgaaatattgaagtgttacactcagtttacacgtacagaaatcattctttttagtgagtcttttagttgataaatgaagctagatgttatttgataactggctttgccaaggtttttgaactgctgtttagaaattttgttcccatttatatttgtttcaattgtttgatactgtggaaatagacttttattttcgaaagaaaatgtcttgtagtacatattatatgtaagtactctgttaaataccagagttttttttgtagtttactgtgttttctgattaaaggatttggatttgtacatgtaaacagtgctgtaatggtcacgactagataaggaaaaaatatatatgctcttttgatttttaactgatggtaaaaaggcaaactgcttctcccctgggaggcctataccactgaattaatttttacaaaccagagtttatcagaatttgattctcttcagaatgcttttggccaggtgtagtggctcacgccagtaatcccagcactttgggaggccgaggcgggcagatcacctgaggtcaggagtttgagaccagcctggccaacgtggtgaaaccctatctctactaaaaatacaaaaagattagccaggcatggtggcatacacctgtagtcccagctactcgggaggctgaggcacaagaattgtttgaacccgggtggcagaggttgcagtgagctgagatcatgtttctgcgctcctagcctgggtgacagagcaagactccatctcaatttaaaacaaaaaaagaatgtgtttttaattttgttaatgtttgtctgttatacatagcactggtaccgcaaacattttacttaaactcttaatagcatttctttcgccagatactttaatatttcaccttacattaatcctggattcacatttctttaattgaaataaatgttaatgaca

SEQ ID NO: 146047 - DNA, 4294 bp, Homo sapiens
  Payload ID: 8960
  Gene Symbol: KIAA1841
  Gene Name: KIAA1841
  Uniprot ID: Q6NSI8
  ENST ID: ENST00000453873
  CDS Start-End: 26-2182
tcttccctatccctagttccaaaagatgagtcgtggatattcagaaaacaacaatttcctgaacaataataaccaaatggtattggacatgatcctttatccattaattggaatccctcagactatcaactgggaaactatagcaaggctcgtgcctggattaacaccaaaagagtgtgcaaaaaggtttgatgaattaaagagcagtggaagctcgcctgttgacaaccagtataattccctaatggctgctggagagagtcctgttgaaactttagccacatatatcaaatcctcacttcttgacatacatggagaatttcaggagactccagttggacatgatgcagtttccaaaactggaagacatagtatagcttccacaaggaattgttcttcagaaagtgaaaattgtactactcataatggtggagaaatgactgaagaatctgaagggccaaacatggtgatccatgtgtgtgatgaagcaaaaaacttgaaagaagattttacttgcccgcgagatcttttgatatcagaaatgaagtactttgctgaatatttatctatggatgcccagcgctgggaagaggtggacatttcagttcattgcgacgttcacattttcaactggttgataaaatacattaaaaggaacactaaggagaataaagattgtgagatgcccactttagagccaggaaatgtcatttcaattcttatttcttcggagtttttaaaaatggattcactagttgaacagtgtattcagtattgccacaaaaatatgaatgccatagtagctaccccatgcaacatgaactgtattaatgcaaatcttctcacacgtatagctgatctgttctcacacaatgaagttgatgatttaaaggacaaaaaagataaatttaaaagcaaacttttttgtaagaagattgaaagactgtttgatcctgagtacttgaatccagattctcggagtaatgcagcaacattgtatagatgctgtttgtgtaagaaacttttaacaaaagaaacagaaagaagaattccttgcattcctggaaaaatcaatgtggatcgacgtggaaatattgtctatattcacataagagataagacatgggatgttcatgagtatttgaatagtcttttcgaagaattaaaatcttggagagatgtatactggcgattgtggggaacaatcaattggctgacttgttcaagatgttatcaggcctttctctgtattgaattttcacattgtcaataccactcagaaacagtggtttatcctactgcagcaagttcattgaatactgttggcactggaatttatccctgctgtaaccaaaaggttcttcggtttgatcctactcagcttacaaagggctgtaaagtgagggaccacatggttacacttcgtgatcaaggtgaaggcggagatttgccgtcctgtcccactgctagaatgttggacgatttgcacaagtacagagatgtcattgttgtgcctttttcaaaagatacagttagtgatgttggggttggcctctgtgatgaaaagggtatagaatgtgatgttttactggagccaaatacaccatggggtcccaaaactggggagctcaatgctttcttgtcattgaaaaactggactctacaactgaaacaacagtcactgttttcagaagaagaagaatataccactggatctgaggtcactgaagatgaagttggagatgaagaagaagtatccaagaaacaaaggaaaaaggagaagccaaagaagttcactagacaaccaaaaaagcaggtatcttcaccctgtgcccagaggaaagaaaaggcattggagaagtcagcttctagagatgtgtctcctttcgttatgagtatgcagaagaataagtgggatgccacaagatccttgagattcaaccaggatgcacaaagagaagacgatcaacggcgaatgactgaaattacagggcacctaataaaaatgagattgggggatctggaccgagtcaagtcaaaggaagcaaaagaatttgcaggaggtatttattccaggctggaagcacaaatcaaggcctcagtgccagttagtgcacgccaaagcagctcagagaaaaacacaaggtctaaaagtcgttttggtcaagggcgtcctgcataaagtaccttaaaatataagtaaaaagagagaaggcactcttctggacatctgaaattgctcacttcttgaagatcttcagaacaatgacttccaactgttttatgttattattattttaatccacataaatcataattctaaaagaaatgcatagttaggttttatgaaaatctaattgtaaatatgaaactttttaaatctgattttcttctaatatcattctaggctatgtagaaagcaattatttacaaatttgcatagttgagactcccagtgttttcctttatttatttgaaaaagaaaggcctaaactgtcaggtagccaagtttttttaagaccttaaaagttaggggaacacaactggtagtgttaccatgcatggcactgattgtagtatgtctttggagctgtaaatcttgagatagcattgagaactgcaggttgtgtgacgaaattcccaatgatgctaattttaagtctgcatgaatattaaggagtgacaggtctcaagactgcattaaatgaagtttcagggtaaggtatttcagtactgtgttgggcagaagggttaatttttttcagcattatatcgtggaaagtacaatgttaatccaacttttttttctttcagtttttaatgcttatctattgatcatctgagctggaattactgattattactctgtcctctgtgaaactagtggcattctgaatttggtaaaataaccattgatagttttaggatagtaaatcatttctgttatatgagacacccactgtacagttctcagggctctaaaacccaaccatatttctgtaaccattcaaataactccttaaaacagttatacttgctagttcggtctaaaattttccaaatacattagataggtgaaaatttgcatatattcaagaaaaatcaaaataaaattctattttataaatcatgtttaaatttttctagccaggcagaaagagtgctcagggaaaatttgttccaaactataaccatataataaattatgtgtttgtaaattatatgtaggtctctgaaaaactttaagatgcactgtttctatttttttaagtcttaatttgccttataactgacatttcttcaaattattcagagaacagactttaataatgtgtgacaaaagagcaatttccattgaaatattgaagtgttacactcagtttacacgtacagaaatcattctttttagtgagtcttttagttgataaatgaagctagatgttatttgataactggctttgccaaggtttttgaactgctgtttagaaattttgttcccatttatatttgtttcaattgtttgatactgtggaaatagacttttattttcgaaagaaaatgtcttgtagtacatattatatgtaagtactctgttaaataccagagttttttttgtagtttactgtgttttctgattaaaggatttggatttgtacatgtaaacagtgctgtaatggtcacgactagataaggaaaaaatatatatgctcttttgatttttaactgatggtaaaaaggcaaactgcttctcccctgggaggcctataccactgaattaatttttacaaaccagagtttatcagaatttgattctcttcagaatgcttttggccaggtgtagtggctcacgccagtaatcccagcactttgggaggccgaggcgggcagatcacctgaggtcaggagtttgagaccagcctggccaacgtggtgaaaccctatctctactaaaaatacaaaaagattagccaggcatggtggcatacacctgtagtcccagctactcgggaggctgaggcacaagaattgtttgaacccgggtggcagaggttgcagtgagctgagatcatgtttctgcgctcctagcctgggtgacagagcaagactccatctcaatttaaaacaaaaaaagaatgtgtttttaattttgttaatgtttgtctgttatacatagcactggtaccgcaaacattttacttaaactcttaatagcatttctttcgccagatactttaatatttcaccttacattaatcctggattcacatttctttaattgaaataaatgttaatg

SEQ ID NO: 146048 - DNA, 4202 bp, Homo sapiens
  Payload ID: 8960
  Gene Symbol: KIAA1841
  Gene Name: KIAA1841
  Uniprot ID: Q6NSI8
  ENST ID: ENST00000612149
  CDS Start-End: 370-2088
tcttccctatccctagttccaaaagatgagtcgtggatattcagaaaacaacaatttcctgaacaataataaccaaatggtattggacatgatcctttatccattaattggaatccctcagactatcaactgggaaactatagcaaggctcgtgcctggattaacaccaaaagagtgtgcaaaaaggtttgatgaattaaagagcagtggaagctcgcctgttgacaaccagtataattccctaatggctgctggagagagtcctgttgaaactttagccacatatatcaaatcctcacttcttgacatacatggagaatttcaggagactccagttggacatgatgcagtttccaaaactggccaaacatggtgatccatgtgtgtgatgaagcaaaaaacttgaaagaagattttacttgcccgcgagatcttttgatatcagaaatgaagtactttgctgaatatttatctatggatgcccagcgctgggaagaggtggacatttcagttcattgcgacgttcacattttcaactggttgataaaatacattaaaaggaacactaaggagaataaagattgtgagatgcccactttagagccaggaaatgtcatttcaattcttatttcttcggagtttttaaaaatggattcactagttgaacagtgtattcagtattgccacaaaaatatgaatgccatagtagctaccccatgcaacatgaactgtattaatgcaaatcttctcacacgtatagctgatctgttctcacacaatgaagttgatgatttaaaggacaaaaaagataaatttaaaagcaaacttttttgtaagaagattgaaagactgtttgatcctgagtacttgaatccagattctcggagtaatgcagcaacattgtatagatgctgtttgtgtaagaaacttttaacaaaagaaacagaaagaagaattccttgcattcctggaaaaatcaatgtggatcgacgtggaaatattgtctatattcacataagagataagacatgggatgttcatgagtatttgaatagtcttttcgaagaattaaaatcttggagagatgtatactggcgattgtggggaacaatcaattggctgacttgttcaagatgttatcaggcctttctctgtattgaattttcacattgtcaataccactcagaaacagtggtttatcctactgcagcaagttcattgaatactgttggcactggaatttatccctgctgtaaccaaaaggttcttcggtttgatcctactcagcttacaaagggctgtaaagtgagggaccacatggttacacttcgtgatcaaggtgaaggcggagatttgccgtcctgtcccactgctagaatgttggacgatttgcacaagtacagagatgtcattgttgtgcctttttcaaaagatacagttagtgatgttggggttggcctctgtgatgaaaagggtatagaatgtgatgttttactggagccaaatacaccatggggtcccaaaactggggagctcaatgctttcttgtcattgaaaaactggactctacaactgaaacaacagtcactgttttcagaagaagaagaatataccactggatctgaggtcactgaagatgaagttggagatgaagaagaagtatccaagaaacaaaggaaaaaggagaagccaaagaagttcactagacaaccaaaaaagcaggtatcttcaccctgtgcccagaggaaagaaaaggcattggagaagtcagcttctagagatgtgtctcctttcgttatgagtatgcagaagaataagtgggatgccacaagatccttgagattcaaccaggatgcacaaagagaagacgatcaacggcgaatgactgaaattacagggcacctaataaaaatgagattgggggatctggaccgagtcaagtcaaaggaagcaaaagaatttgcaggaggtatttattccaggctggaagcacaaatcaaggcctcagtgccagttagtgcacgccaaagcagctcagagaaaaacacaaggtctaaaagtcgttttggtcaagggcgtcctgcataaagtaccttaaaatataagtaaaaagagagaaggcactcttctggacatctgaaattgctcacttcttgaagatcttcagaacaatgacttccaactgttttatgttattattattttaatccacataaatcataattctaaaagaaatgcatagttaggttttatgaaaatctaattgtaaatatgaaactttttaaatctgattttcttctaatatcattctaggctatgtagaaagcaattatttacaaatttgcatagttgagactcccagtgttttcctttatttatttgaaaaagaaaggcctaaactgtcaggtagccaagtttttttaagaccttaaaagttaggggaacacaactggtagtgttaccatgcatggcactgattgtagtatgtctttggagctgtaaatcttgagatagcattgagaactgcaggttgtgtgacgaaattcccaatgatgctaattttaagtctgcatgaatattaaggagtgacaggtctcaagactgcattaaatgaagtttcagggtaaggtatttcagtactgtgttgggcagaagggttaatttttttcagcattatatcgtggaaagtacaatgttaatccaacttttttttctttcagtttttaatgcttatctattgatcatctgagctggaattactgattattactctgtcctctgtgaaactagtggcattctgaatttggtaaaataaccattgatagttttaggatagtaaatcatttctgttatatgagacacccactgtacagttctcagggctctaaaacccaaccatatttctgtaaccattcaaataactccttaaaacagttatacttgctagttcggtctaaaattttccaaatacattagataggtgaaaatttgcatatattcaagaaaaatcaaaataaaattctattttataaatcatgtttaaatttttctagccaggcagaaagagtgctcagggaaaatttgttccaaactataaccatataataaattatgtgtttgtaaattatatgtaggtctctgaaaaactttaagatgcactgtttctatttttttaagtcttaatttgccttataactgacatttcttcaaattattcagagaacagactttaataatgtgtgacaaaagagcaatttccattgaaatattgaagtgttacactcagtttacacgtacagaaatcattctttttagtgagtcttttagttgataaatgaagctagatgttatttgataactggctttgccaaggtttttgaactgctgtttagaaattttgttcccatttatatttgtttcaattgtttgatactgtggaaatagacttttattttcgaaagaaaatgtcttgtagtacatattatatgtaagtactctgttaaataccagagttttttttgtagtttactgtgttttctgattaaaggatttggatttgtacatgtaaacagtgctgtaatggtcacgactagataaggaaaaaatatatatgctcttttgatttttaactgatggtaaaaaggcaaactgcttctcccctgggaggcctataccactgaattaatttttacaaaccagagtttatcagaatttgattctcttcagaatgcttttggccaggtgtagtggctcacgccagtaatcccagcactttgggaggccgaggcgggcagatcacctgaggtcaggagtttgagaccagcctggccaacgtggtgaaaccctatctctactaaaaatacaaaaagattagccaggcatggtggcatacacctgtagtcccagctactcgggaggctgaggcacaagaattgtttgaacccgggtggcagaggttgcagtgagctgagatcatgtttctgcgctcctagcctgggtgacagagcaagactccatctcaatttaaaacaaaaaaagaatgtgtttttaattttgttaatgtttgtctgttatacatagcactggtaccgcaaacattttacttaaactcttaatagcatttctttcgccagatactttaatatttcaccttacattaatcctggattcacatttctttaattgaaataaatgttaatgac

SEQ ID NO: 146049 - DNA, 5958 bp, Homo sapiens
  Payload ID: 8961
  Gene Symbol: KIAA1919
  Gene Name: KIAA1919
  Uniprot ID: Q5TF39
  ENST ID: ENST00000368847
  CDS Start-End: 354-1910
gcgtcttttgccacgaacacctgcggcgtgccgaagttcctcttctctgccccggttccgggcggtccgctgggaggtggcgcccggagggacacccgtgcctggggtcggggccagtgctcttctcggagctccagaagttctgctgagaagcgcggcggcagcaagacgacttctccggagccgccgagctggagttagaggtggagctccgtggggccgggcccccggctgcggggcagcggctcctgcaggcggaggccccggcggagaatgagccggagccggaggtggtggtggtctcctggcagagcggtgggaccgggagcaagctgcggtggttcaccaccttgatgctgtgtgcctccttcctggggctgggattgagtgttgctatagtgggacccacgtttcaagatttggcaacaaacgtgaaccgaaatatcagtagtctgtctttcatttttgtgggtcgtgccttgggatatttgagtggctctgtgattggtggatttcttgtcgatgtcatgaattattttttacttttgggaatctcaatgtcggctaccaccgttggtctttatcttgttcctttttgcaagacagcaatattactcactgtcatgatgtctatcttcggtgtttcaattggcattctggatacaggtggtaacgtccttatcttggctatttggggggacaaaggagccccacatatgcaggccttacacttctcttttgccttgggtgcctttttggctccactgctagctaaactggctttgggtccgacagcgtctgctgaaaaccacacagagtctgacttccatcctgcactcaaccaatcatctgatgctgactcagaagctctgtttggagtacctaatgataagaatttactgtgggcttatgctgttatcggtacttacatgttcttagtttctgtcatttttttttgtctgtttttaaagaatagctcaaagcaagaaaaagcaagagcatctgctgagacatttcgaagagcaaaatatcacaacgcccttctttgtctcctttttctgttcttctttttttatgttggagctgaggtaacatatggctcttatgttttctcatttgcaaccacccatgctggcatgaaagaaagtgaagctgctgggttgaactccatcttctgggggacatttgcagcctgcaggggcctggcaatcttttttgctacctgtttacagcctggaaccatgattgtgttgagcaacattggcagcctgacttcatctttatttctggtgctttttgacaagaacccaatttgtctctggatagcaacttcagtgtatggggcttcaatggcaaccacatttccgagtggtgtttcttggattgagcagtacacgaccatccatgggaaatctgcagcattttttgtaattggtgcttccctgggagaaatggctattcctgcagtcattggaattcttcaaggaaaataccctgatttgcctgtagttctgtatacctctttgggagcatcaatagctactggtattttatttcctgtgctatataaattagccacttcacctcttgatcgccagcgaaaagaagacagaaagagtgaggaccagaaagctctgctctctagctccgggctaaatgaatatgaggaagagaatgaagaggaggatgcagaaaaatggaatgaaatggattttgaaatgattgaaacgaatgatacaatgaggcattctataatagagacatctagaagtagtctgacggagcccacagctgaagtctataatcaatacccatcaaatgcactggtgtttgagtcttctccttttaatactggcagtgcccatgtgaagcacttgccagaaaccaggacaaaagggactaacgtttagagaagatggattactcactgacatctttgaataactgccacttctaaggacgccattcagagcagagcattagcagaatttcaccatgctttggggattaaaatttttaggtccatattatagcaaatgctaaaaatttttgaaatgttctgtaattcccagagtcttccataaataaccaaatggtctcatacacgtacaataggatcttgttataacgctatcatttgacatgtgactgattaggaaatattttatggtctccacccctcagagcacccaaagaaggcattgtttttgagaaggggggtattctcagaatgagaccatgtaggagttgaattgattggttgaacaaattatcaggtatcaatatttttccaggaaagttgaggagaatagtttcataaaagagaaatgggccgggtgcagtggctaaagcctgtaatcccagcactttgggaggccgagacgggcagatcacgaggtcaggagatcgagaccatcctggctaacacagtgaaaccctgtctctactaaaaatacaaaaaattagccaggcgtggtggcaggcacctgtagtcccagctacttgggaggctgaggcaggagaatggcgtgaacccgggaggtggagcttgcagtgagccgagatcatgccacaccgtactccagcctgggcgacatctagactccgtctcaaaaaagaaatggagaggtatttttattaattgctttaccttatctgtagggttggatcaaagaatgtaatgactcatttgatttctaatttcaatgaagagaacacagaacagggcccaaggggtcgggcttcaagccttgacttcttctagccctgcactctgtcacttaacgtaggccttgtttatctcgcctcctgatctgtgattctagaaatgaaaatgagatgatttccaaattgggaatctgtaagttttaaagtttgtgcaaaatgtctgctagaaattagtacaagtgacagcatgttcttcatttcaaatgagaagtgaaaccaaaatgataaatagctttaagaatgtgctaatgataaatgattacatgtcaatttaatgtacttaatgtttaataccttatttgaataattacctgaagaatatattttttagtactgcatttcattgattctaagttgcactttttacccccatactgttaacatatctgaaatcagaatgtgtcttacaatcagtgatcgtttaacattgtgacaaagtttaatggacagttttttcccatatgtatatataaaataatgtgttttacaatcagtggcttagattcagtgaaatacagtaattcattcaattatgatagtatctttacagacattttaaaaataagttatttttatatgctaatattctatgttcaagtggaatttggagacactatgttctaattttaagaactgtttcagtgttattagattagtagtagggctgtagatggggtctttcgaggtcctttgcctacctcagtaacagaggctgggtctgagccttgctcgagattagctcttcaccaggtctgtgtggtaatcatatcgtagttaccgtaggtcacgctgcaagtgtaatttacagtgaggcatagtcttttccagtgattggaatacttgtgtcaccgatccagggtttctctttcctgagtctgaaatacctgggaaaccagttagaaggtgactgggtagcctaggagtcaaggatcagaaagggtacttcatatatatgtggcagaattggtgcaggtgatcctttgaaaaatgacaagaattgatgaaattttgtttacttcctccaattttttgctgaataacatctcctttctacctgattggagtaggcttgctttctcttacttaatttctataaatttgccattgttttgtctcaagtaaaatacagtgtctttcttgaccactgcccgcccattcaccttatatgcctgccacagtcttggttcatgtaataacctaacagctttggagatggcggtggagaagttaatggtaaaaaccttcttgctctttttatttttatttatttattaggggtgggggatggtgtctcactctgtcactcaggctggagtgcaatgacgtgatctcagctcactgcaacctctgcctccctggttcaagcgattcttctgcctcggcctcctgagtagctgggattacaggcatgcgccaccatgcccagctaatttttgtgtttttagtagagagggggtttcatcatgttacctaggctgatctcaaactcctgatctcaagtgatctgcccacctcagcctcccaaagtgttgagattacaggcatgagccactgtgcccagcccttttgctctttttatagtgtaaatttccctcagttagaacttggaaattacttctgcttcacttactgccttttctcaggttgttggaatctaggcagtagcagttacttggcagctaggaggcttgctagaataggaattccaccttcagcatttactgttacagggtagaagatgcagctcagggagagaaggatgatgataagaacatggcagaaaatctcaaaatctactctggaaaattcactatgtttccacacaccaacatgtgaatcgtcatgagatcatagggcattgttaaagttccatattggaaggaaaagacttagtacaattctaagaattagcatttatcctgctgatcagttcttagctaagtgtctgctgatacctaagtaaccaatatacccaagtgttctattgctgggtaacacagtaccacacattgaacaccttaaaacaatagacatttggtaatgtctgtacaggctgtactgaagcggcctgtacagggccgcttcagtacaggaccttacctatgtagactgaggtacgtgtttcttgctgactgtcagctgggcaccactcagcttcgagaggcctcccacagttcttgccatgtggccttctcacagatgcctctcacaacatggcagtttcttcaaagcaagcaggagaatctctaaatgagtcttgtatgacattacgtcattatgggaataacatcccatcacctttgccatattctagcgtctagaagcaaggtatgagttccaacaaaactcaagggtagaggctagaacagggatgtgactcattgcggatcaccttagagcatgcctgccacactcgggtacctgcagaatagagattctcaaaagttctaaaaactgagctaagagcaggacatgatggctcacacctgtaatcccagctactcaggaagctggggtggaagtatctcctgaggtcaggagtttgagaccagcctgggcaatatagtgagacctctgtctctaaaaaatttttaaaagagaccccttctctaaaaaacaggaaggctgggcgcggtggctcacacctgtaatcccagcactttgggaggccgaggtgggcggatcacaaggtcaggagatcaagaccatcctggctaacacggtgaaaccccatctctactaaaaatacaaaaaattagccgggcgggcgtggtggcgggtgcctgtagtcccagctactcgggaggctgaggcaggagaatggcgtgaacccaggaggcggagcttgcagtgagccgagatggtgccactgcactccagcctgggtgacagagcgagactgtctcaaaaaaaaaaaacaaaaatattcaactatgagctggggaaaaaagcttcagcggtcactgaaagtgcttacaggtacagctagtatggggatggaatatgccccattagccaggccaacagatctcatataggagaatctgttttatgtttgttggacagtgggtgagttatcgcagagttatgccttttttttctgtcactattttatgtcccttatcactgtgcctttaacctactgaaatgcagttgaggccgggtgcggtggctcacgccaagatggcgccactacactccagcctgggcaacagagggagactccatctc

SEQ ID NO: 146050 - DNA, 11775 bp, Homo sapiens
  Payload ID: 8962
  Gene Symbol: KIAA1958
  Gene Name: KIAA1958
  Uniprot ID: Q8N8K9
  ENST ID: ENST00000337530
  CDS Start-End: 297-2447
tccgagccgggcgcgcggagctcggggcgcacggagcggcgcgcggcggtcggccgagccaggctggcgcccccgccccccgccccgctcctcggtccgccgcccgccgggcgccttccccgctccacttacctttggtgcccggccctctggccgctctcctcccgccctcgcgccccttcggcccgtcccgtccagcccgggctgcccggctctcgcaggcccccccgcgccgaccgcgttcctatggacagacgcacagacacctgcaggagtgacactgctgatcctgtaacatggaggattgtcttcatacctcatctgagaatctgtccaaattggtcagctgggcccatagccatgggactatttgcagcctcattccaaacctgaaacacttgctttctgaaggttcccatgggaacctgacagcaatgtggggctgtagtgctggccatgcttatcactggccactaacagctacttgcagagctgggtcccaagagagggtctgtttccaggataacagaagttttaactctgatagtcccagtataatcggggtgccctctgagacacagactagccctgttgaaaggtaccctgggagaccagtgaaagcaaagctagactgtaaccggaccagagactcttgtgacttctcctactgtagtgagccctctgaactggatgaaactgttgaagaatatgaagatgagaacaccctgtttgacatggtttgtgagtcttctgttacagatgaggatagtgactttgaaccccaaacccaaaggcctcaaagcattgctcgcaaaagacctggggtagtcccatcttccctccattcaagctcccagacgcagatggttgacgaatgcagcaatgatgtcatcatcaagaaaatcaaacaagaaatccccgaagattattacattgtggcaaatgcagaactgacaggaggagtagatggaccagccctgtccttgacacagatggcaaaacccaagcctcagactcacgctggtccctcctgtgtagggtctgctaaactgattccccatgtcacatctgccatcagcacggagctagacccacacggtatgtctgcatccccctctgtgatctccagaccaattgtccagaagactgctagggtatctctggcttcaccaaacagaggaccccctggtacacatggcaccaaccaacaggtggccatgcaaatgcctgtgagcacatcccatcctaacaaacagatcagtatccccttgtctgccctgcagctgcctggacaggatgagcaagttgcctctgaagagttcctgtcccatctgcccagccaggtctcctcctgtgaggtagccctttctccctcagttaacacagagccagaagtgagctccagtcagcagcagcccccagtcgctccagccataaccactgaggccacagcacagtgcataccagcttattccactaagctcaacaaatttcctgtatttaatattaatgatgacttgaatgatctgtgtaccagtgcagtaagcccaaatactaccaaagccacgcggtacgccttgaatgtgtggcgttattggtgcatgaccaacgggctcaaagaccacacagacatcaccaagatccctgcagtgaagttgaacgagctgctcgagaacttttatgtcaccgtcaagaagagcgacggctcggacttcctggccacctcgctccatgctattcgccgaggcctggaccgcatcctgaagaatgcaggtgtcggcttttccatcaccagcagcaccttcagctcctccaccaagaaactcaaggagaagctgtgggtgctgagtaaggcaggcatgtcgggcgcgcgttctcgcaacatcgtctacttctccctttctgacgaggaggagatgtggcaggcagggtgtctgggggatgacagccctatcactctcctgtccactgtggtcaagtacaacagccagtacctgaacatgcggacgctgcaggagcatgcggatctgatgtatggtgacatcgagctgctcaaagacccccaaaaccagccctactttgcccggacggacagcgtcaagcgggagagtcggagcggctccaccagagtgtgtcacgggaagatctaccatgagcattcccggggacacaaacagtgcccttactgcctcctctacaagtacatgtacatccaccggccgcccacccaaatggaggccaagtcccccttctacctgactgccaggaaggaggccacagacatgggcagcgtgtggtatgaggagcagaggatggggctgcgctctcttcggggaattgtcccaaacttagccaagaaggtcaagctggaaaactgtgagaacttcacctttgtctcgttcactcaggtctcccggaggcttggctcccacagctgctgccagtgagcccccactggggcccggccactgccctgtcacctgctcgggccagccagggttggagcagctggagctccttggaggcaggggctgaccaggtgtgacctcccggtctggcggctctcccctggtgtggcctgccctccctttgacttggggtttgctttttaaaatgaaactagatgagtctaaatcattcggatggtttatccaaatgtgcgtcaacttcgttagcttttagaatctaacacaatgtataattgttacatacaagagtgaggaaattcattttctctagtgcctttctagcacaggttttctcaaaacaaacaaacaaaaaaggaaactgttaagtagtcgtttaaaaaaaaaatcccagtagcgcagtagctttagaacgttaggaagactgtacactttgttgaattacactcacaattagaaactagagagaggcagacacgttccctatttccaggagacagattgcgcttgatgcgccttttttttctgttggtggataaggtggttctggagggcaggcagccttgtgtcggggagtatcctcaagcgacacttggtcatctgacaaggacttgggctgctcccacggctcccagcagcggtaggaaccccatctcggctgtcaatggagagaattttatgataaaagattcacgcaccagaagggtgtctgtgagaacaaggcttctagtgaactagacagtttgtaccatgagggaatttctagtagtgaaggaaaatggcttggaaaagccaatctgtgatcaaaatgtgaaaacctcctgaagcagaagtgcctatgttttatttctcagcaccatgtgagagctcctttgattggaacattttttgaggtttctgtctgttcttcgtgtcatcccattattcggtcagcatataccactggatctataaaacaactaaaggtaatttttagtcttagccaagaaaagctaaccaaacaagctgcaaaaaacacagatccccaaactttctttattaaagagatttggaatatttttgtcaatgtatgacttttcagccacaattacatgtcatcattttaggatggcaccaatacttgggacacgatgatttaggcaccccaccaggtaagcaaactcagcattaaggatgtagttataaaattagcgcataatggtaggtaatgcagtttgaaaccatttcactcaggtaaaatgcaacctgaccacattatttaaaaatcagcagaattttctaataactactctgagtgcaacaacaagtgaaaaaggagctcaaagagtgctcattaagagtaacaataatttctagggaccttgactttgcatttgaggaaaatcttgtgtaactttattccattatgctcctaatatgctttctaatcccaaattaaaactctaatacaaattcattttgtagaagtcttaaaatcagtcctctttctttttgaaaacattattttagtatttattttaattaattggtttcttaaaaaatcatacactagtcattgacatatgtaatacttcctttaccagagaagactcaaccaatgctgccttaagatttaatgttattccctttttagtcactgtgcatttataagtttgtttactagttgacctttcctgaatagagattagtttcggcatttctccatctgtatataaataacaggtaatatttaatcatcagtgtatgacttgatatcacataacgttctggtgtggtttcctgtagtgatcttagggttttgatttaaaagaaatacacaaaacattaggtacaatttcctttagtttgctaaacacccaaaggatattttgttttgttggttctgcacttaaactgaaatacaacctatgtgaactattgggcaaagcctgcagcctaattaattaaaacctccatttttatttgaatagattcaagtagaaattgccgttaggaatcactgggatcttttcggattttgaccttttcaaaggtagcaataactactccagaggttgtaatctttctgttggtagtggcttttcatcagctaaataatcatctctgcctcaaatgtgttgcctgtcacctagttgatgttccataaaatccctgggttctgaagtgaattattataattaataatcaggagggcgaatcttcagtggcatctgatggaatgaaagaactgtgtctgagcagcctaaaagctgtttgtgacatgccaccttgggaaacaagagtgaggaagaaaacacagtcatcaagtgccagcgtgtgccacccattgtactaggtactttattatgcatttatgtatatgtgtgtgtgtctgtgtatacacacaaacacatatacataagtgtttacacacacacacgcacaatatgtggttaagcctggtaagcctgctaaaatggcaaagcggcctggcgcgtggctcacgcctataatcccagcactttgggaggccaaggtgggcagatcacttgaggtcaggagttcaagatcaggaccaacatggtgaaaccccatctctactaaaaatacaaaaattagccgggcgtggtggcaggtgcctgtaatcccagctacttgagagtctgaagcaggagaattgcttgaacctgggaggcggaggttgcagtgagccgagaccatgccactgcactccagcctgggcaacaaagctagactccatctcaaaaaaaataaaaaataaaatggcgaagcacctgtccatgtgtttggccaaagccgtcctccgaggtcttaagggggccagagtagcagtcctcgttggcgttctaaggcagttgttctggcttccagtcagctctaaaccttaccttctggggactccaggattttctgctcttggcctaatgcaagagaaaggagaatccccagagaaagaagtggggaggtaaagagcgttttctccacttacctttgggttttttatgctcccaagtagaaataaatatcaagaattcacaggttgactgaagcacaagttgcccctgggctctgtgtcaaggctggtggtactgtaggtgttatgagaggacccatagggtgtccttcaggtgagctgttgtccacagcacctttcatatctgctgtaaagggagccctactttctgtctatcccccccaccgccggcccccggaatctaagcagactccctgttggaagcttactctggcacagaagctaggatgtcaccttaaagggtgtgattcaattgaatatagtttagtgcggtaccaggcacatcataagcatgcaataaatgttagccagcttagttataacttttggtaataattaatattatttaactaatttgcattataccacttatttcttccattatggagattctgtctcccttaaactgttaaacttgaagaagaaaccaaacatgataatctggtcaagttaacacattttcgcccatgaattctacctccaacacagccaagctctgatacctcagatataagcaaaaacaagtgaaggaagaacagaaaagccttatggggctttatgagaaggtttttccattgtttagtgtgtttgcaaaaaggaattttatggaagtacctaaccaaagctgtgacagaagggtctccttggtcatgtggcattttccagctttccttggattttatgctacattaatttgccctggctgataaatggtgtttgaagaaatgtgaaattttgttactttgatttttattttaattcaagcttattaaaagcatcaagcattatatgccacactcagcattttcatagacatagtcattaggagaatctggacaaagtaatactcttgtagaaacggaagcatcttgctgtacttgaaagataactggactcagagctacttcactcctcacttgggcaaatgccgatatcactttgcttagctataaagtgccatcagtgggatggatcgtcttcacggtgaaccgtgttacacttctgcaattcctcaagttcatattaattaggaagtggcagagctaggacacaaaattcctaattcctgaagatagttagtctcctaattaagtgcttctcactatattgggatgccttctttaggaataagactttcctttaattttcaagttccacaacttctaaaattattttgctatctcgaagcagcagaatattgatcatttttctcagtttaggctaacacagtccacaccattaccacttaaataaagtaaccgaatgctaaatattatccttatcaaacatccatcactttgttgcttttatgagatgtagattgctaaaaacttttgagctagtagacgttacctttaagcatcaatgaatgcaaacagtgaagacctcaaagaagagttacctcattttctctacatgatctccaatgtagtctcagataaggcccatacatagttaaaagctggtaacagctctgaacagaagtatgtattaaatgtttcaaacttgtatatatttttgaatgcttttgtttttggagtgaatttttaatactctgtgttaaaagaaaaacattccatcttgtaggcagtgttcctcagtaaaaatctttgttgcattttcccatataaatgaatcacccttattaaaacaggaggagggagggatttgtggtgacctaccgctgccctccctttctaagagaagaggaggccatggggtatgataactaaatgaacatctctggaagttcctccgtctgatatgtgtattctgacataacagaatttcccaagacttctttgaggaaggctgtccacgcttcaggcaaagtttacccattattattatgattttgaatattccttgttcattacagtccagaaaatctgcagaagttctccatgttcagtggttgaccagaatctgattgttgcgctcaattaaagtgcttattatttagctaaaacaacttatatggaagttaattatttcaggaaatacataataagaccaaaaaaatcactggataatatgtagatatattttagttccattactattaatagcaattagataactctccctccccccattgaggtgagaatgggctcctagatacttggtggtcaatagaactgatttgattaactttcatttaactgtggttattgttacatctactgattttttcaaataaaaatttctagaaggctcagatttgactaagactgtgttacgtgctttctcacagctgccatatattctcatgtaatctttacaaccgctctacaaggtatgtctaattatttccattttacttattgagaatctaggctcagaggagttaaaattctgaaaatctcaccgataagttggagaatttaagtttgtaagttggagaatgcaggttttctgactccaaatctagtgctcagtccatgagacaaaactgcctcctggaggccatggaagtccattaactttaagaaagttaaacacagttttggtttgtttggcaaatatttcatctctcaagccatactgtgtcacccctccatgtattctcttactaaatgattgctcacttgggaacttaatcgatcctggaaagcctggcggttccccagtattttctgcctactgggaaccttctgtctttatccaataagtaatttatattacctgtcatctaccttaaagggcagatggtcatgtgaatttattctaatgaaagttagtttacaagctgcacctgttttgacattggactcactgcttaaaaagtaaaggagttcctaacttacgcaacaattacatgctcaggttttttacttttgccatttaattttggtcagaggatttttataatctgtaggctatagcactgtcatagaaaaatatacctttttttttttttgagactcaggagtctcactctgttgcccaggctggagtgcagtggtgcaatctctgcctcctgggttcaagccatcctcctgcctcagtctcccaagtagctgggattacaagcgtgtgccaccacgctcggctaatttttgtatttttagtggagatggggtttcatcatgttggccaggctggtctcgaactccgacctcagtgatccacctgcctcggcctcccaaagtggaaaaatatacttatttactcgttttctgttcttttttcctttatcggggcatatttattttctctttggagacttacaaagcaataggttatatgaaactctgagatcatctagtcaaattcccccattttatcaataaggaaatttaaggccagagatattaaagggcccatccaagatcagccaaacaataagtaatagattcaggactagagagttagtccagaactctctcctccatatcacagctgagaagatttagatttttttaaattaatagagctgcatctggcaaaatgacatccggctcacagaagaccctagtgagcttcttgtaccttcccagaaaaacccagaagaaggccaaatctcaattctagaatctagaaggaattgatgtaatttatgaggcatatggaggtagcttggggcaaaagtttccaagtagctcaattcctggcttacttcatgaaacaggccctgtgaaattaaaaacatgaaagctatttagtacttgtcctcttccccaatcatgcctgtcaccttactcggagtcagagctcctgagccagagaaatactagctgatgcttattacaccgggaagagaaaaagttcatatccaccctctcttctttctccccaacccacttcctcttcattcaatcccacataaatcttagagctaaaacaggagcagaaagcagagaaggactattagacctatggtggcatcccaagaataaagccctttaggtgaaggtagaaacaataaatacctgagtagcagaacacgcaaatattatgattttttatgtatgatgttgggttcagagacccataaaatcaggcaataggaaggaaaaggatgctgcttcaatagaaaagtaaactagaaattggacttggaaatatgttcatcaccttaccattgacctgggatttaactgaaaaagggattcaacaaacattcacatgaacagggtctgggaagaaaggaccacgtttaaggatgagtatagagaaaaaaataaaatgaggcatataaaaaagtcaatgggccaggcgcggtggctcacgcctataatccaagcactttgggatgccgaggcaggcagatcatctgaggtcaggagttcaagaccagcctggccaacatggtgaaccccgtctctactaaaaatacaaatattagccgggcatggtagcacatgcctgtaattccagctactcgggaggctgaggcgggagaatcgcttgaacccaggaggcggaggtttcagtgagccgagattgcaccactgcactccagcctgggcaacagagtgagactccatctcaaaaaaacagaaaaaaaagtaacaaattgcctgtaagaaaaccaaagagcatctggcttcagacttctgctctatagcaccaaatgccaggaaacaatagagaattgtgagggggaaaagttgtgactttggaattttatacatattttatatgttaagatacataattttttagttatgataaccatccaggaaatatatgagctatgtaatagtcttacaaagataataagttgtacagcaacctacgaggcttgatttaaataaaacaatgtttgcttagtatcctaatttcagtgggctctgggctattaaataccaggacattatccactagaggaagggtatgtatgcttttaaatagataatatggctagaagctacatatctaaaagcacccgaagtcctcatatgaataggctaaattaatacaataaggtgtaataaatgccataccacagcatcatgtttcttcatttttattaccgaaataatgtataaattgctcttgattttccccaccatcatttaaaacactctatcctgaaagagtccactgcttccaagtgagaaaagccaaggagtcccctgcgttgggggtgtaataacctagactagagcttatagactgaagcccatgtgcttctccatgctcaaacgcagaactaaaaatgggtataaagtcagaaaattgcagaatataagtctgtgtttcaaaaagcaatcaggaaaaaacaaacaaaaaacttgttttagaatacaaatgcaagaaaagttcaatttcaacagcagaaagatggcctggggcagtgagatgctttccttagctgtacttgaagttttatggaacgccatttaaattcagacatcaagggaatgaatgcagttttaaaaatccgaattatttctggagtctacaatgtcagtgttagaactaatgctgggttgttttgttttttcatttgcttgcactggaaggccttgaaaacacacaggagtgtagagtatcgtcagctctgatgctcagtttcttcctggcaatagaatggttttatctgtgccccaagcttttgccaatttaaactctaaactaaattttcaatgacaccagcatgtttgctttaaatttagcaatagaataggcaatggactgctttgcatttccttagtttttcattctgaaacagagcaaaacatcttcccaaagagatggagacaatctcttctgggtagattccaagtataacctgtcccagggtcctcttgctcagctgtgactaacaaaagtctgttcaatttaactacttagataagaagcgcaatgcttttatttaaaaatttaatattttctatggggctgtattttccaaataatagcaacaaaactgtcctaacgttttcactgttctgtaattttgttttaatatagaggatacccataatttcttaacactggaaacatcattctgaacgatgtaggaagcggtcagtaacgtgaatgatgttattgtaccgtctccagctttttccttcttcccccagatggtcgcacctgtgcatacatccctgtgcatgtgggggcacatgagtgggaaagtgggtgtcactcctattttctgtcctagagtgtcagcgttggaagggatttttttttgttcctccagtccggccctctagttgatagtccagtagtctgttaacaatttgtaaggacctgggttatattttaaaggtggttgttgttgttgtttgggttcacttatgtatatgcagcttgactgttcaacccagatttttaaacaataaaaagatttaatgtata

SEQ ID NO: 146051 - DNA, 2643 bp, Homo sapiens
  Payload ID: 8962
  Gene Symbol: KIAA1958
  Gene Name: KIAA1958
  Uniprot ID: Q8N8K9
  ENST ID: ENST00000374244
  CDS Start-End: 129-2345
cctcgcgccccttcggcccgtcccgtccagcccgggctgcccggctctcgcaggcccccccgcgccgaccgcgttcctatggacagacgcacagacacctgcaggagtgacactgctgatcctgtaacatggaggattgtcttcatacctcatctgagaatctgtccaaattggtcagctgggcccatagccatgggactatttgcagcctcattccaaacctgaaacacttgctttctgaaggttcccatgggaacctgacagcaatgtggggctgtagtgctggccatgcttatcactggccactaacagctacttgcagagctgggtcccaagagagggtctgtttccaggataacagaagttttaactctgatagtcccagtataatcggggtgccctctgagacacagactagccctgttgaaaggtaccctgggagaccagtgaaagcaaagctagactgtaaccggaccagagactcttgtgacttctcctactgtagtgagccctctgaactggatgaaactgttgaagaatatgaagatgagaacaccctgtttgacatggtttgtgagtcttctgttacagatgaggatagtgactttgaaccccaaacccaaaggcctcaaagcattgctcgcaaaagacctggggtagtcccatcttccctccattcaagctcccagacgcagatggttgacgaatgcagcaatgatgtcatcatcaagaaaatcaaacaagaaatccccgaagattattacattgtggcaaatgcagaactgacaggaggagtagatggaccagccctgtccttgacacagatggcaaaacccaagcctcagactcacgctggtccctcctgtgtagggtctgctaaactgattccccatgtcacatctgccatcagcacggagctagacccacacggtatgtctgcatccccctctgtgatctccagaccaattgtccagaagactgctagggtatctctggcttcaccaaacagaggaccccctggtacacatggcaccaaccaacaggtggccatgcaaatgcctgtgagcacatcccatcctaacaaacagatcagtatccccttgtctgccctgcagctgcctggacaggatgagcaagttgcctctgaagagttcctgtcccatctgcccagccaggtctcctcctgtgaggtagccctttctccctcagttaacacagagccagaagtgagctccagtcagcagcagcccccagtcgctccagccataaccactgaggccacagcacagtgcataccagaccaggatgaaagagcagctgagctcagcagggagcagaacgagaaaaccatccggagcacgcagaccgcgctccgcaatttccgtgagttcctcatctccaagtatccttctgaaacaagagagatttatgtcatcccttgcaaggagttggatgcctaccttgcctctttctttgttgatgccaggcagaaggatgggtccgaatacgaacccaacagcttggccaattaccagtgtgggctcgaaaggtacctgaaagaacacaggtatggctatagcatcaccagggataaggaattcaagcgttcccaagaggccctgaagcagaagcaaattgaactccgctgtaaaggaaaaggaaataagccacacaagtccatgaagctcacctttgctgacgagctcatcctgcggaaaaggggactgctaagccgatataaccccgagggtttgctcaacctagtctggctcaacaacacaaaagcttttgggcattgcacaggcttccatggatctaccttaaaatggggtgatatccggctccgggtaacagagacgggtctcgagtacttggagtggatgggtcaggacactggagacttgaatgccaaaaccaagagaggggggacagactcccgtgtgtatgccacccagcacgccccacagacctgccctgtccaggactataaggagtatgcccagcggcggcctcccgccatgcgctacgaggatgcccctttctacttatccatcaagccagtcgtgaacctggcggctctgcattggtacaactgccaggcccttggcaagaacaagctggccaagatggtgaagaccatgtgtgagaagggcaacatccctggcaggaaaaccaacttcagtgtgtatcagagctgcagcaccttgtctgaggcccagagcaaccagctcgtgctgatctgtaacaatctgagccagcaggctgcccagtcagtggccggccactccaacaatggcaatttcatcgtctccgcctcctatgactcttcctcagacaccgcttgaccaggtggcttgagcaagactccagtttggttactgtgtccggagaaactgtgattatacaccgcttctcgttccccttcctgtgccctcagtgttaattcactttataaaaatataaatatataatatatttttctttttacaaataagccaatggagataatttagtattactaacatagtatttataggcttaagacaaatgtacttgtgggcgatcaaatgtaattactgttacagactttacaaaaccatacgtggttctcaggcaacacaaagtagagagggaattctgttt

SEQ ID NO: 146052 - DNA, 7650 bp, Homo sapiens
  Payload ID: 8962
  Gene Symbol: KIAA1958
  Gene Name: KIAA1958
  Uniprot ID: Q8N8K9
  ENST ID: ENST00000536272
  CDS Start-End: 176-2410
gctccacttacctttggtgcccggccctctggccgctctcctcccgccctcgcgccccttcggcccgtcccgtccagcccgggctgcccggctctcgcaggcccccccgcgccgaccgcgttcctatggacagacgcacagacacctgcaggagtgacactgctgatcctgtaacatggaggattgtcttcatacctcatctgagaatctgtccaaattggtcagctgggcccatagccatgggactatttgcagcctcattccaaacctgaaacacttgctttctgaaggttcccatgggaacctgacagcaatgtggggctgtagtgctggccatgcttatcactggccactaacagctacttgcagagctgggtcccaagagagggtctgtttccaggataacagaagttttaactctgatagtcccagtataatcggggtgccctctgagacacagactagccctgttgaaaggtaccctgggagaccagtgaaagcaaagctagactgtaaccggaccagagactcttgtgacttctcctactgtagtgagccctctgaactggatgaaactgttgaagaatatgaagatgagaacaccctgtttgacatggtttgtgagtcttctgttacagatgaggatagtgactttgaaccccaaacccaaaggcctcaaagcattgctcgcaaaagacctggggtagtcccatcttccctccattcaagctcccagacgcagatggttgacgaatgcagcaatgatgtcatcatcaagaaaatcaaacaagaaatccccgaagattattacattgtggcaaatgcagaactgacaggaggagtagatggaccagccctgtccttgacacagatggcaaaacccaagcctcagactcacgctggtccctcctgtgtagggtctgctaaactgattccccatgtcacatctgccatcagcacggagctagacccacacggtatgtctgcatccccctctgtgatctccagaccaattgtccagaagactgctagggtatctctggcttcaccaaacagaggaccccctggtacacatggcaccaaccaacaggtggccatgcaaatgcctgtgagcacatcccatcctaacaaacagatcagtatccccttgtctgccctgcagctgcctggacaggatgagcaagttgcctctgaagagttcctgtcccatctgcccagccaggtctcctcctgtgaggtagccctttctccctcagttaacacagagccagaagtgagctccagtcagcagcagcccccagtcgctccagccataaccactgaggccacagcacagtgcataccagaccaggatgaaagagcagctgagctcagcagggagcagaacgagaaaaccatccggagcacgcagaccgcgctccgcaatttcccttattccactaagctcaacaaatttcctgtatttaatattaatgatgacttgaatgatctgtgtaccagtgcagtaagcccaaatactaccaaagccacgcggtacgccttgaatgtgtggcgttattggtgcatgaccaacgggctcaaagaccacacagacatcaccaagatccctgcagtgaagttgaacgagctgctcgagaacttttatgtcaccgtcaagaagagcgacggctcggacttcctggccacctcgctccatgctattcgccgaggcctggaccgcatcctgaagaatgcaggtgtcggcttttccatcaccagcagcaccttcagctcctccaccaagaaactcaaggagaagctgtgggtgctgagtaaggcaggcatgtcgggcgcgcgttctcgcaacatcgtctacttctccctttctgacgaggaggagatgtggcaggcagggtgtctgggggatgacagccctatcactctcctgtccactgtggtcaagtacaacagccagtacctgaacatgcggacgctgcaggagcatgcggatctgatgtatggtgacatcgagctgctcaaagacccccaaaaccagccctactttgcccggacggacagcgtcaagcgggagagtcggagcggctccaccagagtgtgtcacgggaagatctaccatgagcattcccggggacacaaacagtgcccttactgcctcctctacaagtacatgtacatccaccggccgcccacccaaatggaggccaagtcccccttctacctgactgccaggaaggaggccacagacatgggcagcgtgtggtatgaggagcagaggatggggctgcgctctcttcggggaattgtcccaaacttagccaagaaggtcaagctggaaaactgtgagaacttcacctttgtctcgttcactcaggtctcccggaggcttggctcccacagctgctgccagtgagcccccactggggcccggccactgccctgtcacctgctcgggccagccagggttggagcagctggagctccttggaggcaggggctgaccaggtgtgacctcccggtctggcggctctcccctggtgtggcctgccctccctttgacttggggtttgctttttaaaatgaaactagatgagtctaaatcattcggatggtttatccaaatgtgcgtcaacttcgttagcttttagaatctaacacaatgtataattgttacatacaagagtgaggaaattcattttctctagtgcctttctagcacaggttttctcaaaacaaacaaacaaaaaaggaaactgttaagtagtcgtttaaaaaaaaaatcccagtagcgcagtagctttagaacgttaggaagactgtacactttgttgaattacactcacaattagaaactagagagaggcagacacgttccctatttccaggagacagattgcgcttgatgcgccttttttttctgttggtggataaggtggttctggagggcaggcagccttgtgtcggggagtatcctcaagcgacacttggtcatctgacaaggacttgggctgctcccacggctcccagcagcggtaggaaccccatctcggctgtcaatggagagaattttatgataaaagattcacgcaccagaagggtgtctgtgagaacaaggcttctagtgaactagacagtttgtaccatgagggaatttctagtagtgaaggaaaatggcttggaaaagccaatctgtgatcaaaatgtgaaaacctcctgaagcagaagtgcctatgttttatttctcagcaccatgtgagagctcctttgattggaacattttttgaggtttctgtctgttcttcgtgtcatcccattattcggtcagcatataccactggatctataaaacaactaaaggtaatttttagtcttagccaagaaaagctaaccaaacaagctgcaaaaaacacagatccccaaactttctttattaaagagatttggaatatttttgtcaatgtatgacttttcagccacaattacatgtcatcattttaggatggcaccaatacttgggacacgatgatttaggcaccccaccaggtaagcaaactcagcattaaggatgtagttataaaattagcgcataatggtaggtaatgcagtttgaaaccatttcactcaggtaaaatgcaacctgaccacattatttaaaaatcagcagaattttctaataactactctgagtgcaacaacaagtgaaaaaggagctcaaagagtgctcattaagagtaacaataatttctagggaccttgactttgcatttgaggaaaatcttgtgtaactttattccattatgctcctaatatgctttctaatcccaaattaaaactctaatacaaattcattttgtagaagtcttaaaatcagtcctctttctttttgaaaacattattttagtatttattttaattaattggtttcttaaaaaatcatacactagtcattgacatatgtaatacttcctttaccagagaagactcaaccaatgctgccttaagatttaatgttattccctttttagtcactgtgcatttataagtttgtttactagttgacctttcctgaatagagattagtttcggcatttctccatctgtatataaataacaggtaatatttaatcatcagtgtatgacttgatatcacataacgttctggtgtggtttcctgtagtgatcttagggttttgatttaaaagaaatacacaaaacattaggtacaatttcctttagtttgctaaacacccaaaggatattttgttttgttggttctgcacttaaactgaaatacaacctatgtgaactattgggcaaagcctgcagcctaattaattaaaacctccatttttatttgaatagattcaagtagaaattgccgttaggaatcactgggatcttttcggattttgaccttttcaaaggtagcaataactactccagaggttgtaatctttctgttggtagtggcttttcatcagctaaataatcatctctgcctcaaatgtgttgcctgtcacctagttgatgttccataaaatccctgggttctgaagtgaattattataattaataatcaggagggcgaatcttcagtggcatctgatggaatgaaagaactgtgtctgagcagcctaaaagctgtttgtgacatgccaccttgggaaacaagagtgaggaagaaaacacagtcatcaagtgccagcgtgtgccacccattgtactaggtactttattatgcatttatgtatatgtgtgtgtgtctgtgtatacacacaaacacatatacataagtgtttacacacacacacgcacaatatgtggttaagcctggtaagcctgctaaaatggcaaagcggcctggcgcgtggctcacgcctataatcccagcactttgggaggccaaggtgggcagatcacttgaggtcaggagttcaagatcaggaccaacatggtgaaaccccatctctactaaaaatacaaaaattagccgggcgtggtggcaggtgcctgtaatcccagctacttgagagtctgaagcaggagaattgcttgaacctgggaggcggaggttgcagtgagccgagaccatgccactgcactccagcctgggcaacaaagctagactccatctcaaaaaaaataaaaaataaaatggcgaagcacctgtccatgtgtttggccaaagccgtcctccgaggtcttaagggggccagagtagcagtcctcgttggcgttctaaggcagttgttctggcttccagtcagctctaaaccttaccttctggggactccaggattttctgctcttggcctaatgcaagagaaaggagaatccccagagaaagaagtggggaggtaaagagcgttttctccacttacctttgggttttttatgctcccaagtagaaataaatatcaagaattcacaggttgactgaagcacaagttgcccctgggctctgtgtcaaggctggtggtactgtaggtgttatgagaggacccatagggtgtccttcaggtgagctgttgtccacagcacctttcatatctgctgtaaagggagccctactttctgtctatcccccccaccgccggcccccggaatctaagcagactccctgttggaagcttactctggcacagaagctaggatgtcaccttaaagggtgtgattcaattgaatatagtttagtgcggtaccaggcacatcataagcatgcaataaatgttagccagcttagttataacttttggtaataattaatattatttaactaatttgcattataccacttatttcttccattatggagattctgtctcccttaaactgttaaacttgaagaagaaaccaaacatgataatctggtcaagttaacacattttcgcccatgaattctacctccaacacagccaagctctgatacctcagatataagcaaaaacaagtgaaggaagaacagaaaagccttatggggctttatgagaaggtttttccattgtttagtgtgtttgcaaaaaggaattttatggaagtacctaaccaaagctgtgacagaagggtctccttggtcatgtggcattttccagctttccttggattttatgctacattaatttgccctggctgataaatggtgtttgaagaaatgtgaaattttgttactttgatttttattttaattcaagcttattaaaagcatcaagcattatatgccacactcagcattttcatagacatagtcattaggagaatctggacaaagtaatactcttgtagaaacggaagcatcttgctgtacttgaaagataactggactcagagctacttcactcctcacttgggcaaatgccgatatcactttgcttagctataaagtgccatcagtgggatggatcgtcttcacggtgaaccgtgttacacttctgcaattcctcaagttcatattaattaggaagtggcagagctaggacacaaaattcctaattcctgaagatagttagtctcctaattaagtgcttctcactatattgggatgccttctttaggaataagactttcctttaattttcaagttccacaacttctaaaattattttgctatctcgaagcagcagaatattgatcatttttctcagtttaggctaacacagtccacaccattaccacttaaataaagtaaccgaatgctaaatattatccttatcaaacatccatcactttgttgcttttatgagatgtagattgctaaaaacttttgagctagtagacgttacctttaagcatcaatgaatgcaaacagtgaagacctcaaagaagagttacctcattttctctacatgatctccaatgtagtctcagataaggcccatacatagttaaaagctggtaacagctctgaacagaagtatgtattaaatgtttcaaacttgtatatatttttgaatgcttttgtttttggagtgaatttttaatactctgtgttaaaagaaaaacattccatcttgtaggcagtgttcctcagtaaaaatctttgttgcattttcccatataaatgaatcacccttattaaaacaggaggagggagggatttgtggtgacctaccgctgccctccctttctaagagaagaggaggccatggggtatgataactaaatgaacatctctggaagttcctccgtctgatatgtgtattctgacataacagaatttcccaagacttctttgaggaaggctgtccacgcttcaggcaaagtttacccattattattatgattttgaatattccttgttcattacagtccagaaaatctgcagaagttctccatgttcagtggttgaccagaatctgattgttgcgctcaattaaagtgcttattatttagctaaaacaacttatatggaagttaattatttcaggaaatacataataagaccaaaaaaatcactggataatatgtagatatattttagttccattactattaatagcaattagataactctccctccccccattgaggtgagaatgggctcctagatacttggtggtcaatagaactgatttgattaactttcatttaactgtggttattgttacatctactgattttttcaaataaaaatttctagaaggctcagatttgact

SEQ ID NO: 146053 - DNA, 1925 bp, Homo sapiens
  Payload ID: 8963
  Gene Symbol: KIAA2012
  Gene Name: KIAA2012
  ENST ID: ENST00000498697
  CDS Start-End: 1-1925
gtgaagaagaaaaaggcaccaaaggctttgaaattacctcctatctcagaagaaccacccagagtcttggagcccctgaagagccaatttaaagccaatgagcccccaacagagctcttcatcttaccggtggagattcattaccacaccaaacaacccccaaaagagaaagcccacagaagaggtgctccacaccctgagtcagaaccagaaagcagcgaagaatccacacctgtgtggagacctcccctgaagcatgcgtccttagaaacaccatgggagttaacagtgcatctcccagtggacgcgagcagggacacactctcacctcaagatgatgatgccccacctcacgatgtggccccaccattggatcttctacccccgattaaaggaaaaaaaagtcctgagagccagaagggcgtggacagccctaggacatcagaccacaacagccccccaagtctcccgaacatgagagtgcccaggagggcactgccagcagctcaagcctatgaatctgtcaattcaaatatcagccatgaagaggaagggcctagtagtcagcatttcctaaaagcaaacactgaacctagagccaatcttcacatgaacctttatgaaacctcaccgttgacccaaacaacagagaagcagggagcccagcagtccttggaggcagcagctcagaagacaggagagcctcaaagttgtataaataaagcgctgatatgttcaaacagaaaagaattttacacgcgcaagctgcacatcgacatgacgccgttcctgaaggaaagtggaaatgcactggactatcaggaagaagcagggagacccctcagagaaactcaccacaacgaccaagacccagagccaaggagtatgacccttgactctcccagggcttcccggactgagcacatccagaccccagaagcagatattgtgcaaaaagtgggcagagattatgatgtacaccacctacacagaggacttctgggatacgggcctgagtcacccgagaggttgagtgctgtgtatacatctcttcttccaagagaaagagaagggaaggctgaaccaagactgtttagccaggagacatcagccaacatcagtcatgagagggatttgattaacgaggccaagagaaaggaaaaacccaagaaagacaaaaccaaaggacccaaaagcgagagagaaggaaaggtctacgggcaagcagaggctgccattggaaagtcaaaggactcaaaggctaaaaaaaaattagaaaaaaaaacaagaccccaaaggaaaaggacacagaaggaaagaaatctggagatagcggcagagctgagcgggcctgatgtcagctatgaggaaacagaagacacctcaaatagaggttcctttgcctcagactcctttgtagaggacccttggctttctcccaaatatgatgcccaggaaagccaagtttctctagatggaagatcatcaccctctcagattgcaactgtcactggcaacatggaatctaaagaagagagaagatgtgaggacccttccaaggccctcctcactaagagggagcaggagaaggcttcctgggacaggcttcgagcagaaagagccgagatgaggtggctggaggtggagaagaagagaagggagcaggaagagcaaaggcagctccagcaggagcagctggagagagcaaaaaagatggaggaggagctggagctggagcagcagagacgtacagaagagatccgcttgaggaaacagagactccaagaagaacagcagcggcaggaggaggaggagagaaagcagcagctccggttgaaagcagcccaggagagagcccggcaacagcaagaggagtttcggaggaaactgcgagaactacagagaaaaaagcagcaggaggaagc

SEQ ID NO: 146054 - DNA, 4029 bp, Homo sapiens
  Payload ID: 8963
  Gene Symbol: KIAA2012
  Gene Name: KIAA2012
  Uniprot ID: Q0VF49
  ENST ID: ENST00000541917
  CDS Start-End: 374-3916
agacaagaaggatggtgctgtggccgagatctgtagatgcacacggctggtaacagagcaaccgggaccaagggacaacaagagctcaggagaaggggagagacaggtcgcccagagagtagacaatccagggcttgaggaggctggctgtgcggtttattttttctctccacaaagacacacactgtctaaactgtgtggctggttgttactaagaagctgctgcgagagggaaaaatgtatttaataaaaggccctgtgtttgtggtcttcttgggcttgctgtgagctctggaaatcttgaggtgtgaccagatttcagccttcaaaaccaagatggactgcccttgagaaggggtggtcagagggaaacatgttcacgctctccctcctgagccggggccacgggaagctgggccaggacaaacagaagttagaagtctactttgaaccagaggattacttgaactggaggtccccagaagactatgttcctgtcagcaaacctcaagataagaacaatgccagtcagcactcctggagcctctttctccctaaaactttcagtactagaaagggtgccctgatcctgtactcagaaggttttgccatttcggcatggacacccaaagagaggagaaaaggcccctactgccccagaggtccctggaggaagctggatcttgaactgcacacacttcaagacctcaaagaagccatcctggcatatggaaggcagcagggagagcaggacagagcctggcaaccatacctccacttccgaagccagctggagagccaggcccaacggcagatccagccagggcattcagccaagagatacctccgaggcctcctgcggacttggcccccagacgccatgtataggctctggtgcgcaggatacatcaaggattctgtgctactccaggacagtcaacttaatgtaccaaagaagctcaggccacaacaagatctttcaggtgtacccccaaaataccatctcctgcctgtcttcccttcattttggattcaacaaggaaaatcttttgaacaacgtcaacagggcctggatgaaggggaagctggagctgctggacacgtggaccagggccctctagccaagaaccatggcagtcaggggactcgcttgccaccacgcaggaagcagccctggcaggaagatgaaacgcaggcagaggacacgtcaatagagaatcacctttgtttatatgcttcaaaggagagctacaatgaaaagacacagcaaacctccaggaaggcctttgggcatggccgcatcgatcactcttggctcccaagtgacaaatcccacattacattctgtggaggcgccttccctaataggaaggcagatctcagcgataaacaaaggaacgtgaaactccacaaggccagaagcagccacttgttacaggtgcttcctgctgaaagaagcctcttccctcctgtagcatctgccactggctccagaataatcacccctggggaagtgaagaagaaaaaggcaccaaaggctttgaaattacctcctatctcagaagaaccacccagagtcttggagcccctgaagagccaatttaaagccaatgagcccccaacagagctcttcatcttaccggtggagattcattaccacaccaaacaacccccaaaagagaaagcccacagaagaggtgctccacaccctgagtcagaaccagaaagcagcgaagaatccacacctgtgtggagacctcccctgaagcatgcgtccttagaaacaccatgggagttaacagtgcatctcccagtggacgcgagcagggacacactctcacctcaaggtagctcctccctccctccagcatccctcgggaacctcactctgaagggaagcaaggcaagacacacaagggtccacagccaaggaaaaggagtctggaagggagatgatgatgccccacctcacgatgtggccccaccattggatcttctacccccgattaaaggaaaaaaaagtcctgagagccagaagggcgtggacagccctaggacatcagaccacaacagccccccaagtctcccgaacatgagagtgcccaggagggcactgccagcagctcaagaagattccagcgaccctacactgggacacttcttgctgggtccagatggagaaaaagtctgcctgtccctcccagggcatacccaaaccgaggcgcttccatcgggtaaagcctatgaatctgtcaattcaaatatcagccatgaagaggaagggcctagtagtcagcatttcctaaaagcaaacactgaacctagagccaatcttcacatgaacctttatgaaacctcaccgttgacccaaacaacagagaagcagggagcccagcagtccttggaggcagcagctcagaagacaggagagcctcaaagttgtataaataaagcgctgatatgttcaaacagaaaagaattttacacgcgcaagctgcacatcgacatgacgccgttcctgaaggaaagtggaaatgcactggactatcaggaagaagcagggagacccctcagagaaactcaccacaacgaccaagacccagagccaaggagtatgacccttgactctcccagggcttcccggactgagcacatccagaccccagaagcagatattgtgcaaaaagtgggcagagattatgatgtacaccacctacacagaggacttctgggatacgggcctgagtcacccgagaggttgagtgctgtgtatacatctcttcttccaagagaaagagaagggaaggctgaaccaagactgtttagccaggagacatcagccaacatcagtcatgagagggatttgattaacgaggccaagagaaaggaaaaacccaagaaagacaaaaccaaaggacccaaaagcgagagagaaggaaaggtctacgggcaagcagaggctgccattggaaagtcaaaggactcaaaggctaaaaaaaaattagaaaaaaaaacaagaccccaaaggaaaaggacacagaaggaaagaaatctggagatagcggcagagctgagcgggcctgatgtcagctatgaggaaacagaagacacctcaaatagaggttcctttgcctcagactcctttgtagaggacccttggctttctcccaaatatgatgcccaggaaagccaagtttctctagatggaagatcatcaccctctcagattgcaactgtcactggcaacatggaatctaaagaagagagaagatgtgaggacccttccaaggccctcctcactaagagggagcaggagaaggcttcctgggacaggcttcgagcagaaagagccgagatgaggtggctggaggtggagaagaagagaagggagcaggaagagcaaaggcagctccagcaggagcagctggagagagcaaaaaagatggaggaggagctggagctggagcagcagagacgtacagaagagatccgcttgaggaaacagagactccaagaagaacagcagcggcaggaggaggaggagagaaagcagcagctccggttgaaagcagcccaggagagagcccggcaacagcaagaggagtttcggaggaaactgcgagaactacagagaaaaaagcagcaggaggaagccgagagggccgaggcagagaagcaaaggcaagaggaattggaaatgcagttagaagaagaacaaaaacacctgatggaaatggctgaagaggaacgactggagtaccagcggcggaaacaggaagcagaagagaaggctcggctggaggcagaggagaggaggcaaaaagaagaggaagcagcaagactggctctggaagaagccacgaaacaagcccaggaacaagccaggtactggatatttgggcaacagttgccatagggggatggttcaagggcttcactgtccagtgctagtgctagctttgcactgcctttagacaagaaaagtccccccacccccagcatggcttggaagactgaaaggcatagagg

SEQ ID NO: 146055 - DNA, 2815 bp, Homo sapiens
  Payload ID: 8964
  Gene Symbol: KIAA2013
  Gene Name: KIAA2013
  Uniprot ID: Q8IYS2
  ENST ID: ENST00000376572
  CDS Start-End: 187-2091
tttgacggctggaggccaccgagaagaaggaggaagcaggggtggcggctgctgcggcggttgcggcgggggccggggtgggcgccgcggtccgggccgggcagtgaggcgcgggcggccgggccggtgggctgggcggcgggcccggcggccgccctcgcacccttgcccgcgcctggcggcccgatgtggctgcagcagcggctcaaggggctgccgggactgctgtcgagcagctgggcccgccgcctcctctgcctgcttggcctcctgctgctgcttctgtggtttggggggtccggcgcgcggcgggcggcgggcggcctgcacctgctgccctggtcccgcggtgagccgggcgccgccgagccgtctgcctgcctggaggcggccacccgcgcctggcgcggcctgcgggagcgcggtgaggtggtaccgctgggtcctggagtgccggccctggtggccaacggcttcctggccctggacgtggctgccaatcggctgtgggtgactcccggggagcgggagcccgccgtggcgccggactttgtgcccttcgtgcagctgcgcccgctgagcgcgctggctgaagctggagaggcggtgctgctgctgcgggaggggcttctgcgccgcgtgcgttgcctgcagctggggtccccaggtcctggccccgtggccgccggccccgggcccgcctccgtctctggccttgccgcggggtccggccgcgactgcgtgctgctgcaagaggactttctggcgcacaggggccgaccccacgtctacctgcagcgcatccagctcaacaaccccacggagcgcgtggccgcgctgcagactgtggggcccactgccggcccagcccccaaggccttcaccagtaccctggagaaggtcggagaccatcagttcctcctctactcaggccggtccccgcctacgcccactgggttggtgcacctggtggtggtggccgccaagaagctggtgaaccgcctccaagtggctcccaagacgcagctggatgagacggtgctgtgggtggtgcacgtctctggccccattaacccccaggtgctcaaaagcaaagcagccaaggagctcaaggcgctgcaggacttggcacggaaggaaatgctggagctcttggacatgccagcggcggagctgcttcaagaccaccagctcctctgggctcagctcttcagcccaggagtggaaatgaagaagatcactgacacccacacgccgtctggcctcaccgtgaacctgacgctctattacatgctctcctgctcgccagccccactgctcagcccctccctgagccacagggagcgagaccagatggagtcgacgctcaactatgaagatcactgcttcagcgggcacgccaccatgcacgccgagaacctgtggccggggcggctgtcctccgtccagcagatcctgcagctctctgacctgtggaggctgaccctccagaagcgtggctgcaaggggctggtgaaggtgggtgccccaggcatcctgcaggggatggtgctcagctttggggggctgcagttcacagagaaccacctccagttccaggccgaccccgacgtgctgcacaacagctatgcattgcatggcatccgctacaagaacgaccatatcaacctggccgtgctggcggatgccgagggcaagccctacctacacgtgtccgtggagtcccgtggccagcctgtcaagatctatgcctgcaaggcaggctgcctggacgagccagtggagctgacctcggcgcccacgggccacaccttctcggtcatggtgacacagcccatcacgccactgctctacatctccaccgacctcacacacctgcaggacctgcggcacacgctgcacctcaaggccatcctggcccatgatgagcacatggcccagcaggaccccgggctgcccttcctcttctggttcagcgtggcctccctaatcaccctcttccacctcttcctcttcaagctcatctacaacgagtactgtgggcctggagccaagcccctcttcaggagtaaggaagatcccagtgtctgagtgaactaacagtcctgctttcagccaccatttgcacaagacacccagcactgaaagtcccgctgccaggagcaagggatcctttggaagcacccgccctttgtgccttgttgggggaaaccggtgacgcagaagtgagtgtggatacaccagagtttgcattggaaggaatgagtgtcacgtggggagggaaggggccagtggaccttttgtaagctttccactcaataaaatgaacctgtatggcaaatacttgaaatggaactcactccttccactttccccctttcttctgtcccaggaaatagatcatcttttgaaaagactcttgtctaggaaaagttgtgtccttttcctaatttaacgtgttctttcttaatgaagttttaatttatttttgttgagattttgctagatggcttttgcatcccctgtagatggtgagtgttggcggtgatgtccatctcggcgttcggaggccccacggtcccgaggctgggccggggccccccagggtggctgtgctgctgcctgtaggagggtgcgggttgtgctgtcatcctcgggtttgcacgcccttttttaggagcctgtggacatctgtggttttgtactttggggcttcaggggaggtgtttaactttctagtgattgatgattgtcaggttttgaaataccaaagcttttttgttctgtttttaaataaatatctttcaaactttca

SEQ ID NO: 146056 - DNA, 2539 bp, Homo sapiens
  Payload ID: 8964
  Gene Symbol: KIAA2013
  Gene Name: KIAA2013
  Uniprot ID: Q8IYS2
  ENST ID: ENST00000376576
  CDS Start-End: 192-2195
cgtcgtttgacggctggaggccaccgagaagaaggaggaagcaggggtggcggctgctgcggcggttgcggcgggggccggggtgggcgccgcggtccgggccgggcagtgaggcgcgggcggccgggccggtgggctgggcggcgggcccggcggccgccctcgcacccttgcccgcgcctggcggcccgatgtggctgcagcagcggctcaaggggctgccgggactgctgtcgagcagctgggcccgccgcctcctctgcctgcttggcctcctgctgctgcttctgtggtttggggggtccggcgcgcggcgggcggcgggcggcctgcacctgctgccctggtcccgcggtgagccgggcgccgccgagccgtctgcctgcctggaggcggccacccgcgcctggcgcggcctgcgggagcgcggtgaggtggtaccgctgggtcctggagtgccggccctggtggccaacggcttcctggccctggacgtggctgccaatcggctgtgggtgactcccggggagcgggagcccgccgtggcgccggactttgtgcccttcgtgcagctgcgcccgctgagcgcgctggctgaagctggagaggcggtgctgctgctgcgggaggggcttctgcgccgcgtgcgttgcctgcagctggggtccccaggtcctggccccgtggccgccggccccgggcccgcctccgtctctggccttgccgcggggtccggccgcgactgcgtgctgctgcaagaggactttctggcgcacaggggccgaccccacgtctacctgcagcgcatccagctcaacaaccccacggagcgcgtggccgcgctgcagactgtggggcccactgccggcccagcccccaaggccttcaccagtaccctggagaaggtcggagaccatcagttcctcctctactcaggccggtccccgcctacgcccactgggttggtgcacctggtggtggtggccgccaagaagctggtgaaccgcctccaagtggctcccaagacgcagctggatgagacggtgctgtgggtggtgcacgtctctggccccattaacccccaggtgctcaaaagcaaagcagccaaggagctcaaggcgctgcaggacttggcacggaaggaaatgctggagctcttggacatgccagcggcggagctgcttcaagaccaccagctcctctgggctcagctcttcagcccaggagtggaaatgaagaagatcactgacacccacacgccgtctggcctcaccgtgaacctgacgctctattacatgctctcctgctcgccagccccactgctcagcccctccctgagccacagggagcgagaccagatggagtcgacgctcaactatgaagatcactgcttcagcgggcacgccaccatgcacgccgagaacctgtggccggggcggctgtcctccgtccagcagatcctgcagctctctgacctgtggaggctgaccctccagaagcgtggctgcaaggggctggtgaaggtgggtgccccaggcatcctgcaggggatggtgctcagctttggggggctgcagttcacagagaaccacctccagttccaggccgaccccgacgtgctgcacaacagctatgcattgcatggcatccgctacaagaacgaccatatcaacctggccgtgctggcggatgccgagggcaagccctacctacacgtgtccgtggagtcccgtggccagcctgtcaagatctatgcctgcaaggcaggctgcctggacgagccagtggagctgacctcggcgcccacgggccacaccttctcggtcatggtgacacagcccatcacgccactgctctacatctccaccgacctcacacacctgcaggacctgcggcacacgctgcacctcaaggccatcctggcccatgatgagcacatggcccagcaggaccccgggctgcccttcctcttctggttcagcgtggcctccctaatcaccctcttccacctcttcctcttcaagctcatctacaacgagtactgtgggcctggagccaagcccctcttcaggagtaaggtaggaagccgccatctggtcgaaacccgaggccttggccttgctctcagccctgtgtctcggaaggggctagcctggcgagggggggtgaggcctgggcaggaatgggtgtcctgatgccctcagcccttgacaccagagagcgcgcacaagtgttttgagaggagacgacgaggaagggaaagctggaaatccaggtgtgaattgatggtcttctggctttccagggcagccctcccctcctcccgcatcataaatctcagcatttaaaaataactgcaagctgggtgtggtggcttgtgcctgtagtcccagctacttgggaggctgagatgggagaatcccttgagcccaggagtttgaggctgcagtgaactatgattgtgtcattgcactctagctggggcaacagagcaagaccctgtctcaaaaaagcaaaaaacaaaaaagcaaataaaagt

SEQ ID NO: 146057 - DNA, 2170 bp, Homo sapiens
  Payload ID: 8964
  Gene Symbol: KIAA2013
  Gene Name: KIAA2013
  Uniprot ID: Q8IYS2
  ENST ID: ENST00000616327
  CDS Start-End: 134-2038
gagaagaaggaggaagcaggggtggcggctgctgcggcggttgcggcgggggccggggtgggcgccgcggtccgggccgggcagtgaggcgcgggcggccgccctcgcacccttgcccgcgcctggcggcccgatgtggctgcagcagcggctcaaggggctgccgggactgctgtcgagcagctgggcccgccgcctcctctgcctgcttggcctcctgctgctgcttctgtggtttggggggtccggcgcgcggcgggcggcgggcggcctgcacctgctgccctggtcccgcggtgagccgggcgccgccgagccgtctgcctgcctggaggcggccacccgcgcctggcgcggcctgcgggagcgcggtgaggtggtaccgctgggtcctggagtgccggccctggtggccaacggcttcctggccctggacgtggctgccaatcggctgtgggtgactcccggggagcgggagcccgccgtggcgccggactttgtgcccttcgtgcagctgcgcccgctgagcgcgctggctgaagctggagaggcggtgctgctgctgcgggaggggcttctgcgccgcgtgcgttgcctgcagctggggtccccaggtcctggccccgtggccgccggccccgggcccgcctccgtctctggccttgccgcggggtccggccgcgactgcgtgctgctgcaagaggactttctggcgcacaggggccgaccccacgtctacctgcagcgcatccagctcaacaaccccacggagcgcgtggccgcgctgcagactgtggggcccactgccggcccagcccccaaggccttcaccagtaccctggagaaggtcggagaccatcagttcctcctctactcaggccggtccccgcctacgcccactgggttggtgcacctggtggtggtggccgccaagaagctggtgaaccgcctccaagtggctcccaagacgcagctggatgagacggtgctgtgggtggtgcacgtctctggccccattaacccccaggtgctcaaaagcaaagcagccaaggagctcaaggcgctgcaggacttggcacggaaggaaatgctggagctcttggacatgccagcggcggagctgcttcaagaccaccagctcctctgggctcagctcttcagcccaggagtggaaatgaagaagatcactgacacccacacgccgtctggcctcaccgtgaacctgacgctctattacatgctctcctgctcgccagccccactgctcagcccctccctgagccacagggagcgagaccagatggagtcgacgctcaactatgaagatcactgcttcagcgggcacgccaccatgcacgccgagaacctgtggccggggcggctgtcctccgtccagcagatcctgcagctctctgacctgtggaggctgaccctccagaagcgtggctgcaaggggctggtgaaggtgggtgccccaggcatcctgcaggggatggtgctcagctttggggggctgcagttcacagagaaccacctccagttccaggccgaccccgacgtgctgcacaacagctatgcattgcatggcatccgctacaagaacgaccatatcaacctggccgtgctggcggatgccgagggcaagccctacctacacgtgtccgtggagtcccgtggccagcctgtcaagatctatgcctgcaaggcaggctgcctggacgagccagtggagctgacctcggcgcccacgggccacaccttctcggtcatggtgacacagcccatcacgccactgctctacatctccaccgacctcacacacctgcaggacctgcggcacacgctgcacctcaaggccatcctggcccatgatgagcacatggcccagcaggaccccgggctgcccttcctcttctggttcagcgtggcctccctaatcaccctcttccacctcttcctcttcaagctcatctacaacgagtactgtgggcctggagccaagcccctcttcaggagtaaggaagatcccagtgtctgagtgaactaacagtcctgctttcagccaccatttgcacaagacacccagcactgaaagtcccgctgccaggagcaagggatcctttggaagcacccgccctttgtgccttgttgggggaaaccggtgacgcag

SEQ ID NO: 146058 - DNA, 11719 bp, Homo sapiens
  Payload ID: 8965
  Gene Symbol: KIAA2022
  Gene Name: KIAA2022
  Uniprot ID: Q5QGS0
  ENST ID: ENST00000055682
  CDS Start-End: 613-5163
cagtagcatcagcagcagcagcagcagccgccgccgccaccaccgccgccacagcagtagcattagcggcagtagcagcatttagcaatagctttaacagctatagcgacagtagcagccgccctcctctctccctctcgcggacggccgcagccaccgcacagagcgggctccaggcgccgagcgcgcagcccgctcgctaggtagctccagccggggcgagcgacagtgtaagcgaagcacggacccttggagcagccgggcagccgcggaggctctgagtttcagggccagagcccgacagctctgactccatctagcgcggcggcggcggagcctgagggagcgagcgaggagagaggcgcgtccacctggcgggcccagcgtatggagctgaggcagaggcggcggcggcggcggcagcagtagcagcggcggtggcggctaaggcagctcgaacagctgcggcgacggcgacagcccagccttgactgcgaccgcgctagctacagcgcctgctgcctgagcccgccagcgacgtgcgcctcgggagtcggcctgtgaggttggacagcatttggacttggaatgaaacaataagaggttatattcatggataaccaacaagataaggctattgttgcctcagccaacggagaaaacactctgattaatggggtcaaagaaaatgactcagaggaccaggatgtggcaatgaagtcatttgcagctctagaagctgctgcacctatccagcctacaccggtggcacaaaaagagaccctgatgtatcccagaggtctcctgcctctaccctctaagaagccctgtatgcagagcccgccctctcctttgggcctgattgaagcacccgaacatgctgctaatagtgcttctgtgaatgccatctccctcacatctggcattgcaaaaggcctgaacacatggtcacttcccaatgaatgtgagaaagctccatttgccataatggagcctgcaggcatgtcagctctgaatggggactgtctcatgcagccaagtcggacttgcttaggctgcttcatggaatccaaggatgcagtagatcctgagccagggatcagtctgaaagttggtgatctaaatagggattatgaaacgtgtgcagtctctgatatagggattcagtgtattaatgctggagaaaatatgaaatatggagagcagctgctctcagaccagctcctaggcttccccctgcataagtcaagggcaggagacagacgagaaactgagaaacctgacattgacttggaggatccggctcagaaaagctattatgaggcattactgttagacaagtgcaatacagaagaagctttgcttgcaaattccaatcaggattggggttacttcgagacttttattagtgaaagtaagattgaactgcttgacctctgttccaaaaatgagctgtctgtcaacctattctctgaagaagatgtggataactacatgtttgatgatgatgaatcaacactaggcagtgatgtctgctccctgaaaattcgatatgaatcctttcaggacaatgttcgagacaagactactcttttgatgcaggaagatgcccaattcaacttttttcccagcgtctttactacctgccccaagcgagagtctaagagtggggccctgaagcagagcagtgatttttcccaattcaaggtccctgatgtgagcatcatctggggggaggaagataaaaacttggacaagaagaaaggcaaagaggaaggacaggaagacaaaggtgtagagaagaaagatggaaaggataatggagaaaagcctgccttaaataaaccatgcagtgggactgaagtagagcaacttaagaatccaaagcagggccatcttgctaattccctggagacatcagggagtttcagtgatgatagttccttcattgagatctcatatgatgctatgggtgagatcaaggactgtagtcgctatatggctcgggacactaattctggcagctcctcctcccaacagaactatgggctgcgagccaagagaaaagtcagatacagtgaagattatctatatgatgttgactcactagagggtgaaaaagtaaatgagaggaaggaatggctgccagttggttccaaagaggaagatgatgatgaatggtgtcccaaaaagagaagaaaagtaacccgtaaggagccccctgttattatcaaatatatcatcattaatcgctttaaaggtgagaagaacatgctggtgaagttgggtaaggtggatgccagtgagacaacagtgaatttgagtgagaatcagctcaacaaatatgccaagctggcacccttgaaaggcttctggcaaaagaagaagaagcagagaaacaccaacacggactccatcaagacacctttttcccaaaagcaaagctttgaaccaggtagctttgaggtgtcatttctgccacctgctcgcaaacgaaaatctaaacttggcaacaggcacaggattcaaagaatcccatccattgaaatttcagcaagtagtaaacagatttcattatgtaatgatcagaggcacgctagtaatcataaagaagatggaggcctaaaaggtacactgaagtcagcacctctgggtgctcctagctgtgcaaatggatcacatttaaatgacatcacaggccctgactcagtgaaagtcaaagcccaagacacagagtttaaggggccagagaggaaagtgctcaataaaatcaaatttaaaagtgaagctaggttaaaatctaagaaagtcaaagctgctgggcaagaaagcaagccaattgttcaaatgagccctctcttggaaaaccaatcctcaaaggctaatttaaagaatgaagttattcctgggacatcaaacagttcccgtctatctgaatttcatgaggcaaaggctgctaagagttccacttttctaccaacgacatgctcttctgaaatgcctttatcatctgctaatgttaccactaatatacctgttatcccgggagggtatctgcagacattgttagatgcttctgacttgtcaaataacactagtatctcatacttcagccaccattctccagagcaaaatgaaggcagcctcactcaaaccgaaaaatcatttgtacccctccagcctacccaggactgtgtgctcacctcatcctctgactctgagctgcagcagtcatctcataacttcaaaatggaatcaagcaactatagaaatgtgtggcccaacaaggctacttctggcacccaggaattcatggctgaagtctcaagggagatagccccaacccaatccagtgaatttggagcctcccaagtagtctccatggaaaataacctcacacctacaacatacaatccaatctgtctcaatagtggtggcagtaattgcaacaaggtcctgtatgactccatgcaagatacccaactcccatctgatgactcttaccaattatgtcactttaataatggagagatctgctttcctttccagcaggggccagtcaatatggatgatggtcggctctttagctttgattcaatggccccactctctgtcagctcaagtaattattgctccttaagcttgaagtcctgtgaaaaggatggcgatgatgatatcactgatgacttcctggcccattgcagccctaagctggtgatccagcaaagcattgatgagatagcaccactaaaggagtccactgacctcctggatatatccaacttcacccctgacaaattccgccactcttccctttcagagatgtccccaccggacacccctagtctttcccctcaaattaccagatgtgagagtatgaagacactaggaacactaaaggggttccaagagggtgtcccaggaccattggacagtgtggaaaaaatcaagtgggactgcagtaccctttcacggcaggtccaaatggaggatggatttactttaaataatcaccagtttcagttccatatgttcaatgatgaggattctgtcagcctgctccaaaaaaacccttgcctgtcaacatttaatgatccatctggtcaaattagtaccaacaacaaagtgtcaaaatcaagaaagaaaagttcacccagcaagagtggggctatgaaccaaagctcttctcagaaaaacaccaggaaaaaatccctcaaaggtaacaacaaggggattgaaaaaccacctggcaaaaactcccgccaggtccctaagtccacaaagaaagggaaatacatggctgccatcaatggagagaaaatgcaaattggcattggccgtgggggaagccaaaccaacaccatatcctccactgggaagacattggctgaatgtatccaacatggtggccctatggcctctatgaagatgccaagtcaaaagggactttctggagattgggccttggggaaggagagcagcccaggctggagtgatatgagcatgggcaccaacaccaacagccttctggatgatgaccaacgggaatttcaggagccttcctatatcttgtccaacattgcctctggtatggcagatgtgcagagattcatgatggcctccatagagcccctttgggaacccatggagcaccatggggatcccaacatattctactcccctgagtccaatagtctaaaattaaaaaccctcaaaatattggctgggacaccacaggagtctaagaaaaagatcaacagtgggtcccaaggagccactaagaatcacaggtcaatcaagggtgtgagcaaaagcaatgggaaaacagcaataggtgatcctggtcgtgcaaacatgcctggttataacgaggactctcgctctaccttctttgataaaaagtatagtaacatgagcactttaggcaataacggaccgacacacaaaaagttgtatcgtcacaaatccagctccaaggccctgagagatgagaaatgtaagggaaagcacatggagcgagaacaggtccacaaggatgagtctgggacagcttcttttgaaaaactgagggattccgactacaatctcctaaaagcagaaacaaccttttgggttttacctgtgtttgaagaagagactcgcattttccagaaagacatttgatgtttgtgttttatttctttcaaaatatgccttgtggtatgtatgttgacatgtaagtgcttaaagaaaagaattttaaattgtgggaatacgtctttggagcaaactttaatctcatgttctatgtaaaagacttaaaaagtcatacagttgcacaagtagtttatgcactatttacccacaaggaaaaaattgaaaacattgtgccaaactacaaacaagtgactgtactgtatatatttttacttctatatcaacatttggttgtatttggggaagttgtccctgttaatttactagaaacattccagtgattcttgctattaaccacccccacttatgtggatagcacctgtagatcatggtggaaaaatatgttgtgttacacaatttaccaaaattaaaggatactgtttgaaatgtgccaaattttcttacctcatctcacagattcacccacagtttaaagctcattaattatttttaaatggatatatacacacccaaacatatatatgtatatgtttgtgtgtgtgtgtgtgtgtgtatatatatgtatatatatatatacacacacacacgttcttttaaagttttagactctactgtcctgtgtggaaacatgaacagctaaacaaggcaaaataaagattttcttgttccattgtgtaagggttaaaattttggaaaagtctgaaggccacaacagctaagtccatcagggacccaagtatatgcatttacagaacgttttacaaggaaacaaaacagctgctttcaaagtttgttttctaaaagcaaaatctgtagctgaaaattatttaaagtgcaaagttatattgctgatactttatatctcagttttatatattttataatagtctgggataaattataaaaatagctataaaatcaacactaatgataaatgaagtatatagaatgcttttatttaaatagtttcctaaatgttttattccagttttgtcaaaagtgcactcatatcatggctttagtgttctttcagtgtttaatcttgcaatgccaatgtcatttaaagaaaatgttaaggcatcccagttcaaccaaatttttcttcttatgagtaaagtacatttactatcagataagatgaacaatttgtggcaacaactgatttgggccatatacccttagtctgaggataaccaatatttgatgccacacactaaacttaaatctcaattttaagtacaaatttttaaatcacattttttattcagtactccccctactttttaaaaaaaatttcacagccccaacattcctcactactactttttcttcccttttattcaccacttgacttctaacatttgatctcttttctttgcacaattgaaggcctgtgcatctgatgactgatgcattatggcacagatgagataatggatgtgagagcgctttgtagatcataaagtgctatacagatataggggattaatattattaatattgttagttgttgtcgttgttactattcttattaatattgttactaacctattaacttgtgaatatataggctggggtgggagggtggagaataagtgggaagggaaaaaggggatttaacaaaaaaagggaagatgtttcaaaaggaaaattttaagcaaaatatgaacctacctagtcaatgccacctaaatgtattcacaaacagagaagcaacatttgaaagtagtcagagagaaatggaaggaagcctgtcatgtatataagtatatacacttcccggtccatgattcctttcaccagcctgctctattccttacagctgggtcgtaaaatgaacaagcctgtgttcttgatcatgtgtgttcccagcgtcagtctcttgtgtctgtggggatgagtgggtgaggagcattctgtgaggctggtacaggcccattcctaggctttaatgctctgtttgcagtgagccctggaaaattacttagtggaaaggcaccagatgaaacatgtctcctgccccatagctaccattcaaaagggaaaataaccaaactggaaaaccttcttctatttctctattctgatagctagctgtactaaatgctatggccagtccctagaaactggtctttgttttgtttttgtttttgtttttgatttttctgttttgcagctgaattttggcttggaatcaccaactctgcctgtattgtgatccccaagactccagacctcagagtcacctgctggcttagaggagtggagtgctttctatgtaatgaaaaggtggcaattaatgaaaaaataaagaaaatgttccattaatacaatgtgtttttataaaagtaaatatgggagcagttgtcccagttttttttcggtatcagttcagctttggagaatggggtgtgagtggggtaggacagcctgaaactgttggaaacaatttccttgtgagaacttgctatcataagtcctttggaatggatattctttcagttgctcctatggagcccattaagggccaattctagggcatagttcatccctttctccaaagagaattgttattttaaagtacctttttaattggcctgcagtgtattatatgtttttaatatataaattagtgacgcataaccagtcactttgtactgaaacataaaaagaaacagagtttgagaaatgagcaataggccgaggcagaagatgtttattctcttaattgcatttaatattcctctcagtacattgtgttctgagatgttcatcatttagcattttgttggtcctgtctctgctctcacagttctttttcttcctgtcataaccagctgccttagtagagtataaaaatagtgttttgccctatcactggtatctcaagtcagaaatatatattatccttggtctgaaattcctgattaccgctcccttctaaccttccccctctgagaagctgtttcctattaatgcctccctaacagagtcccatttaatctttactttcctggaaatggtaacctcccttattcttcttacttaatctcagaccttggtcttagaatttttcttttatggtctcatatcccacctgcccaaattgtcagggctcaacaatcttaggctgctttcttctggaagttcagaaggaaaccttcccattcttaattgcctttaattgctttggctattttcaaatctaattttttaattaaattttttttaatttttatagagtaggggtacaaggacagttgtgttacatggatatattgcttagtgttgaaatctgggcttttagtgtacccatcaccgaaatagtgtacattgtacccaataggtggtatttcatccctcaaatataattttaaacacacactcgtgcccacatggacaaattatatcacatgactgaggaaacttagaaattccttttccctgaagatctgttaagaataggtctcatctcctgccctggttaggtgctatattatatggagaagggtattgagactttgggggtcatgtttgggctgtgataactggcttgaaccagtgaccatcctttctgcctcgccaaggtctcttataccagcttcttcacatatgctgcttcctcccagctttcccttctgacttcttgttactctgcaactatgtgtcaaggccttaccttttcctgatgttttcaaacctcctgcattactttgatcatcacttcttcagccatctcactgaagtccttggtgctagctgggcttttgtgacaactttcaccttctctgaactttttccttgctgggaagcatctgcgtgtgtgagggggctacggagggaagtgtgtgtgtgtgtaagagagaggcaaaaggatgcttcaaaagctataaacaactctagcaagcatcctaagtcctatgtgaggttttgcagttctagtgaatttctgttttagtaggtttcaattagcatttactgcctaaaggagaaaaaccatatccaaggaccttttagccatgcttgctattaccaagctggaccagtgtgatgtagatccaacatgtcttcagcttacagatgctctcagaacagttccaagaattgaagagagctaagtttttatgctgaagaggagaatggagcactagctagtcctaactattgctagaaatagaaatgtttattttctcctttattattgagaaattatctaatttaaggagtaaccattttcatttagggatttttttaatgactgcccatcactacagaaatatgttctttttataaaataaaactaatgtgaggttggtttgttttctaatcataaaattcactaagcctatagttacatttagaagatttagtaccaaaatcaaacttttagtaacaaacaggaatcttgtcaacacaatgtaggccagggattttgtaaaggtttctcaaagacccaaataagggagaaaaaaattttagttgggctgtttaacttgggaaacactgtcatcagcttgagggtcctcagccagcatgtgattattttgatgacaggactcaggctaccctttaaggcacattttttactcagcattaaacactagctacagtcgtgaagcagagctcccattgcagctacatacttgagatgtactcttggtttcagaatcgtaactaagaggtaaggcattggagaaggacaatgtaaaagacagaggtttagaacaaagtttatggtgtgaatgaggctttcaaaatcagtatctgggtaaattgatactaaagacactgaagaaacactcatccacataagatggaaaggatgtctgtccatctaacaagctcaggggtttctgagtctcagaatgacatcccatttcaaaaagaagaaaagagatattgaaatcattctgcctgtttgagagatgactggttatttacagcacaaaaaaaggcttagaatgaaaactagaagaggccttttgtttttcactcccagtgaggagagtagaaatcttaagatgctctactgggctacctgtagcactgactggagtttgctgcctacagagttttgaatgtactagtccttagtttccatagaactgaatgcacctctttagtaagttgctgatttatggtgctaaagaaaatgattattcccatttttttcttcttccccaagccccttaagcatttaagaaaatttaaaataaaagcgttagaggccctttttatgaatgtaacctaagtttctgtttgacatatgacactgcaacttaaaaatgttaggaaattatttgcctttttttttcttttagagttaagctttataaataatctgtagaatcaattgaagtttaaagcttaaggatcactcttaagacgtctacaaaatcttgtatatttttaagtgtgccaatttgtaacatattttgtaagtgtatatttttcttagaaaagtgctgtgaagtgtctgtatgtgagagttttcctttttctgcaccactaggtgctaataaaaggatatttacttcaaagtttctggttttagaaaccacaatacaaagaaaaaaaatacacttttgttggaaattttgtaacacaaaacatgttgtgaaagagtgtagtgatcttgtgcaaaaaaaatgaacatttgtgagcttcttgctgttttatagattttcttgtaaattattcttgtaacacttctggttttgttgttcttgttgcgaaggtttcaaatatttgtgactgaatgtacggtgaaactgtcataatgttacctagctgagttttgttattgtttatgaaataaataaaaagaaaagtttaaaatactgctttagaatcatatgtattagaaatcaaaccatttctaattaaatctatgtcccaaataaaacgttctttatcatctagagcagtgtttctcaaactatctgtggtgagggaccaatagtttttgcaatccatcacagaccaatactattataaaacacaacaaaaatgaatttctaagaaagttaaatggaaaaaagatatgcaaaataaaagcccaaatgtattagatttaacatgtaaaattacatttcgagataaacataacataaggggaaagaaacgaattgcaaaaagttggtaccctgtttgagacaagtccactcatcaatgtcaaattgccatagaaggttctaatcatactttgaataatactttgactagaccagcagcattgccatcatctgggaacttgttaggaatgcgaaattccaagccctacaccaattctgctgaatgagaatctgaattttaacaagatccctaggtgttttgtgtgcatgttaaagtttgagaagcactgggctagagttttgtgtaggggattcttttgcccctcaaattgaggaatcatcttctagtgtgtccagtcttcaaagaccttaaaacaaattgtgtctttgttttgtgatccagatggaatctgcagagatgcagtcctctcaaagtgttaaagctgtttattgaaagtaataaatgctgatttgcctggtacccaaaa

SEQ ID NO: 146059 - DNA, 508 bp, Homo sapiens
  Payload ID: 8965
  Gene Symbol: KIAA2022
  Gene Name: KIAA2022
  ENST ID: ENST00000424929
  CDS Start-End: 1-355
caaaagcaatgggaaaacagcaataggtgatcctggtcgtgcaaacatgcctggttataacgaggactctcgctctaccttctttgataaaaagtatagtaacatgagcactttaggcaataacggaccgacacacaaaaagttgtatcgtcacaaatccagctccaaggccctgagagatgagaaatgtaagggaaagcacatggagcgagaacaggtccacaaggatgagtctgggacagcttcttttgaaaaactgagggattccgactacaatctcctaaaagcagaaacaaccttttgggttttacctgtgtttgaagaagagactcgcattttccagaaagacatttgatgtttgtgttttatttctttcaaaatatgccttgtgctgaattttggcttggaatcaccaactctgcctgtattgtgatccccaagactccagacctcagagtcacctgctggcttagaggagtggagtgctttctatgtaatgaaaaggtgg

SEQ ID NO: 146060 - DNA, 10624 bp, Homo sapiens
  Payload ID: 8965
  Gene Symbol: KIAA2022
  Gene Name: KIAA2022
  Uniprot ID: Q5QGS0
  ENST ID: ENST00000616200
  CDS Start-End: 246-4796
ggggggacgaggcaggggaagaacctgggaaggaaaaccagtagcatcagcagcagcagtagcagcggcggtggcggctaaggcagctcgaacagctgcggcgacggcgacagcccagccttgactgcgaccgcgctagctacagcgcctgctgcctgagcccgccagcgacgtgcgcctcgggagtcggcctgtgaggttggacagcatttggacttggaatgaaacaataagaggttatattcatggataaccaacaagataaggctattgttgcctcagccaacggagaaaacactctgattaatggggtcaaagaaaatgactcagaggaccaggatgtggcaatgaagtcatttgcagctctagaagctgctgcacctatccagcctacaccggtggcacaaaaagagaccctgatgtatcccagaggtctcctgcctctaccctctaagaagccctgtatgcagagcccgccctctcctttgggcctgattgaagcacccgaacatgctgctaatagtgcttctgtgaatgccatctccctcacatctggcattgcaaaaggcctgaacacatggtcacttcccaatgaatgtgagaaagctccatttgccataatggagcctgcaggcatgtcagctctgaatggggactgtctcatgcagccaagtcggacttgcttaggctgcttcatggaatccaaggatgcagtagatcctgagccagggatcagtctgaaagttggtgatctaaatagggattatgaaacgtgtgcagtctctgatatagggattcagtgtattaatgctggagaaaatatgaaatatggagagcagctgctctcagaccagctcctaggcttccccctgcataagtcaagggcaggagacagacgagaaactgagaaacctgacattgacttggaggatccggctcagaaaagctattatgaggcattactgttagacaagtgcaatacagaagaagctttgcttgcaaattccaatcaggattggggttacttcgagacttttattagtgaaagtaagattgaactgcttgacctctgttccaaaaatgagctgtctgtcaacctattctctgaagaagatgtggataactacatgtttgatgatgatgaatcaacactaggcagtgatgtctgctccctgaaaattcgatatgaatcctttcaggacaatgttcgagacaagactactcttttgatgcaggaagatgcccaattcaacttttttcccagcgtctttactacctgccccaagcgagagtctaagagtggggccctgaagcagagcagtgatttttcccaattcaaggtccctgatgtgagcatcatctggggggaggaagataaaaacttggacaagaagaaaggcaaagaggaaggacaggaagacaaaggtgtagagaagaaagatggaaaggataatggagaaaagcctgccttaaataaaccatgcagtgggactgaagtagagcaacttaagaatccaaagcagggccatcttgctaattccctggagacatcagggagtttcagtgatgatagttccttcattgagatctcatatgatgctatgggtgagatcaaggactgtagtcgctatatggctcgggacactaattctggcagctcctcctcccaacagaactatgggctgcgagccaagagaaaagtcagatacagtgaagattatctatatgatgttgactcactagagggtgaaaaagtaaatgagaggaaggaatggctgccagttggttccaaagaggaagatgatgatgaatggtgtcccaaaaagagaagaaaagtaacccgtaaggagccccctgttattatcaaatatatcatcattaatcgctttaaaggtgagaagaacatgctggtgaagttgggtaaggtggatgccagtgagacaacagtgaatttgagtgagaatcagctcaacaaatatgccaagctggcacccttgaaaggcttctggcaaaagaagaagaagcagagaaacaccaacacggactccatcaagacacctttttcccaaaagcaaagctttgaaccaggtagctttgaggtgtcatttctgccacctgctcgcaaacgaaaatctaaacttggcaacaggcacaggattcaaagaatcccatccattgaaatttcagcaagtagtaaacagatttcattatgtaatgatcagaggcacgctagtaatcataaagaagatggaggcctaaaaggtacactgaagtcagcacctctgggtgctcctagctgtgcaaatggatcacatttaaatgacatcacaggccctgactcagtgaaagtcaaagcccaagacacagagtttaaggggccagagaggaaagtgctcaataaaatcaaatttaaaagtgaagctaggttaaaatctaagaaagtcaaagctgctgggcaagaaagcaagccaattgttcaaatgagccctctcttggaaaaccaatcctcaaaggctaatttaaagaatgaagttattcctgggacatcaaacagttcccgtctatctgaatttcatgaggcaaaggctgctaagagttccacttttctaccaacgacatgctcttctgaaatgcctttatcatctgctaatgttaccactaatatacctgttatcccgggagggtatctgcagacattgttagatgcttctgacttgtcaaataacactagtatctcatacttcagccaccattctccagagcaaaatgaaggcagcctcactcaaaccgaaaaatcatttgtacccctccagcctacccaggactgtgtgctcacctcatcctctgactctgagctgcagcagtcatctcataacttcaaaatggaatcaagcaactatagaaatgtgtggcccaacaaggctacttctggcacccaggaattcatggctgaagtctcaagggagatagccccaacccaatccagtgaatttggagcctcccaagtagtctccatggaaaataacctcacacctacaacatacaatccaatctgtctcaatagtggtggcagtaattgcaacaaggtcctgtatgactccatgcaagatacccaactcccatctgatgactcttaccaattatgtcactttaataatggagagatctgctttcctttccagcaggggccagtcaatatggatgatggtcggctctttagctttgattcaatggccccactctctgtcagctcaagtaattattgctccttaagcttgaagtcctgtgaaaaggatggcgatgatgatatcactgatgacttcctggcccattgcagccctaagctggtgatccagcaaagcattgatgagatagcaccactaaaggagtccactgacctcctggatatatccaacttcacccctgacaaattccgccactcttccctttcagagatgtccccaccggacacccctagtctttcccctcaaattaccagatgtgagagtatgaagacactaggaacactaaaggggttccaagagggtgtcccaggaccattggacagtgtggaaaaaatcaagtgggactgcagtaccctttcacggcaggtccaaatggaggatggatttactttaaataatcaccagtttcagttccatatgttcaatgatgaggattctgtcagcctgctccaaaaaaacccttgcctgtcaacatttaatgatccatctggtcaaattagtaccaacaacaaagtgtcaaaatcaagaaagaaaagttcacccagcaagagtggggctatgaaccaaagctcttctcagaaaaacaccaggaaaaaatccctcaaaggtaacaacaaggggattgaaaaaccacctggcaaaaactcccgccaggtccctaagtccacaaagaaagggaaatacatggctgccatcaatggagagaaaatgcaaattggcattggccgtgggggaagccaaaccaacaccatatcctccactgggaagacattggctgaatgtatccaacatggtggccctatggcctctatgaagatgccaagtcaaaagggactttctggagattgggccttggggaaggagagcagcccaggctggagtgatatgagcatgggcaccaacaccaacagccttctggatgatgaccaacgggaatttcaggagccttcctatatcttgtccaacattgcctctggtatggcagatgtgcagagattcatgatggcctccatagagcccctttgggaacccatggagcaccatggggatcccaacatattctactcccctgagtccaatagtctaaaattaaaaaccctcaaaatattggctgggacaccacaggagtctaagaaaaagatcaacagtgggtcccaaggagccactaagaatcacaggtcaatcaagggtgtgagcaaaagcaatgggaaaacagcaataggtgatcctggtcgtgcaaacatgcctggttataacgaggactctcgctctaccttctttgataaaaagtatagtaacatgagcactttaggcaataacggaccgacacacaaaaagttgtatcgtcacaaatccagctccaaggccctgagagatgagaaatgtaagggaaagcacatggagcgagaacaggtccacaaggatgagtctgggacagcttcttttgaaaaactgagggattccgactacaatctcctaaaagcagaaacaaccttttgggttttacctgtgtttgaagaagagactcgcattttccagaaagacatttgatgtttgtgttttatttctttcaaaatatgccttgtggtatgtatgttgacatgtaagtgcttaaagaaaagaattttaaattgtgggaatacgtctttggagcaaactttaatctcatgttctatgtaaaagacttaaaaagtcatacagttgcacaagtagtttatgcactatttacccacaaggaaaaaattgaaaacattgtgccaaactacaaacaagtgactgtactgtatatatttttacttctatatcaacatttggttgtatttggggaagttgtccctgttaatttactagaaacattccagtgattcttgctattaaccacccccacttatgtggatagcacctgtagatcatggtggaaaaatatgttgtgttacacaatttaccaaaattaaaggatactgtttgaaatgtgccaaattttcttacctcatctcacagattcacccacagtttaaagctcattaattatttttaaatggatatatacacacccaaacatatatatgtatatgtttgtgtgtgtgtgtgtgtgtgtatatatatgtatatatatatatacacacacacacgttcttttaaagttttagactctactgtcctgtgtggaaacatgaacagctaaacaaggcaaaataaagattttcttgttccattgtgtaagggttaaaattttggaaaagtctgaaggccacaacagctaagtccatcagggacccaagtatatgcatttacagaacgttttacaaggaaacaaaacagctgctttcaaagtttgttttctaaaagcaaaatctgtagctgaaaattatttaaagtgcaaagttatattgctgatactttatatctcagttttatatattttataatagtctgggataaattataaaaatagctataaaatcaacactaatgataaatgaagtatatagaatgcttttatttaaatagtttcctaaatgttttattccagttttgtcaaaagtgcactcatatcatggctttagtgttctttcagtgtttaatcttgcaatgccaatgtcatttaaagaaaatgttaaggcatcccagttcaaccaaatttttcttcttatgagtaaagtacatttactatcagataagatgaacaatttgtggcaacaactgatttgggccatatacccttagtctgaggataaccaatatttgatgccacacactaaacttaaatctcaattttaagtacaaatttttaaatcacattttttattcagtactccccctactttttaaaaaaaatttcacagccccaacattcctcactactactttttcttcccttttattcaccacttgacttctaacatttgatctcttttctttgcacaattgaaggcctgtgcatctgatgactgatgcattatggcacagatgagataatggatgtgagagcgctttgtagatcataaagtgctatacagatataggggattaatattattaatattgttagttgttgtcgttgttactattcttattaatattgttactaacctattaacttgtgaatatataggctggggtgggagggtggagaataagtgggaagggaaaaaggggatttaacaaaaaaagggaagatgtttcaaaaggaaaattttaagcaaaatatgaacctacctagtcaatgccacctaaatgtattcacaaacagagaagcaacatttgaaagtagtcagagagaaatggaaggaagcctgtcatgtatataagtatatacacttcccggtccatgattcctttcaccagcctgctctattccttacagctgggtcgtaaaatgaacaagcctgtgttcttgatcatgtgtgttcccagcgtcagtctcttgtgtctgtggggatgagtgggtgaggagcattctgtgaggctggtacaggcccattcctaggctttaatgctctgtttgcagtgagccctggaaaattacttagtggaaaggcaccagatgaaacatgtctcctgccccatagctaccattcaaaagggaaaataaccaaactggaaaaccttcttctatttctctattctgatagctagctgtactaaatgctatggccagtccctagaaactggtctttgttttgtttttgtttttgtttttgatttttctgttttgcagctgaattttggcttggaatcaccaactctgcctgtattgtgatccccaagactccagacctcagagtcacctgctggcttagaggagtggagtgctttctatgtaatgaaaaggtggcaattaatgaaaaaataaagaaaatgttccattaatacaatgtgtttttataaaagtaaatatgggagcagttgtcccagttttttttcggtatcagttcagctttggagaatggggtgtgagtggggtaggacagcctgaaactgttggaaacaatttccttgtgagaacttgctatcataagtcctttggaatggatattctttcagttgctcctatggagcccattaagggccaattctagggcatagttcatccctttctccaaagagaattgttattttaaagtacctttttaattggcctgcagtgtattatatgtttttaatatataaattagtgacgcataaccagtcactttgtactgaaacataaaaagaaacagagtttgagaaatgagcaataggccgaggcagaagatgtttattctcttaattgcatttaatattcctctcagtacattgtgttctgagatgttcatcatttagcattttgttggtcctgtctctgctctcacagttctttttcttcctgtcataaccagctgccttagtagagtataaaaatagtgttttgccctatcactggtatctcaagtcagaaatatatattatccttggtctgaaattcctgattaccgctcccttctaaccttccccctctgagaagctgtttcctattaatgcctccctaacagagtcccatttaatctttactttcctggaaatggtaacctcccttattcttcttacttaatctcagaccttggtcttagaatttttcttttatggtctcatatcccacctgcccaaattgtcagggctcaacaatcttaggctgctttcttctggaagttcagaaggaaaccttcccattcttaattgcctttaattgctttggctattttcaaatctaattttttaattaaattttttttaatttttatagagtaggggtacaaggacagttgtgttacatggatatattgcttagtgttgaaatctgggcttttagtgtacccatcaccgaaatagtgtacattgtacccaataggtggtatttcatccctcaaatataattttaaacacacactcgtgcccacatggacaaattatatcacatgactgaggaaacttagaaattccttttccctgaagatctgttaagaataggtctcatctcctgccctggttaggtgctatattatatggagaagggtattgagactttgggggtcatgtttgggctgtgataactggcttgaaccagtgaccatcctttctgcctcgccaaggtctcttataccagcttcttcacatatgctgcttcctcccagctttcccttctgacttcttgttactctgcaactatgtgtcaaggccttaccttttcctgatgttttcaaacctcctgcattactttgatcatcacttcttcagccatctcactgaagtccttggtgctagctgggcttttgtgacaactttcaccttctctgaactttttccttgctgggaagcatctgcgtgtgtgagggggctacggagggaagtgtgtgtgtgtgtaagagagaggcaaaaggatgcttcaaaagctataaacaactctagcaagcatcctaagtcctatgtgaggttttgcagttctagtgaatttctgttttagtaggtttcaattagcatttactgcctaaaggagaaaaaccatatccaaggaccttttagccatgcttgctattaccaagctggaccagtgtgatgtagatccaacatgtcttcagcttacagatgctctcagaacagttccaagaattgaagagagctaagtttttatgctgaagaggagaatggagcactagctagtcctaactattgctagaaatagaaatgtttattttctcctttattattgagaaattatctaatttaaggagtaaccattttcatttagggatttttttaatgactgcccatcactacagaaatatgttctttttataaaataaaactaatgtgaggttggtttgttttctaatcataaaattcactaagcctatagttacatttagaagatttagtaccaaaatcaaacttttagtaacaaacaggaatcttgtcaacacaatgtaggccagggattttgtaaaggtttctcaaagacccaaataagggagaaaaaaattttagttgggctgtttaacttgggaaacactgtcatcagcttgagggtcctcagccagcatgtgattattttgatgacaggactcaggctaccctttaaggcacattttttactcagcattaaacactagctacagtcgtgaagcagagctcccattgcagctacatacttgagatgtactcttggtttcagaatcgtaactaagaggtaaggcattggagaaggacaatgtaaaagacagaggtttagaacaaagtttatggtgtgaatgaggctttcaaaatcagtatctgggtaaattgatactaaagacactgaagaaacactcatccacataagatggaaaggatgtctgtccatctaacaagctcaggggtttctgagtctcagaatgacatcccatttcaaaaagaagaaaagagatattgaaatcattctgcctgtttgagagatgactggttatttacagcacaaaaaaaggcttagaatgaaaactagaagaggccttttgtttttcactcccagtgaggagagtagaaatcttaagatgctctactgggctacctgtagcactgactggagtttgctgcctacagagttttgaatgtactagtccttagtttccatagaactgaatgcacctctttagtaagttgctgatttatggtgctaaagaaaatgattattcccatttttttcttcttccccaagccccttaagcatttaagaaaatttaaaataaaagcgttagaggccctttttatgaatgtaacctaagtttctgtttgacatatgacactgcaacttaaaaatgttaggaaattatttgcctttttttttcttttagagttaagctttataaataatctgtagaatcaattgaagtttaaagcttaaggatcactcttaagacgtctacaaaatcttgtatatttttaagtgtgccaatttgtaacatattttgtaagtgtatatttttcttagaaaagtgctgtgaagtgtctgtatgtgagagttttcctttttctgcaccactaggtgctaataaaaggatatttacttcaaagtttctggttttagaaaccacaatacaaagaaaaaaaatacacttttgttggaaattttgtaacacaaaacatgttgtgaaagagtgtagtgatcttgtgcaaaaaaaatgaacatttgtgagcttcttgctgttttatagattttcttgtaaattattcttgtaacacttctggttttgttgttcttgttgcgaaggtttcaaatatttgtgactgaatgtacggtgaaactgtcataatgttacctagctgagttttgttattgtttatgaaataaataaaaagaaaagttt

SEQ ID NO: 146061 - DNA, 6884 bp, Homo sapiens
  Payload ID: 8966
  Gene Symbol: KIAA2026
  Gene Name: KIAA2026
  Uniprot ID: Q5HYC2
  ENST ID: ENST00000381461
  CDS Start-End: 1-6222
atgagtgtgcccgggacgccgggagcgatggagccggctggggaggaagagcggccgccaccggcggccgaaggagaggacgacgaggaggaggtggcagcggcggcccagacctcagggccggcccacggaaggagtgcctcctcgctggaggacgcggacgatcaggaggaagagatggaggcgatggtgatcggaggcggttgctgcaaggagcaggagctgacctacgagctacagcagggctaccgcatcctgggcgagttcctgcaggagaagcaccggggcctcaccgccccctttctgcagcccttggggggcgttgccaccgcggaggaggaggtggcggaagggccgcgcagcgggggccggggcggtcgcgccttcccgcagcagcccggacagggcatgtgtctgctgcagatggaagagaagttcgccagcggccagtacgggggcatcaccgagttcgtggcggacttcaggttgatgctggagacgtgctaccgcctgcacggagtggaccactggatctccaaacagggccagaagctggagatgatgctggagcagaagttagcgcttctctctcggcacttgagagaaaagacaacgatagcagttacatctagaggctattatggattggaggatgagaagggaactgcatgtacctcaacaaggcgtcggtcaacaccgcgaagtttggcaggcttgacaagtggagtttttgaatctataatggttcaagttttgagacaggaagaacagctgagagcaaaagaagaaaaaaggcttcgggagcaggaaagaaaagaagcagaagaagctagtcaaaaggaaatagaagaatgggaaagaaaacttctagctcaagcagctccaacttgtatggagaccatgtgggaaattccagctattgggcatttcctttgtttagctcagcaaattctaaatttgccagaaatagtcttttacgaattggaacgttgtcttctgatgcctcagtgtaatgcttttctatcgaaaataatgacttctctattaagtcctccccatcgcagacctaccttacatcgaagacctactttgccttataggacctgggaagcagcgctgaggcagaaagtacaacagtggtacactgctgtagggcaaactgaaaatcctgataactgtgctgaaaaactggggttgtgtcctcagttttttaaagttcttggagaagttaatccattggaagaaaaaccttttcacgaactacctttttaccaaaaagtgtggctacttaagggtctttgtgactttgtgtatgaaacacaaaaggaagttcaagatgctgtacttggacagcctatccatgaatgcagggaagttattcttggttatgattatttggagaatgcttatgtacattttccacagttctgtggtgcagatgtacggatttataaacagagaccctttcaggccccagaatttccaattccacccattaaaatacaaagagtacctcggattaaattggagaaattgaagtgtgactatgttagtacaagtaatggagaacatagatgtagcagagatagcctgccctcttccttcaagaaagagcaggaaaataattttgatccagcttgctgtcctgctaaaatgatcttggataatcatgacatctctgttgaaatgggagtaaaatccaactatgaaattagaattcgcaggccttgtgaaattaaaaaaactgattgttgtaaagaaaatttagagaaaccaaggagtccaggggaagttactggctttggagagcctcttagtccaggtgaaataaggtttatagaaaatcaggaaaaatacggtgaagcttccagaataaagattgaacccagtccattaaaagaaaatactctaaaatcttgccaaatacatgtaaatggaagtcacagtgatcatccagaaattaactgccacaaagttgtaagggatattctattagagcagtcactacagagccacaagaaactcaaactaactaaaatgagggcaaaaaagaagaaaaagaaaaaaaagaaattgaaagatgttttgaatgaaaacttacagagaaagcgtgaaggtcttcattctcttgcattcaagtcttacaaacctgagatccagaataagttattgatcatcaaaaaaaaagcaaaacacaagaagcacaaatctggaaaaaaatccgtctctaaaaaagcaatcacaaagaagaggaaaactgtcataaagtcacctactgtaccagagtttcagggaaaatggtatcatcggaggcaagctgtaaaagaattacatagtacattgatacgtcttttaaatgaattgctgccatgggaaccaaagttaatgaaggctttccaaagaaacaggagccgcctgaagaaagactatgatgatttcagaagacaacctgatcatgatacatttaatagagaactatggaccactgatgaaggtgaaggagatcttggaaaagactctcctaagggagaaatcagtaagtctatagactcaacagaacctctggatatcctggagaaagatcactttgattcagatgatatgaagttgtcagaaatagattttcctatggctagaagcaagctgttgaaaaaggaattgccttcaaaagacttaccgaagacactgcttaaaacacttaaacgacagtccaaacaaactgattatgtggatgacagcacaaaagagctttctccaaggaagaaggcaaagttaagcacaaatgagacaacagttgagaatctagaaagtgatgtgcagattgactgtttcagtgaatcaaagcatacagagccatcatttccagagtcatttgcctcattggattcagtaccagtgtctactctccagaaagggaccaaacccattcaggctttgcttgcaaagaatattgggaataaagtgaccttaacaaatcaactgcctccttccacaggtagaaatgctcttgctgtggaaaaaccagttttatctcctccggaagcaagcccgataaagccagcattgacctgccacaccaatacaaaaggtcctttacaaatggtatacaaaatgccctgtggccagtggttgccaatagatcttcaaaatagctctgtaaagattcaggtgcagcctatggtggatcctaaaacaggagaaaaaatcatgcagcaagttcttattctgcctaagaattttgtgattcagcataaagaaggaaaagcagttgcaaaagaagtgccaccacttcaacagaaaggtacagaacaacattgttcatctttcccacagacaacaaatataaattcttctttagcatcagtttttgtcaactcaccaggaactgtttctacccaactaccaaatacagctttcaacaaaacaattacacctttatcaaatataagtagtgctagaccacagcctttgtcgcctgtaacctctgtaagtaacttattaacaccatcagttaagactagccagagtgaggcaggaaaagccaagaatgcagtttcagcagccacattctccttgcccagtgcttcaccgaccatttcctccacaggtcagcctctgtcatcaacaacaacactaaatgggtctacaaatcctggtagttccttcaactgttttgcacaacagactgctgattcttctgaagcaaagcaagagctgaaaactgtgtgcataagagattcacagtcaattcttgttaggacacgaggtgggaacactggagttgtaaaagtacagaccaacccagatcaaaattcacccaatactgtatcttcaagttcagttttcacttttgctcctcagctgcaggcatttctggtgccaaaatcaacaacttcttcctctgctttttcacctgtagctggaacaactactacatctagtctttcaccttttagccaaacaccaacttctgtttccattccagctagctttgccccatccatggggaaaaatctcaaacttacattaggccacaccactggcagtggtgatttgggccacgtgatagataaaacttcacacatgccctcttctcccttgaagtcctctatttgttctagtactctactaccatcaacaacaagtagttcggtaagtgtaattagcatatcagcagcaaattttggacaaaacaatgcaaatattattcatactccaactaaacagcaacaagtagattatatcacaaaaagttaccctgttacaaggtcagaagcaacagcagcaacaaatggagatgtaatcagtgggactccagttcagaaacttatgctggtatcagctccatctattctttcttctggcaatggaactgcaattaatatgacacctgcgctgacatctacaggtgtttctgcccagaaattagtttttattaatgccccagttcctagtggtacatcaaccccaactcttgttgcagaatcattaaaacaaactcttcctcctccattgcataaagcatatgttaagactccagagcaaccccaaatagtactgattccgtctacagtgggcacaccaataaaaataaattcatcaccagctgtgtctcagataaaggatgtgaaaattggactaaacataggtcaagcaattgtaaatacttcaggcactgtgccagctataccatcaattaacatattacaaaatgtaaccccaaaaggagaagacaaaagtagcaagggctatattttgccattgtcaacaagtggtaattcagttccagtaagctcaaattttgtgagtcagaatattacccctgttaatgaatcagtggtttcttcagcaagagcagtaaatgtgctttcagttaccggagcaaatttatctttgggttcctttccagtgacctcagcctctgcttcagctggggcacaacctcctgttttagtcagtggaaatgatacctcttcaagaattatgcctattttgtcaaatagactttgctcatcaagtctcggaaacactgtggctatatcaactgtgaaaacaggacaccttgcatcatctgttctgatttcaactacacaaccagtagtgtctcctaaatgtttaacatcagctttgcaaattcctgttacggttgccttacctacacctgcgactacatcccctaaaataataaacacagttccacattcggcagcagtaccaggagccacacgttctgtatctatttctaaaagacaatctcggacttcactccagttccattcaccagggatttcaactacagtgccaacaaatgtaaacacaaataaacctcaaactgaattgtcgtccctttcaacaagtccaggtaaaataactaatacgtccaattttgcttctctgccaaatcagcaagctttagtaaaaacccccagttacagttctgctccaggtggcactaccattcacacggcttcggcaccatccaatgtaactagtctagtcgggagtcagttcagtgaaccttgtattcagcaaaaaatagtcatcaataccagtacacctttggcacctggtactcagattatgattaacggaacccggtttattgttccaccacaaggtcttggagctggcagccatgttctccttatatctactaatccaaaatatggagcccccttagttcttaacagtggccaaggcattcaatctacaccaatagataactctgcccagaagatcacactagcatcaaataattccttaagtggccaacctctacaacatcctctaagaagccctacaaaatttataaactcttttgggaatgcaagttctatacccacagtacatacatcaccacaactcataaacacaactgctaaggttcctgttccacctcctgtaccaacagtatcactgacttcagtaattaagtctccagctactcttttggctaagacatctttggtttctgccatttgccccagtaatcctccactgccaagtagcacttcagtgtttcatttggacccacctgtcaaaaaattgttggttagcccagaaggagccattttgaataccataaatactccagcatctaaggtttcttcactctctccatctctctctcagattgttgtatctgccagtcgaagtcctgcgtctgtcttccctgcttttcagtcgtcgggcttagagaagcctgacagagctgcatcttgaatttagactaaaagagccagtttttaaataatggggcattgttttgactcccataaaaattttcaatgtttattatactgttgaaagcatactatacattgtgtgtgtgtgtgtgtgtgtgtgtgtgtgtgtgtgtgtgttttaatgtatcttttcattagcttgcaacaaggctttgttttcttggggagggaaagatctgttccatttcacttactgttctgaggagggtttcaaggttctgtgtttaaagtcaggatttacctgtctgtagaacataaagtgaacaaagtttgaatagtttagagtaagctagccttttgcacatttacattgacatgtttcttcttgaatttggactgttgcagcatatctatgatatggtattcagtgtcattagtgaaatcttatttttgtttctgtaaaaaaaaaaatacatatatatatttatgcattgtgaaaaatgcagtccatgatgtaaaattgtacatattccagaatccctaacaacctgtactaaatatatgtacaaagaactatgctgtcttatttatgttttgtttacataatgtatagttttttaagtattttagtaattttggaccagtgaactgttagcaacaatgcagaagaatctgcatgtaataaactgagttgctgta

SEQ ID NO: 146062 - DNA, 6988 bp, Homo sapiens
  Payload ID: 8966
  Gene Symbol: KIAA2026
  Gene Name: KIAA2026
  Uniprot ID: Q5HYC2
  ENST ID: ENST00000399933
  CDS Start-End: 1-6312
atgagtgtgcccgggacgccgggagcgatggagccggctggggaggaagagcggccgccaccggcggccgaaggagaggacgacgaggaggaggtggcagcggcggcccagacctcagggccggcccacggaaggagtgcctcctcgctggaggacgcggacgatcaggaggaagagatggaggcgatggtgatcggaggcggttgctgcaaggagcaggagctgacctacgagctacagcagggctaccgcatcctgggcgagttcctgcaggagaagcaccggggcctcaccgccccctttctgcagcccttggggggcgttgccaccgcggaggaggaggtggcggaagggccgcgcagcgggggccggggcggtcgcgccttcccgcagcagcccggacagggcatgtgtctgctgcagatggaagagaagttcgccagcggccagtacgggggcatcaccgagttcgtggcggacttcaggttgatgctggagacgtgctaccgcctgcacggagtggaccactggatctccaaacagggccagaagctggagatgatgctggagcagaagttagcgcttctctctcggcacttgagagaaaagacaacgatagcagttacatctagaggctattatggattggaggatgagaagggaactgcatgtacctcaacaaggcgtcggtcaacaccgcgaagtttggcaggcttgacaagtggagtttttgaatctataatggttcaagttttgagacaggaagaacagctgagagcaaaagaagaaaaaaggcttcgggagcaggaaagaaaagaagcagaagaagctagtcaaaaggaaatagaagaatgggaaagaaaacttctagctcaagcagctccaacttgtatggagaccatgtgggaaattccagctattgggcatttcctttgtttagctcagcaaattctaaatttgccagaaatagtcttttacgaattggaacgttgtcttctgatgcctcagtgtaatgcttttctatcgaaaataatgacttctctattaagtcctccccatcgcagacctaccttacatcgaagacctactttgccttataggacctgggaagcagcgctgaggcagaaagtacaacagtggtacactgctgtagggcaaactgaaaatcctgataactgtgctgaaaaactggggttgtgtcctcagttttttaaagttcttggagaagttaatccattggaagaaaaaccttttcacgaactacctttttaccaaaaagtgtggctacttaagggtctttgtgactttgtgtatgaaacacaaaaggaagttcaagatgctgtacttggacagcctatccatgaatgcagggaagttattcttggttatgattatttggagaatgcttatgtacattttccacagttctgtggtgcagatgtacggatttataaacagagaccctttcaggccccagaatttccaattccacccattaaaatacaaagagtacctcggattaaattggagaaattgaagtgtgactatgttagtacaagtaatggagaacatagatgtagcagagatagcctgccctcttccttcaagaaagagcaggaaaataattttgatccagcttgctgtcctgctaaaatgatcttggataatcatgacatctctgttgaaatgggagtaaaatccaactatgaaattagaattcgcaggccttgtgaaattaaaaaaactgattgttgtaaagaaaatttagagaaaccaaggagtccaggggaagttactggctttggagagcctcttagtccaggtgaaataaggtttatagaaaatcaggaaaaatacggtgaagcttccagaataaagattgaacccagtccattaaaagaaaatactctaaaatcttgccaaatacatgtaaatggaagtcacagtgatcatccagaaattaactgccacaaagttgtaagggatattctattagagcagtcactacagagccacaagaaactcaaactaactaaaatgagggcaaaaaagaagaaaaagaaaaaaaagaaattgaaagatgttttgaatgaaaacttacagagaaagcgtgaaggtcttcattctcttgcattcaagtcttacaaacctgagatccagaataagttattgatcatcaaaaaaaaagcaaaacacaagaagcacaaatctggaaaaaaatccgtctctaaaaaagcaatcacaaagaagaggaaaactgtcataaagtcacctactgtaccagagtttcagcttatttgcactaatcttgatgaactcagggaattaatcacaaaaatcgagaatgaactcaaagatctggaaaacagtagaaaaaaatcgggaaaatggtatcatcggaggcaagctgtaaaagaattacatagtacattgatacgtcttttaaatgaattgctgccatgggaaccaaagttaatgaaggctttccaaagaaacaggagccgcctgaagaaagactatgatgatttcagaagacaacctgatcatgatacatttaatagagaactatggaccactgatgaaggtgaaggagatcttggaaaagactctcctaagggagaaatcagtaagtctatagactcaacagaacctctggatatcctggagaaagatcactttgattcagatgatatgaagttgtcagaaatagattttcctatggctagaagcaagctgttgaaaaaggaattgccttcaaaagacttaccgaagacactgcttaaaacacttaaacgacagtccaaacaaactgattatgtggatgacagcacaaaagagctttctccaaggaagaaggcaaagttaagcacaaatgagacaacagttgagaatctagaaagtgatgtgcagattgactgtttcagtgaatcaaagcatacagagccatcatttccagagtcatttgcctcattggattcagtaccagtgtctactctccagaaagggaccaaacccattcaggctttgcttgcaaagaatattgggaataaagtgaccttaacaaatcaactgcctccttccacaggtagaaatgctcttgctgtggaaaaaccagttttatctcctccggaagcaagcccgataaagccagcattgacctgccacaccaatacaaaaggtcctttacaaatggtatacaaaatgccctgtggccagtggttgccaatagatcttcaaaatagctctgtaaagattcaggtgcagcctatggtggatcctaaaacaggagaaaaaatcatgcagcaagttcttattctgcctaagaattttgtgattcagcataaagaaggaaaagcagttgcaaaagaagtgccaccacttcaacagaaaggtacagaacaacattgttcatctttcccacagacaacaaatataaattcttctttagcatcagtttttgtcaactcaccaggaactgtttctacccaactaccaaatacagctttcaacaaaacaattacacctttatcaaatataagtagtgctagaccacagcctttgtcgcctgtaacctctgtaagtaacttattaacaccatcagttaagactagccagagtgaggcaggaaaagccaagaatgcagtttcagcagccacattctccttgcccagtgcttcaccgaccatttcctccacaggtcagcctctgtcatcaacaacaacactaaatgggtctacaaatcctggtagttccttcaactgttttgcacaacagactgctgattcttctgaagcaaagcaagagctgaaaactgtgtgcataagagattcacagtcaattcttgttaggacacgaggtgggaacactggagttgtaaaagtacagaccaacccagatcaaaattcacccaatactgtatcttcaagttcagttttcacttttgctcctcagctgcaggcatttctggtgccaaaatcaacaacttcttcctctgctttttcacctgtagctggaacaactactacatctagtctttcaccttttagccaaacaccaacttctgtttccattccagctagctttgccccatccatggggaaaaatctcaaacttacattaggccacaccactggcagtggtgatttgggccacgtgatagataaaacttcacacatgccctcttctcccttgaagtcctctatttgttctagtactctactaccatcaacaacaagtagttcggtaagtgtaattagcatatcagcagcaaattttggacaaaacaatgcaaatattattcatactccaactaaacagcaacaagtagattatatcacaaaaagttaccctgttacaaggtcagaagcaacagcagcaacaaatggagatgtaatcagtgggactccagttcagaaacttatgctggtatcagctccatctattctttcttctggcaatggaactgcaattaatatgacacctgcgctgacatctacaggtgtttctgcccagaaattagtttttattaatgccccagttcctagtggtacatcaaccccaactcttgttgcagaatcattaaaacaaactcttcctcctccattgcataaagcatatgttaagactccagagcaaccccaaatagtactgattccgtctacagtgggcacaccaataaaaataaattcatcaccagctgtgtctcagataaaggatgtgaaaattggactaaacataggtcaagcaattgtaaatacttcaggcactgtgccagctataccatcaattaacatattacaaaatgtaaccccaaaaggagaagacaaaagtagcaagggctatattttgccattgtcaacaagtggtaattcagttccagtaagctcaaattttgtgagtcagaatattacccctgttaatgaatcagtggtttcttcagcaagagcagtaaatgtgctttcagttaccggagcaaatttatctttgggttcctttccagtgacctcagcctctgcttcagctggggcacaacctcctgttttagtcagtggaaatgatacctcttcaagaattatgcctattttgtcaaatagactttgctcatcaagtctcggaaacactgtggctatatcaactgtgaaaacaggacaccttgcatcatctgttctgatttcaactacacaaccagtagtgtctcctaaatgtttaacatcagctttgcaaattcctgttacggttgccttacctacacctgcgactacatcccctaaaataataaacacagttccacattcggcagcagtaccaggagccacacgttctgtatctatttctaaaagacaatctcggacttcactccagttccattcaccagggatttcaactacagtgccaacaaatgtaaacacaaataaacctcaaactgaattgtcgtccctttcaacaagtccaggtaaaataactaatacgtccaattttgcttctctgccaaatcagcaagctttagtaaaaacccccagttacagttctgctccaggtggcactaccattcacacggcttcggcaccatccaatgtaactagtctagtcgggagtcagttcagtgaaccttgtattcagcaaaaaatagtcatcaataccagtacacctttggcacctggtactcagattatgattaacggaacccggtttattgttccaccacaaggtcttggagctggcagccatgttctccttatatctactaatccaaaatatggagcccccttagttcttaacagtggccaaggcattcaatctacaccaatagataactctgcccagaagatcacactagcatcaaataattccttaagtggccaacctctacaacatcctctaagaagccctacaaaatttataaactcttttgggaatgcaagttctatacccacagtacatacatcaccacaactcataaacacaactgctaaggttcctgttccacctcctgtaccaacagtatcactgacttcagtaattaagtctccagctactcttttggctaagacatctttggtttctgccatttgccccagtaatcctccactgccaagtagcacttcagtgtttcatttggacccacctgtcaaaaaattgttggttagcccagaaggagccattttgaataccataaatactccagcatctaaggtttcttcactctctccatctctctctcagattgttgtatctgccagtcgaagtcctgcgtctgtcttccctgcttttcagtcgtcgggcttagagaagcctgacagagctgcatcttgaatttagactaaaagagccagtttttaaataatggggcattgttttgactcccataaaaattttcaatgtttattatactgttgaaagcatactatacattgtgtgtgtgtgtgtgtgtgtgtgtgtgtgtgtgtgtgtgttttaatgtatcttttcattagcttgcaacaaggctttgttttcttggggagggaaagatctgttccatttcacttactgttctgaggagggtttcaaggttctgtgtttaaagtcaggatttacctgtctgtagaacataaagtgaacaaagtttgaatagtttagagtaagctagccttttgcacatttacattgacatgtttcttcttgaatttggactgttgcagcatatctatgatatggtattcagtgtcattagtgaaatcttatttttgtttctgtaaaaaaaaaaatacatatatatatttatgcattgtgaaaaatgcagtccatgatgtaaaattgtacatattccagaatccctaacaacctgtactaaatatatgtacaaagaactatgctgtcttatttatgttttgtttacataatgtatagttttttaagtattttagtaattttggaccagtgaactgttagcaacaatgcagaagaatctgcatgtaataaactgagttgctgtatttctttgtttgaa

SEQ ID NO: 146063 - DNA, 932 bp, Homo sapiens
  Payload ID: 8966
  Gene Symbol: KIAA2026
  Gene Name: KIAA2026
  ENST ID: ENST00000436015
  CDS Start-End: 1-622
tcagaatattacccctgttaatgaatcagtggtttcttcagcaagagcagtaaatgtgctttcagttaccggagcaaatttatctttgggttcctttccagtgacctcagcctctgcttcagctggggcacaacctcctgttttagtcagtggaaatgatacctcttcaagaattatgcctattttgtcaaatagactttgctcatcaagtctcggaaacactgtggctatatcaactgtgaaaacaggacaccttgcatcatctgttctgatttcaactacacaaccagtagtgtctcctaaatgtttaacatcagctttgcaaattcctgttacggttgccttacctacacctgcgactacatcccctaaaataataaacacagttccacattcggcagcagtaccaggagccacacgttctgtatctatttctaaaagacaatctcggacttcactccagttccattcaccagggatttcaactacagtgccaacaaatgtaaacacaaataaacctcaaactgaattgtcgtccctttcaacaagtccagtgagctttctcttaagtgtgccaagctgccatccaactttcttgagcattttttctcatgggaaatgatcaagttttgatagcagaaagtgcttctttccaagactttctcgaggccatcttcctgtaggcgtcatgcttctgatgttacacagctgatattttcatatgagctgcatttttagactacaaagatgcttactcagactcagcccaagtctccatgtccatcacctgggacactgtctgaggaactctgtgaggagagccttttccacagagaaatgagagcaccctcagtatcgctctgaagacttgatgaaggtttgctgacaagaaagggcttactcactgtacacagcccttcaataactcctac

SEQ ID NO: 146064 - DNA, 4346 bp, Homo sapiens
  Payload ID: 8966
  Gene Symbol: KIAA2026
  Gene Name: KIAA2026
  ENST ID: ENST00000540714
  CDS Start-End: 1-395
ctgagatccagaataagttattgatcatcaaaaaaaaagcaaaacacaagaagcacaaatctggaaaaaaatccgtctctaaaaaagcaatcacaaagaagaggaaaactgtcataaagtcacctactgtaccagagtttcagcttatttgcactaatcttgatgaactcagggaattaatcacaaaaatcgagaatgaactcaaagatctggaaaacagtagaaaaaaatcggtatccaatgtccccagcatcagtagattgccaactccctctccttgccacactccagccagtgttatgctggtgctgtcatacccatcccagattactgtagcagaatgcagttgttctttagttgtgagggaaaatggtatcatcggaggcaagctgtaaaagaattacatagtacattgatacgtcttttaaatgaattgctgccatgggaaccaaagttaatgaaggctttccaaagaaacaggagccgcctgaagaaagactatgatgatttcagaagacaacctgatcatgatacatttaatagagaactatggaccactgatgaaggtgaaggagatcttggaaaagactctcctaagggagaaatcagtaagtctatagactcaacagaacctctggatatcctggagaaagatcactttgattcagatgatatgaagttgtcagaaatagattttcctatggctagaagcaagctgttgaaaaaggaattgccttcaaaagacttaccgaagacactgcttaaaacacttaaacgacagtccaaacaaactgattatgtggatgacagcacaaaagagctttctccaaggaagaaggcaaagttaagcacaaatgagacaacagttgagaatctagaaagtgatgtgcagattgactgtttcagtgaatcaaagcatacagagccatcatttccagagtcatttgcctcattggattcagtaccagtgtctactctccagaaagggaccaaacccattcaggctttgcttgcaaagaatattgggaataaagtgaccttaacaaatcaactgcctccttccacaggtagaaatgctcttgctgtggaaaaaccagttttatctcctccggaagcaagcccgataaagccagcattgacctgccacaccaatacaaaaggtcctttacaaatggtatacaaaatgccctgtggccagtggttgccaatagatcttcaaaatagctctgtaaagattcaggtgcagcctatggtggatcctaaaacaggagaaaaaatcatgcagcaagttcttattctgcctaagaattttgtgattcagcataaagaaggaaaagcagttgcaaaagaagtgccaccacttcaacagaaaggtacagaacaacattgttcatctttcccacagacaacaaatataaattcttctttagcatcagtttttgtcaactcaccaggaactgtttctacccaactaccaaatacagctttcaacaaaacaattacacctttatcaaatataagtagtgctagaccacagcctttgtcgcctgtaacctctgtaagtaacttattaacaccatcagttaagactagccagagtgaggcaggaaaagccaagaatgcagtttcagcagccacattctccttgcccagtgcttcaccgaccatttcctccacaggtcagcctctgtcatcaacaacaacactaaatgggtctacaaatcctggtagttccttcaactgttttgcacaacagactgctgattcttctgaagcaaagcaagagctgaaaactgtgtgcataagagattcacagtcaattcttgttaggacacgaggtgggaacactggagttgtaaaagtacagaccaacccagatcaaaattcacccaatactgtatcttcaagttcagttttcacttttgctcctcagctgcaggcatttctggtgccaaaatcaacaacttcttcctctgctttttcacctgtagctggaacaactactacatctagtctttcaccttttagccaaacaccaacttctgtttccattccagctagctttgccccatccatggggaaaaatctcaaacttacattaggccacaccactggcagtggtgatttgggccacgtgatagataaaacttcacacatgccctcttctcccttgaagtcctctatttgttctagtactctactaccatcaacaacaagtagttcggtaagtgtaattagcatatcagcagcaaattttggacaaaacaatgcaaatattattcatactccaactaaacagcaacaagtagattatatcacaaaaagttaccctgttacaaggtcagaagcaacagcagcaacaaatggagatgtaatcagtgggactccagttcagaaacttatgctggtatcagctccatctattctttcttctggcaatggaactgcaattaatatgacacctgcgctgacatctacaggtgtttctgcccagaaattagtttttattaatgccccagttcctagtggtacatcaaccccaactcttgttgcagaatcattaaaacaaactcttcctcctccattgcataaagcatatgttaagactccagagcaaccccaaatagtactgattccgtctacagtgggcacaccaataaaaataaattcatcaccagctgtgtctcagataaaggatgtgaaaattggactaaacataggtcaagcaattgtaaatacttcaggcactgtgccagctataccatcaattaacatattacaaaatgtaaccccaaaaggagaagacaaaagtagcaagggctatattttgccattgtcaacaagtggtaattcagttccagtaagctcaaattttgtgagtcagaatattacccctgttaatgaatcagtggtttcttcagcaagagcagtaaatgtgctttcagttaccggagcaaatttatctttgggttcctttccagtgacctcagcctctgcttcagctggggcacaacctcctgttttagtcagtggaaatgatacctcttcaagaattatgcctattttgtcaaatagactttgctcatcaagtctcggaaacactgtggctatatcaactgtgaaaacaggacaccttgcatcatctgttctgatttcaactacacaaccagtagtgtctcctaaatgtttaacatcagctttgcaaattcctgttacggttgccttacctacacctgcgactacatcccctaaaataataaacacagttccacattcggcagcagtaccaggagccacacgttctgtatctatttctaaaagacaatctcggacttcactccagttccattcaccagggatttcaactacagtgccaacaaatgtaaacacaaataaacctcaaactgaattgtcgtccctttcaacaagtccaggtaaaataactaatacgtccaattttgcttctctgccaaatcagcaagctttagtaaaaacccccagttacagttctgctccaggtggcactaccattcacacggcttcggcaccatccaatgtaactagtctagtcgggagtcagttcagtgaaccttgtattcagcaaaaaatagtcatcaataccagtacacctttggcacctggtactcagattatgattaacggaacccggtttattgttccaccacaaggtcttggagctggcagccatgttctccttatatctactaatccaaaatatggagcccccttagttcttaacagtggccaaggcattcaatctacaccaatagataactctgcccagaagatcacactagcatcaaataattccttaagtggccaacctctacaacatcctctaagaagccctacaaaatttataaactcttttgggaatgcaagttctatacccacagtacatacatcaccacaactcataaacacaactgctaaggttcctgttccacctcctgtaccaacagtatcactgacttcagtaattaagtctccagctactcttttggctaagacatctttggtttctgccatttgccccagtaatcctccactgccaagtagcacttcagtgtttcatttggacccacctgtcaaaaaattgttggttagcccagaaggagccattttgaataccataaatactccagcatctaaggtttcttcactctctccatctctctctcagattgttgtatctgccagtcgaagtcctgcgtctgtcttccctgcttttcagtcgtcgggcttagagaagcctgacagagctgcatcttgaatttagactaaaagagccagtttttaaataatggggcattgttttgactccc

SEQ ID NO: 146065 - DNA, 1967 bp, Homo sapiens
  Payload ID: 8966
  Gene Symbol: KIAA2026
  Gene Name: KIAA2026
  ENST ID: ENST00000513355
  CDS Start-End: 115-1967
gatgtggcgggggctacgcgccgcggccgagccgtgaggaagcggctcgcgctcacgcgtcccccagcacctcgagcggctgttccacaccgcccagcctaggcctgccggggcatgagtgtgcccgggacgccgggagcgatggagccggctggggaggaagagcggccgccaccggcggccgaaggagaggacgacgaggaggaggtggcagcggcggcccagacctcagggccggcccacggaaggagtgcctcctcgctggaggacgcggacgatcaggaggaagagatggaggcgatggtgatcggaggcggttgctgcaaggagcaggagctgacctacgagctacagcagggctaccgcatcctgggcgagttcctgcaggagaagcaccggggcctcaccgccccctttctgcagcccttggggggcgttgccaccgcggaggaggaggtggcggaagggccgcgcagcgggggccggggcggtcgcgccttcccgcagcagcccggacagggcatgtgtctgctgcagatggaagagaagttcgccagcggccagtacgggggcatcaccgagttcgtggcggacttcaggttgatgctggagacgtgctaccgcctgcacggagtggaccactggatctccaaacagggccagaagctggagatgatgctggagcagaagttagcgcttctctctcggcttcgggagcaggaaagaaaagaagcagaagaagctagtcaaaaggaaatagaagaatgggaaagaaaacttctagctcaagcagctccaacttgtatggagaccatgtgggaaattccagctattgggcatttcctttgtttagctcagcaaattctaaatttgccagaaatagtcttttacgaattggaacgttgtcttctgatgcctcagtgtaatgcttttctatcgaaaataatgacttctctattaagtcctccccatcgcagacctaccttacatcgaagacctactttgccttataggacctgggaagcagcgctgaggcagaaagtacaacagtggtacactgctgtagggcaaactgaaaatcctgataactgtgctgaaaaactggggttgtgtcctcagttttttaaagttcttggagaagttaatccattggaagaaaaaccttttcacgaactacctttttaccaaaaagtgtggctacttaagggtctttgtgactttgtgtatgaaacacaaaaggaagttcaagatgctgtacttggacagcctatccatgaatgcagggaagttattcttggttatgattatttggagaatgcttatgtacattttccacagttctgtggtgcagatgtacggatttataaacagagaccctttcaggccccagaatttccaattccacccattaaaatacaaagagtacctcggattaaattggagaaattgaagtgtgactatgttagtacaagtaatggagaacatagatgtagcagagatagcctgccctcttccttcaagaaagagcaggaaaataattttgatccagcttgctgtcctgctaaaatgatcttggataatcatgacatctctgttgaaatgggagtaaaatccaactatgaaattagaattcgcaggccttgtgaaattaaaaaaactgattgttgtaaagaaaatttagagaaaccaaggagtccaggggaagttactggctttggagagcctcttagtccaggtgaaataaggtttatagaaaatcaggaaaaatacggtgaagcttccagaataaagattgaacccagtccattaaaagaaaatactctaaaatcttgccaaatacatgtaaatggaagtcacagtgatcatccagaaattaactgccacaaagttgtaagggatattctattagagcagtcactacagagccacaagaaactcaaactaactaaaatgagggcaaaaaagaa

SEQ ID NO: 146066 - DNA, 1382 bp, Homo sapiens
  Payload ID: 8967
  Gene Symbol: KAAG1
  Gene Name: kidney associated antigen 1
  Uniprot ID: Q9UBP8
  ENST ID: ENST00000274766
  CDS Start-End: 738-992
cattatgctaacagcataaacatgcagggggtgggagcagggtcacaaaagtgagtgttgtcaattctacttggaatgaaaggttgaaataatttaaacagtacgggaaatgcagagcaattttctcctctggtgacaatatagtgtccaacacttggaagtgatttttaagaatgtttatttaaattaaaaggatggatttccaaggaaaaaaaataaggaaaaggaaagaaaaaactgaacagaaaacgcaaaagtatcagtttggtcactaacctttgcaaggatacctttttattttctttaagattcctgttgtttatacacagattttaagtttactcctactgctgacccaagtgaaattccttctccagtcacagtgtcaacctctaccccccaactgcaacgagagttttgaggggcatcaatcacaccgagaagtcacagcccctcaaccactgaggtgtgggggggtagggatctgcatttcttcatatcaaccccacactatagggcacctaaatgggtgggcggtgggggagaccgactcacttgagtttcttgaaggcttcctggcctccagccacgtaattgcccccgctctggatctggtctagcttccggattcggtggccagtccgcggggtgtagatgttcctgacggccccaaagggtgcctgaacgccgccggtcacctccttcaggaagacttcgaagctggacaccttcttctcatggatgacgacgcggcgccccgcgtagaaggggtccccgttgcggtacacaagcacgctcttcacgacgggctgagacaggtggctggacctggcgctgctgccgctcatcttccccgctggccgccgcctcagctcgctgcttcgcgtcgggaggcacctccgctgtcccagcggcctcaccgcacccagggcgcgggatcgcctcctgaaacgaacgagaaactgacgaatccacaggtgaaagagaagtaacggccgtgcgcctaggcgtccacccagaggagacactaggagcttgcaggactcggagtagacgctcaagtttttcaccgtggcgtgcacagccaatcaggacccgcagtgcgcgcaccacaccaggttcacctgctacgggcagaatcaaggtggacagcttctgagcaggagccggaaacgcgcggggccttcaaacaggcacgcctagtgagggcaggagagaggaggacgcacacacacacacacacacaaatatggtgaaacccaatttcttacatcatatctgtgctaccctttccaaacagcctaatttttcttttctctcttcttgcacctttacccctcaatctcctgcttgctcccaaattaaagcaattaagttcctgg

SEQ ID NO: 146067 - DNA, 4853 bp, Homo sapiens
  Payload ID: 8968
  Gene Symbol: KCP
  Gene Name: kielin/chordin-like protein
  ENST ID: ENST00000613019
  CDS Start-End: 44-4750
gagccgcgacgacagacggcgagccgagcgaggcggagctagcatggccggggtcggggccgctgcgctgtcccttctcctgcacctcggggccctggcgctggccgcgggcgcggaaggtggggctgtccccagggagccccctgggcagcagacaactgcccattcctcagtccttgctgggaactcccaggagcagtggcaccccctgcgagagtggctggggcgactggaggctgcagtgatggagctcagagaacagaataaggacctgcagacgagggtgaggcagctggagtcctgtgagtgccaccctgcatctccccagtgctgggggctggggcgtgcctggcccgagggggcacgctgggagcctgacgcctgcacagcctgcgtctgccaggatggggccgctcactgtggcccccaagcacacctgccccattgcaggggctgcagccaaaatggccagacctacggcaacggggagaccttctccccagatgcctgcaccacctgccgctgtctgacaggagccgtgcagtgccaggggccctcgtgttcagagctcaactgcttggagagctgcaccccacctggggagtgctgccccatctgccggcccggctgtgattatgaggggcagctttatgaggagggggtcaccttcctgtccagctccaacccttgtctacagtgcacctgcctgaggagccgagttcgctgcatggccctgaagtgcccgcctagcccctgcccagagccagtgctgaggcctgggcactgctgcccaacctgccaaggctgcacagaaggtggctctcactgggaacatggccaagagtggacaacacctggggacccctgccgaatctgccggtgcctggagggtcacatccagtgccgccagcgagaatgtgccagcctgtgtccatacccagcccggcccctcccaggcacctgctgccctgtgtgtgatggctgtttcctaaacgggcgggagcaccgcagcggggagcctgtgggctcaggggacccctgctcgcactgccgctgtgctaatgggagtgtccagtgtgagcctctgccctgcccgccagtgccctgcagacacccaggcaagatccctgggcagtgctgccctgtctgcgatggctgtgagtaccagggacaccagtatcagagccaggagaccttcagactccaagagcggggcctctgtgtccgctgctcctgccaggctggcgaggtctcctgtgaggagcaggagtgcccagtcaccccctgtgccctgcctgcctctggccgccagctctgcccagcctgtgagctggatggagaggagtttgctgagggagtccagtgggagcctgatggtcggccctgcaccgcctgcgtctgtcaagatggggtacccaagtgcggggctgtgctctgccccccagccccctgccagcaccccacccagccccctggtgcctgctgccccagctgtgacagctgcacctaccacagccaagtgtatgccaatgggcagaacttcacggatgcagacagcccttgccatgcctgccactgtcaggatggaactgtgacatgctccttggttgactgccctcccacgacctgtgccaggccccagagtggaccaggccagtgttgccccaggtgcccagactgcatcctggaggaagaggtgtttgtggacggcgagagcttctcccacccccgagacccctgccaggagtgccgatgccaggaaggccatgcccactgccagcctcgcccctgccccagggccccctgtgcccacccgctgcctgggacctgctgcccgaacgactgcagcggctgtgcctttggcgggaaagagtaccccagcggagcggacttcccccacccctctgacccctgccgtctgtgtcgctgtctgagcggcaacgtgcagtgcctggcccgccgctgcgtgccgctgccctgtccagagcctgtcctgctgccgggagagtgctgcccgcagtgcccagccgccccagcccccgccggctgcccacggcccggcgcggcccacgcccgccaccaggagtacttctccccgcccggcgatccctgccgccgctgcctctgcctcgacggctccgtgtcctgccagcggctgccctgcccgcccgcgccctgcgcgcacccgcgccaggggccttgctgcccctcctgcgacggctgcctgtaccaggggaaggagtttgccagcggggagcgcttcccatcgcccactgctgcctgccacctctgcctttgctgggagggcagcgtgagctgcgagcccaaggcatgtgcccctgcactgtgccccttccctgccaggggcgactgctgccctgactgtgatggctgtgagtacctgggggagtcctacctgagtaaccaggagttcccagacccccgagaaccctgcaacctgtgtacctgtcttggaggcttcgtgacctgcggccgccggccctgtgagcctccgggctgcagccacccactcatcccctctgggcactgctgcccgacctgccagggatgccgctaccatggcgtcactactgcctccggagagacccttcctgacccacttgaccctacctgctccctctgcacctgccaggaaggttccatgcgctgccagaagaagccatgtcccccagctctctgcccccacccctctccaggcccctgcttctgccctgtttgccacagctgtctctctcagggccgggagcaccaggatggggaggagtttgagggaccagcaggcagctgtgagtggtgtcgctgtcaggctggccaggtcagctgtgtgcggctgcagtgcccaccccttccctgcaagctccaggtcaccgagcgggggagctgctgccctcgctgcagaggctgcctggctcatggggaagagcaccccgaaggcagtagatgggtgccccccgacagtgcctgctcctcctgtgtgtgtcacgagggcgtcgtcacctgtgcacgcatccagtgcatcagctcttgcgcccagccccgccaagggccccatgactgctgtcctcaatgctctgactgtgagcatgagggccggaagtacgagcctggggagagcttccagcctggggcagacccctgtgaagtgtgcatctgcgagccacagcctgaggggcctcccagccttcgctgtcaccggcggcagtgtcccagcctggtgggctgcccccccagccagctcctgccccctgggccccagcactgctgtcccacctgtgccgaggccttgagtaactgttcagagggcctgctgggatctgagctagccccaccagacccctgctacacgtgccagtgccaggacctgacatggctctgcatccaccaggcttgtcctgagctcagctgtcccctctcagagcgccacactccccctgggagctgctgccccgtatgccgggctcccacccagtcctgcgtgcaccagggccgtgaggtggcctctggagagcgctggactgtggacacctgcaccagctgctcctgcatggcgggcaccgtgcgttgccagagccagcgctgctcaccgctctcgtgtggccccgacaaggcccctgccctgagtcctggcagctgctgcccccgctgcctgcctcggcccgcttcctgcatggccttcggagacccccattaccgcaccttcgacggccgcctgctgcacttccagggcagttgcagctatgtgctggccaaggactgccacagcggggacttcagtgtgcacgtgaccaatgatgaccggggccggagcggtgtggcctggacccaggaggtggcggtgctgctgggagacatggccgtgcggctgctgcaggacggggcagtcacggtggatgggcacccggtggccttgcccttcctgcaggagccgctgctgtatgtggagctgcgaggacacactgtgatcctgcacgcccagcccgggctccaggtgctgtgggatgggcagtcccaggtggaggtgagcgtacctggctcctaccagggccggacttgtgggctctgtgggaacttcaatggctttgcccaggacgatctgcagggccctgaggggctgctcctgccctcggaggctgcgtttgggaatagctggcaggtctcagaggggctgtggcctggccggccctgttctgcaggccgagaggtggatccgtgccgggcagcaggttaccgtgccaggcgtgaggccaatgcccggtgtggggtgctgaagtcctccccattcagtcgctgccatgctgtggtgccaccggagcccttctttgccgcctgtgtgtatgacctgtgtgcctgtggccctggctcctccgctgatgcctgcctctgtgatgccctggaagcctacgccagtcactgtcgccaggcaggagtgacacctacctggcgaggccccacgctgtgtgtggtaggctgccccctggagcgtggcttcgtgtttgatgagtgcggcccaccctgtccccgcacctgcttcaatcagcatatccccctgggggagctggcagcccactgcgtgaggccctgcgtgcccggctgccagtgccctgcaggcctggtggagcatgaggcccactgcatcccacccgaggcctgcccccaagtcctgctcactggagaccagccacttggtgctcggcccagccccagccgggagccccaggagacaccctgagccaggacagtgcctgataagggttcatcaggccaggagtctccccttggcgagcagttcccaccctggttagggctatggagagaatgccctgcctggacac

SEQ ID NO: 146068 - DNA, 5108 bp, Homo sapiens
  Payload ID: 8968
  Gene Symbol: KCP
  Gene Name: kielin/chordin-like protein
  ENST ID: ENST00000610776
  CDS Start-End: 44-4930
gagccgcgacgacagacggcgagccgagcgaggcggagctagcatggccggggtcggggccgctgcgctgtcccttctcctgcacctcggggccctggcgctggccgcgggcgcggaaggtggggctgtccccagggagccccctgggcagcagacaactgcccattcctcagtccttgctgggaactcccaggagcagtggcaccccctgcgagagtggctggggcgactggaggctgcagtgatggagctcagagaacagaataaggacctgcagacgagggtgaggcagctggagtcctgtgagtgccaccctgcatctccccagtgctgggggctggggcgtgcctggcccgagggggcacgctgggagcctgacgcctgcacagcctgcgtctgccaggatggggccgctcactgtggcccccaagcacacctgccccattgcaggggctgcagccaaaatggccagacctacggcaacggggagaccttctccccagatgcctgcaccacctgccgctgtctggaaggtaccatcacttgcaaccagaagccatgcccaagaggaccctgccctgagccaggagcatgctgcccgcactgtaagccaggctgtgattatgaggggcagctttatgaggagggggtcaccttcctgtccagctccaacccttgtctacagtgcacctgcctgaggagccgagttcgctgcatggccctgaagtgcccgcctagcccctgcccagagccagtgctgaggcctgggcactgctgcccaacctgccaaggctgcacagaaggtggctctcactgggaacatggccaagagtggacaacacctggggacccctgccgaatctgccggtgcctggagggtcacatccagtgccgccagcgagaatgtgccagcctgtgtccatacccagcccggcccctcccaggcacctgctgccctgtgtgtgatggctgtttcctaaacgggcgggagcaccgcagcggggagcctgtgggctcaggggacccctgctcgcactgccgctgtgctaatgggagtgtccagtgtgagcctctgccctgcccgccagtgccctgcagacacccaggcaagatccctgggcagtgctgccctgtctgcgatggctgtgagtaccagggacaccagtatcagagccaggagaccttcagactccaagagcggggcctctgtgtccgctgctcctgccaggctggcgaggtctcctgtgaggagcaggagtgcccagtcaccccctgtgccctgcctgcctctggccgccagctctgcccagcctgtgagctggatggagaggagtttgctgagggagtccagtgggagcctgatggtcggccctgcaccgcctgcgtctgtcaagatggggtacccaagtgcggggctgtgctctgccccccagccccctgccagcaccccacccagccccctggtgcctgctgccccagctgtgacagctgcacctaccacagccaagtgtatgccaatgggcagaacttcacggatgcagacagcccttgccatgcctgccactgtcaggatggaactgtgacatgctccttggttgactgccctcccacgacctgtgccaggccccagagtggaccaggccagtgttgccccaggtgcccagactgcatcctggaggaagaggtgtttgtggacggcgagagcttctcccacccccgagacccctgccaggagtgccgatgccaggaaggccatgcccactgccagcctcgcccctgccccagggccccctgtgcccacccgctgcctgggacctgctgcccgaacgactgcagcggctgtgcctttggcgggaaagagtaccccagcggagcggacttcccccacccctctgacccctgccgtctgtgtcgctgtctgagcggcaacgtgcagtgcctggcccgccgctgcgtgccgctgccctgtccagagcctgtcctgctgccgggagagtgctgcccgcagtgcccagccgccccagcccccgccggctgcccacggcccggcgcggcccacgcccgccaccaggagtacttctccccgcccggcgatccctgccgccgctgcctctgcctcgacggctccgtgtcctgccagcggctgccctgcccgcccgcgccctgcgcgcacccgcgccaggggccttgctgcccctcctgcgacggctgcctgtaccaggggaaggagtttgccagcggggagcgcttcccatcgcccactgctgcctgccacctctgcctttgctgggagggcagcgtgagctgcgagcccaaggcatgtgcccctgcactgtgccccttccctgccaggggcgactgctgccctgactgtgatggctgtgagtacctgggggagtcctacctgagtaaccaggagttcccagacccccgagaaccctgcaacctgtgtacctgtcttggaggcttcgtgacctgcggccgccggccctgtgagcctccgggctgcagccacccactcatcccctctgggcactgctgcccgacctgccagggatgccgctaccatggcgtcactactgcctccggagagacccttcctgacccacttgaccctacctgctccctctgcacctgccaggaaggttccatgcgctgccagaagaagccatgtcccccagctctctgcccccacccctctccaggcccctgcttctgccctgtttgccacagctgtctctctcagggccgggagcaccaggatggggaggagtttgagggaccagcaggcagctgtgagtggtgtcgctgtcaggctggccaggtcagctgtgtgcggctgcagtgcccaccccttccctgcaagctccaggtcaccgagcgggggagctgctgccctcgctgcagaggctgcctggctcatggggaagagcaccccgaaggcagtagatgggtgccccccgacagtgcctgctcctcctgtgtgtgtcacgagggcgtcgtcacctgtgcacgcatccagtgcatcagctcttgcgcccagccccgccaagggccccatgactgctgtcctcaatgctctgactgtgagcatgagggccggaagtacgagcctggggagagcttccagcctggggcagacccctgtgaagtgtgcatctgcgagccacagcctgaggggcctcccagccttcgctgtcaccggcggcagtgtcccagcctggtgggctgcccccccagccagctcctgccccctgggccccagcactgctgtcccacctgtgccgaggccttgagtaactgttcagagggcctgctgggatctgagctagccccaccagacccctgctacacgtgccagtgccaggacctgacatggctctgcatccaccaggcttgtcctgagctcagctgtcccctctcagagcgccacactccccctgggagctgctgccccgtatgccgggaatgtgtggtggaggccgagggccggagagtggcagatggagagagctggcgggaccccagcaatgcgtgcatcgcctgcacctgccatcggggccatgtggagtgccacctcgaggagtgccaggccctctcctgcccccatggctgggcgaaggtgccccaggctgacagctgctgtgagcgatgccaagctcccacccagtcctgcgtgcaccagggccgtgaggtggcctctggagagcgctggactgtggacacctgcaccagctgctcctgcatggcgggcaccgtgcgttgccagagccagcgctgctcaccgctctcgtgtggccccgacaaggcccctgccctgagtcctggcagctgctgcccccgctgcctgcctcggcccgcttcctgcatggccttcggagacccccattaccgcaccttcgacggccgcctgctgcacttccagggcagttgcagctatgtgctggccaaggactgccacagcggggacttcagtgtgcacgtgaccaatgatgaccggggccggagcggtgtggcctggacccaggaggtggcggtgctgctgggagacatggccgtgcggctgctgcaggacggggcagtcacggtggatgggcacccggtggccttgcccttcctgcaggagccgctgctgtatgtggagctgcgaggacacactgtgatcctgcacgcccagcccgggctccaggtgctgtgggatgggcagtcccaggtggaggtgagcgtacctggctcctaccagggccggacttgtgggctctgtgggaacttcaatggctttgcccaggacgatctgcagggccctgaggggctgctcctgccctcggaggctgcgtttgggaatagctggcaggtctcagaggggctgtggcctggccggccctgttctgcaggccgagaggtggatccgtgccgggcagcaggttaccgtgccaggcgtgaggccaatgcccggtgtggggtgctgaagtcctccccattcagtcgctgccatgctgtggtgccaccggagcccttctttgccgcctgtgtgtatgacctgtgtgcctgtggccctggctcctccgctgatgcctgcctctgtgatgccctggaagcctacgccagtcactgtcgccaggcaggagtgacacctacctggcgaggccccacgctgtgtgtggtaggctgccccctggagcgtggcttcgtgtttgatgagtgcggcccaccctgtccccgcacctgcttcaatcagcatatccccctgggggagctggcagcccactgcgtgaggccctgcgtgcccggctgccagtgccctgcaggcctggtggagcatgaggcccactgcatcccacccgaggcctgcccccaagtcctgctcactggagaccagccacttggtgctcggcccagccccagccgggagccccaggagacaccctgagccaggacagtgcctgataagggttcatcaggccaggagtctccccttggcgagcagttcccaccctggttagggctatggagagaatgccctgcctggacactggagcctgggcccctgccctgcaaagacccccgccatgttgagtcaccagcagtaaactctaggcctgcccgaa

SEQ ID NO: 146069 - DNA, 4741 bp, Homo sapiens
  Payload ID: 8968
  Gene Symbol: KCP
  Gene Name: kielin/chordin-like protein
  ENST ID: ENST00000611280
  CDS Start-End: 44-3871
gagccgcgacgacagacggcgagccgagcgaggcggagctagcatggccggggtcggggccgctgcgctgtcccttctcctgcacctcggggccctggcgctggccgcgggcgcggaaggtggggctgtccccagggagccccctgggcagcagacaactgcccattcctcagtccttgctgggaactcccaggagcagtggcaccccctgcgagagtggctggggcgactggaggctgcagtgatggagctcagagaacagaataaggacctgcagacgagggtgaggcagctggagtcctgtgagtgccaccctgcatctccccagtgctgggggctggggcgtgcctggcccgagggggcacgctgggagcctgacgcctgcacagcctgcgtctgccaggatggggccgctcactgtggcccccaagcacacctgccccattgcaggggctgcagccaaaatggccagacctacggcaacggggagaccttctccccagatgcctgcaccacctgccgctgtctgacaggagccgtgcagtgccaggggccctcgtgttcagagctcaactgcttggagagctgcaccccacctggggagtgctgccccatctgccggcccggctgtgattatgaggggcagctttatgaggagggggtcaccttcctgtccagctccaacccttgtctacagtgcacctgcctgaggagccgagttcgctgcatggccctgaagtgcccgcctagcccctgcccagagccagtgctgaggcctgggcactgctgcccaacctgccaaggctgcacagaaggtggctctcactgggaacatggccaagagtggacaacacctggggacccctgccgaatctgccggtgcctggagggtcacatccagtgccgccagcgagaatgtgccagcctgtgtccatacccagcccggcccctcccaggcacctgctgccctgtgtgtgatggctgtttcctaaacgggcgggagcaccgcagcggggagcctgtgggctcaggggacccctgctcgcactgccgctgtgctaatgggagtgtccagtgtgagcctctgccctgcccgccagtgccctgcagacacccaggcaagatccctgggcagtgctgccctgtctgcgatggctgtgagtaccagggacaccagtatcagagccaggagaccttcagactccaagagcggggcctctgtgtccgctgctcctgccaggctggcgaggtctcctgtgaggagcaggagtgcccagtcaccccctgtgccctgcctgcctctggccgccagctctgcccagcctgtgagctggatggagaggagtttgctgagggagtccagtgggagcctgatggtcggccctgcaccgcctgcgtctgtcaagatggggtacccaagtgcggggctgtgctctgccccccagccccctgccagcaccccacccagccccctggtgcctgctgccccagctgtgacagctgcacctaccacagccaagtgtatgccaatgggcagaacttcacggatgcagacagcccttgccatgcctgccactgtcaggatggaactgtgacatgctccttggttgactgccctcccacgacctgtgccaggccccagagtggaccaggccagtgttgccccaggtgcccagactgcatcctggaggaagaggtgtttgtggacggcgagagcttctcccacccccgagacccctgccaggagtgccgatgccaggaaggccatgcccactgccagcctcgcccctgccccagggccccctgtgcccacccgctgcctgggacctgctgcccgaacgactgcagcggctgtgcctttggcgggaaagagtaccccagcggagcggacttcccccacccctctgacccctgccgtctgtgtcgctgtctgagcggcaacgtgcagtgcctggcccgccgctgcgtgccgctgccctgtccagagcctgtcctgctgccgggagagtgctgcccgcagtgcccagccgccccagcccccgccggctgcccacggcccggcgcggcccacgcccgccaccaggagtacttctccccgcccggcgatccctgccgccgctgcctctgcctcgacggctccgtgtcctgccagcggctgccctgcccgcccgcgccctgcgcgcacccgcgccaggggccttgctgcccctcctgcgacggctgcctgtaccaggggaaggagtttgccagcggggagcgcttcccatcgcccactgctgcctgccacctctgcctttgctgggagggcagcgtgagctgcgagcccaaggcatgtgcccctgcactgtgccccttccctgccaggggcgactgctgccctgactgtgatggctgtgagtacctgggggagtcctacctgagtaaccaggagttcccagacccccgagaaccctgcaacctgtgtacctgtcttggaggcttcgtgacctgcggccgccggccctgtgagcctccgggctgcagccacccactcatcccctctgggcactgctgcccgacctgccagggatgccgctaccatggcgtcactactgcctccggagagacccttcctgacccacttgaccctacctgctccctctgcacctgccaggaaggttccatgcgctgccagaagaagccatgtcccccagctctctgcccccacccctctccaggcccctgcttctgccctgtttgccacagctgtctctctcagggccgggagcaccaggatggggaggagtttgagggaccagcaggcagctgtgagtggtgtcgctgtcaggctggccaggtcagctgtgtgcggctgcagtgcccaccccttccctgcaagctccaggtcaccgagcgggggagctgctgccctcgctgcagaggctgcctggctcatggggaagagcaccccgaaggcagtagatgggtgccccccgacagtgcctgctcctcctgtgtgtgtcacgagggcgtcgtcacctgtgcacgcatccagtgcatcagctcttgcgcccagccccgccaagggccccatgactgctgtcctcaatgctctgactgtgagcatgagggccggaagtacgagcctggggagagcttccagcctggggcagacccctgtgaagtgtgcatctgcgagccacagcctgaggggcctcccagccttcgctgtcaccggcggcagtgtcccagcctggtgggctgcccccccagccagctcctgccccctgggccccagcactgctgtcccacctgtgccgaggccttgagtaactgttcagagggcctgctgggatctgagctagccccaccagacccctgctacacgtgccagtgccaggacctgacatggctctgcatccaccaggcttgtcctgagctcagctgtcccctctcagagcgccacactccccctgggagctgctgccccgtatgccgggctcccacccagtcctgcgtgcaccagggccgtgaggtggcctctggagagcgctggactgtggacacctgcaccagctgctcctgcatggcgggcaccgtgcgttgccagagccagcgctgctcaccgctctcgtgtggccccgacaaggcccctgccctgagtcctggcagctgctgcccccgctgcctgcctcggcccgcttcctgcatggccttcggagacccccattaccgcaccttcgacggccgcctgctgcacttccagggcagttgcagctatgtgctggccaaggactgccacagcggggacttcaggtggatgggcacccggtggccttgcccttcctgcaggagccgctgctgtatgtggagctgcgaggacacactgtgatcctgcacgcccagcccgggctccaggtgctgtgggatgggcagtcccaggtggaggtgagcgtacctggctcctaccagggccggacttgtgggctctgtgggaacttcaatggctttgcccaggacgatctgcagggccctgaggggctgctcctgccctcggaggctgcgtttgggaatagctggcaggtctcagaggggctgtggcctggccggccctgttctgcaggccgagaggtggatccgtgccgggcagcaggttaccgtgccaggcgtgaggccaatgcccggtgtggggtgctgaagtcctccccattcagtcgctgccatgctgtggtgccaccggagcccttctttgccgcctgtgtgtatgacctgtgtgcctgtggccctggctcctccgctgatgcctgcctctgtgatgccctggaagcctacgccagtcactgtcgccaggcaggagtgacacctacctggcgaggccccacgctgtgtgtggtaggctgccccctggagcgtggcttcgtgtttgatgagtgcggcccaccctgtccccgcacctgcttcaatcagcatatccccctgggggagctggcagcccactgcgtgaggccctgcgtgcccggctgccagtgccctgcaggcctggtggagcatgaggcccactgcatcccacccgaggcctgcccccaagtcctgctcactggagaccagccacttggtgctcggcccagccccagccgggagccccaggagacaccctgagccaggacagtgcctgataagggttcatcaggccaggagtctccccttggcgagcagttcccaccctggttagggctatggagagaatgccctgcctggacac

SEQ ID NO: 146070 - DNA, 4515 bp, Homo sapiens
  Payload ID: 8968
  Gene Symbol: KCP
  Gene Name: kielin/chordin-like protein
  ENST ID: ENST00000620378
  CDS Start-End: 1-4515
atggccggggtcggggccgctgcgctgtcccttctcctgcacctcggggccctggcgctggccgcgggcgcggaaggtggggctgtccccagggagccccctgggcagcagacaactgcccattcctcagtccttgctgggaactcccaggagcagtggcaccccctgcgagagtggctggggcgactggaggctgcagtgatggagctcagagaacagaataaggacctgcagacgagggtgaggcagctggagtcctgtgagtgccaccctgcatctccccagtgctgggggctggggcgtgcctggcccgagggggcacgctgggagcctgacgcctgcacagcctgcgtctgccaggatggggccgctcactgtggcccccaagcacacctgccccattgcaggggctgcagccaaaatggccagacctacggcaacggggagaccttctccccagatgcctgcaccacctgccgctgtctgacaggagccgtgcagtgccaggggccctcgtgttcagagctcaactgcttggagagctgcaccccacctggggagtgctgccccatctgccgctgcacagaaggtggctctcactgggaacatggccaagagtggacaacacctggggacccctgccgaatctgccggtgcctggagggtcacatccagtgccgccagcgagaatgtgccagcctgtgtccatacccagcccggcccctcccaggcacctgctgccctgtgtgtgatggctgtttcctaaacgggcgggagcaccgcagcggggagcctgtgggctcaggggacccctgctcgcactgccgctgtgctaatgggagtgtccagtgtgagcctctgccctgcccgccagtgccctgcagacacccaggcaagatccctgggcagtgctgccctgtctgcgatggctgtgagtaccagggacaccagtatcagagccaggagaccttcagactccaagagcggggcctctgtgtccgctgctcctgccaggctggcgaggtctcctgtgaggagcaggagtgcccagtcaccccctgtgccctgcctgcctctggccgccagctctgcccagcctgtgagctggatggagaggagtttgctgagggagtccagtgggagcctgatggtcggccctgcaccgcctgcgtctgtcaagatggggtacccaagtgcggggctgtgctctgccccccagccccctgccagcaccccacccagccccctggtgcctgctgccccagctgtgacagctgcacctaccacagccaagtgtatgccaatgggcagaacttcacggatgcagacagcccttgccatgcctgccactgtcaggatggaactgtgacatgctccttggttgactgccctcccacgacctgtgccaggccccagagtggaccaggccagtgttgccccaggtgcccagactgcatcctggaggaagaggtgtttgtggacggcgagagcttctcccacccccgagacccctgccaggagtgccgatgccaggaaggccatgcccactgccagcctcgcccctgccccagggccccctgtgcccacccgctgcctgggacctgctgcccgaacgactgcagcggctgtgcctttggcgggaaagagtaccccagcggagcggacttcccccacccctctgacccctgccgtctgtgtcgctgtctgagcggcaacgtgcagtgcctggcccgccgctgcgtgccgctgccctgtccagagcctgtcctgctgccgggagagtgctgcccgcagtgcccagcccccgccggctgcccacggcccggcgcggcccacgcccgccaccaggagtacttctccccgcccggcgatccctgccgccgctgcctctgcctcgacggctccgtgtcctgccagcggctgccctgcccgcccgcgccctgcgcgcacccgcgccaggggccttgctgcccctcctgcgacggctgcctgtaccaggggaaggagtttgccagcggggagcgcttcccatcgcccactgctgcctgccacctctgcctttgctgggagggcagcgtgagctgcgagcccaaggcatgtgcccctgcactgtgccccttccctgccaggggcgactgctgccctgactgtgatggctgtgagtacctgggggagtcctacctgagtaaccaggagttcccagacccccgagaaccctgcaacctgtgtacctgtcttggaggcttcgtgacctgcggccgccggccctgtgagcctccgggctgcagccacccactcatcccctctgggcactgctgcccgacctgccagggatgccgctaccatggcgtcactactgcctccggagagacccttcctgacccacttgaccctacctgctccctctgcacctgccaggaaggttccatgcgctgccagaagaagccatgtcccccagctctctgcccccacccctctccaggcccctgcttctgccctgtttgccacagctgtctctctcagggccgggagcaccaggatggggaggagtttgagggaccagcaggcagctgtgagtggtgtcgctgtcaggctggccaggtcagctgtgtgcggctgcagtgcccaccccttccctgcaagctccaggtcaccgagcgggggagctgctgccctcgctgcagaggctgcctggctcatggggaagagcaccccgaaggcagtagatgggtgccccccgacagtgcctgctcctcctgtgtgtgtcacgagggcgtcgtcacctgtgcacgcatccagtgcatcagctcttgcgcccagccccgccaagggccccatgactgctgtcctcaatgctctgactgtgagcatgagggccggaagtacgagcctggggagagcttccagcctggggcagacccctgtgaagtgtgcatctgcgagccacagcctgaggggcctcccagccttcgctgtcaccggcggcagtgtcccagcctggtgggctgcccccccagccagctcctgccccctgggccccagcactgctgtcccacctgtgccgaggccttgagtaactgttcagagggcctgctgggatctgagctagccccaccagacccctgctacacgtgccagtgccaggacctgacatggctctgcatccaccaggcttgtcctgagctcagctgtcccctctcagagcgccacactccccctgggagctgctgccccgtatgccgggctcccacccagtcctgcgtgcaccagggccgtgaggtggcctctggagagcgctggactgtggacacctgcaccagctgctcctgcatggcgggcaccgtgcgttgccagagccagcgctgctcaccgctctcgtgtggccccgacaaggcccctgccctgagtcctggcagctgctgcccccgctgcctgcctcggcccgcttcctgcatggccttcggagacccccattaccgcaccttcgacggccgcctgctgcacttccagggcagttgcagctatgtgctggccaaggactgccacagcggggacttcagtgtgcacgtgaccaatgatgaccggggccggagcggtgtggcctggacccaggaggtggcggtgctgctgggagacatggccgtgcggctgctgcaggacggggcagtcacggtggatgggcacccggtggccttgcccttcctgcaggagccgctgctgtatgtggagctgcgaggacacactgtgatcctgcacgcccagcccgggctccaggtgctgtgggatgggcagtcccaggtggaggtgagcgtacctggctcctaccagggccggacttgtgggctctgtgggaacttcaatggctttgcccaggacgatctgcagggccctgaggggctgctcctgccctcggaggctgcgtttgggaatagctggcaggtctcagaggggctgtggcctggccggccctgttctgcaggccgagaggtggatccgtgccgggcagcaggttaccgtgccaggcgtgaggccaatgcccggtgtggggtgctgaagtcctccccattcagtcgctgccatgctgtggtgccaccggagcccttctttgccgcctgtgtgtatgacctgtgtgcctgtggccctggctcctccgctgatgcctgcctctgtgatgccctggaagcctacgccagtcactgtcgccaggcaggagtgacacctacctggcgaggccccacgctgtgtgtggtaggctgccccctggagcgtggcttcgtgtttgatgagtgcggcccaccctgtccccgcacctgcttcaatcagcatatccccctgggggagctggcagcccactgcgtgaggccctgcgtgcccggctgccagtgccctgcaggcctggtggagcatgaggcccactgcatcccacccgaggcctgcccccaagtcctgctcactggagaccagccacttggtgctcggcccagccccagccgggagccccaggagacaccctga

SEQ ID NO: 146071 - DNA, 2544 bp, Homo sapiens
  Payload ID: 8969
  Gene Symbol: KIF1BP
  Gene Name: KIF1 binding protein
  Uniprot ID: Q96EK5
  ENST ID: ENST00000361983
  CDS Start-End: 113-1978
attccacagcggccgcaacgtgtcgagagccgtaagtaaagtgtcgcaaagcagaaggaaggcgggagtcccgactgcaaacattgaggaaagccaggcagtagaggccgctatggcgaacgttccgtgggcagaggtctgcgagaaattccaggcggcgctcgctctgtcgcgggtggaactgcataaaaatccggagaaggaaccatacaagtccaaatacagcgcccgggcgctactggaagaggtcaaggcgctgctcggccctgcgcctgaggacgaggatgagcggcctgaggccgaggacggcccgggtgccggtgaccacgccctggggctgccggctgaggtggtggagcccgaggggcccgtcgcccagcgagcggtgaggctggcagtcatcgagttccacctcggggtgaaccacatcgacacggaggagctgtcggcgggggaggagcacctggtgaaatgcctgcggctgctgcgcaggtaccggctctcgcacgactgcatctctctctgcatccaggcgcagaataacctgggtatcttgtggtctgaaagagaagaaattgaaactgcacaggcttacctagagtcatcagaagcactatataatcagtatatgaaagaggttgggagtcctcctcttgatcctactgagcgttttcttcctgaagaagagaaacttactgaacaagagagatcaaaaagatttgaaaaggtttatactcataacctatattacctagctcaagtctaccagcatctggaaatgtttgagaaggctgctcactattgccatagtacactaaaacgccagcttgagcacaatgcctaccatcctatagagtgggctatcaatgctgctaccttgtcacagttttacatcaataagctatgctttatggaggccaggcactgtttatcagctgctaatgtcatttttggtcaaactggaaagatctcagccacagaagacactcctgaagctgaaggagaagtgccagagctttatcatcaaagaaagggggaaatagcaaggtgctggatcaaatactgtttgactctcatgcagaatgcccaactctccatgcaggacaacataggagagcttgatcttgataaacagtctgaacttagagctttaaggaaaaaagaactagatgaggaggaaagcattcggaaaaaagctgtgcagtttggaaccggtgaactgtgtgatgccatctctgcagtagaagagaaagtgagctacttgagacctttagattttgaagaagccagagaacttttcttattgggtcagcactatgtctttgaggcaaaagagttctttcagattgatggttatgtcactgaccatattgaagttgtccaagaccacagtgctctgtttaaggtgcttgcattctttgaaactgacatggagagacggtgcaagatgcataaacgcagaatagccatgctagagcccctaactgtagacctgaatccacagtattatctgttggtcaacagacagatccagtttgaaattgcacatgcttactatgatatgatggatttgaaggttgccattgctgacaggctaagggatcctgattcacacattgtaaaaaaaataaataatcttaataagtcagcactgaagtactaccagctcttcttagactccctgagagacccaaataaagtattccctgagcatataggggaagatgttcttcgccctgccatgttagctaagtttcgagttgcccgtctctatggcaaaatcattactgcagatcccaagaaagagctggaaaatttggcaacatcattggaacattacaaatttattgttgattactgtgaaaagcatcctgaggccgcccaggaaatagaagttgagctagaacttagtaaagagatggttagtcttctcccaacaaaaatggagagattcagaaccaagatggccctgacttaatccttgtttttaaagaaaggaaatgtgcaatattgaagtgatctttttccctagtcagacaggcccaattccattgtgatgtttacctttatagccaggtgagtgcagtttgaacttgagatacagtcaactgagtgtttgctaggatcctaaggaacataaagttaattaaaaacttacacctaattatgtaaattgccttgttaaagacatgtgatttgtattttagatgcttgtttcctattaaaatacagacatttctaccctcagtttctaaatgtagactatttgttggctagtacttgatagattccttgtaagaaaaaatgctgggtaatgtacctggtaacaagcctgttaatatattaagattgaaaaagtaacttctatagttactccttctaaaatatttgacttcctaaattccccccacccaaaatctttcccttttgaaaatactaaaaactaagttatgttattataaagtgtaaaatggtttgtcttaattataggagaaaaaggccttgttagaaataaaataaactgacttatttcactaatgaaaa

SEQ ID NO: 146072 - DNA, 2337 bp, Homo sapiens
  Payload ID: 8969
  Gene Symbol: KIF1BP
  Gene Name: KIF1 binding protein
  ENST ID: ENST00000626493
  CDS Start-End: 28-921
gaggaaagccaggcagtagaggccgctatggcgaacgttccgtgggcagaggtctgcgagaaattccaggcggcgctcgctctgtcgcgggtggaactgcataaaaatccggagaaggaaccatacaagtccaaatacagcgcccgggcgctactggaagaggtcaaggcgctgctcggccctgcgcctgaggacgaggatgagcggcctgaggccgaggacggcccgggtgccggtgaccacgccctggggctgccggctgaggtggtggagcccgaggggcccgtcgcccagcgagcggtgaggctggcagtcatcgagttccacctcggggtgaaccacatcgacacggaggagctgtcggcgggggaggagcacctggtgaaatgcctgcggctgctgcgcaggtaccggctctcgcacgactgcatctctctctgcatccaggcgcagaataacctgggtatcttgtggtctgaaagagaagaaattgaaactgcacaggcttacctagagtcatcagaagcactatataatcagtatatgaaagaggttgggagtcctcctcttgatcctactgagcgttttcttcctgaagaagagaaacttactgaacaagagagatcaaaaagatttgaaaaggtttatactcataacctatattacctagctcaagtctaccagcatctggaaatgtttgagaaggctgctcactattgccatagtacactaaaacgccagcttgagcacaatgcctaccatcctatagagtgggctatcaatgctgctaccttgtcacagttttacatcaataagctatgctttatggaggccaggcactgtttatcagctgctaatgtcatttttggtcaaactggaaagatctcagccacagaagacagacaacataggagagcttgatcttgataaacagtctgaacttagagctttaaggaaaaaagaactagatgaggaggaaagcattcggaaaaaagctgtgcagtttggaaccggtgaactgtgtgatgccatctctgcagtagaagagaaagtgagctacttgagacctttagattttgaagaagccagagaacttttcttattgggtcagcactatgtctttgaggcaaaagagttctttcagattgatggttatgtcactgaccatattgaagttgtccaagaccacagtgctctgtttaaggtgcttgcattctttgaaactgacatggagagacggtgcaagatgcataaacgcagaatagccatgctagagcccctaactgtagacctgaatccacagtattatctgttggtcaacagacagatccagtttgaaattgcacatgcttactatgatatgatggatttgaaggttgccattgctgacaggctaagggatcctgattcacacattgtaaaaaaaataaataatcttaataagtcagcactgaagtactaccagctcttcttagactccctgagagacccaaataaagtattccctgagcatataggggaagatgttcttcgccctgccatgttagctaagtttcgagttgcccgtctctatggcaaaatcattactgcagatcccaagaaagagctggaaaatttggcaacatcattggaacattacaaatttattgttgattactgtgaaaagcatcctgaggccgcccaggaaatagaagttgagctagaacttagtaaagagatggttagtcttctcccaacaaaaatggagagattcagaaccaagatggccctgacttaatccttgtttttaaagaaaggaaatgtgcaatattgaagtgatctttttccctagtcagacaggcccaattccattgtgatgtttacctttatagccaggtgagtgcagtttgaacttgagatacagtcaactgagtgtttgctaggatcctaaggaacataaagttaattaaaaacttacacctaattatgtaaattgccttgttaaagacatgtgatttgtattttagatgcttgtttcctattaaaatacagacatttctaccctcagtttctaaatgtagactatttgttggctagtacttgatagattccttgtaagaaaaaatgctgggtaatgtacctggtaacaagcctgttaatatattaagattgaaaaagtaacttctatagttactccttctaaaatatttgacttcctaaattccccccacccaaaatctttcccttttgaaaatactaaaaactaagttatgttattataaagtgtaaaatggtttgtcttaattataggagaaaaaggccttgttagaaataaaataaactgacttatttcactaa

SEQ ID NO: 146073 - DNA, 1800 bp, Homo sapiens
  Payload ID: 8970
  Gene Symbol: KIR3DL1
  Gene Name: killer cell immunoglobulin-like receptor, three domains, long cytoplasmic tail, 1
  ENST ID: ENST00000326542
  CDS Start-End: 15-1298
gcaccggcagcaccatgtcgctcatggtcgtcagcatggcgtgtgttgggttgttcttggtccagagggccggtccacacatgggtggtcaggacaaacccttcctgtctgcctggcccagcgctgtggtgcctcgaggaggacacgtgactcttcggtgtcactatcgtcataggtttaacaatttcatgctatacaaagaagacagaatccacattcccatcttccatggcagaatattccaggagagcttcaacatgagccctgtgaccacagcacatgcagggaactacacatgtcggggttcacacccacactcccccactgggtggtcggcacccagcaaccccgtggtgatcatggtcacaggaaaccacagaaaaccttccctcctggcccacccaggtcccctggtgaaatcaggagagagagtcatcctgcaatgttggtcagatatcatgtttgagcacttctttctgcacaaagaggggatctctaaggacccctcacgcctcgttggacagatccatgatggggtctccaaggccaatttctccatcggtcccatgatgcttgcccttgcagggacctacagatgctacggttctgttactcacaccccctatcagttgtcagctcccagtgatcccctggacatcgtggtcacaggtccatatgagaaaccttctctctcagcccagccgggccccaaggttcaggcaggagagagcgtgaccttgtcctgtagctcccggagctcctatgacatgtaccatctatccagggaggggggagcccatgaacgtaggctccctgcagtgcgcaaggtcaacagaacattccaggcagatttccctctgggccctgccacccacggagggacctacagatgcttcggctctttccgtcactctccctacgagtggtcagacccgagtgacccactgcttgtttctgtcacaggtaaccccagacacctgcacattctgattgggacctcagtggtcatcatcctcttcatcctcctcctcttctttctccttcatctctggtgctccaacaaaaaaaatgctgctgtaatggaccaagagcctgcagggaacagaacagccaacagcgaggactctgatgaacaagaccctgaggaggtgacatacgcacagttggatcactgcgttttcacacagagaaaaatcactcgcccttctcagaggcccaagacaccccctacagataccatcttgtacacggaacttccaaatgctaagcccagatccaaagttgtctcctgcccatgagcaccacagtcaggccttgaggacgtcttctagggagacaacagccctgtctcaaaaccgagttgccagctcccatgtaccagcagctggaatctgaaggcgtgagtcttcatcttagggcatcgctcctcctcacgccacaaatctggtgcctctctcttgcttacaaatgtctaggtccccactgcctgctggaaagaaaacacactcctttgcttagcccacagttctccatttcacttgacccctgcccacctctccaacctaactggcttacttcctagtctacttgaggctgcaatcacactgaggaactcacaattccaaacatacaagaggctccctcttgacgtggcacttacccacgtgctgttccaccttccctcatgctgtttcacctttcttcggactattttccagccttctgtcagcagtgaaacttataaaattttttgtgatttcaatgtagctgtctcctcttcaaataaacatgtctgccctc

SEQ ID NO: 146074 - DNA, 1564 bp, Homo sapiens
  Payload ID: 8970
  Gene Symbol: KIR3DL1
  Gene Name: killer cell immunoglobulin-like receptor, three domains, long cytoplasmic tail, 1
  Uniprot ID: P43629
  ENST ID: ENST00000358178
  CDS Start-End: 12-1061
ccggcagcaccatgtcgctcatggtcgtcagcatggcgtgtgttgggttgttcttggtccagagggccggtccacacatgggaaaccacagaaaaccttccctcctggcccacccaggtcccctggtgaaatcaggagagagagtcatcctgcaatgttggtcagatatcatgtttgagcacttctttctgcacaaagaggggatctctaaggacccctcacgcctcgttggacagatccatgatggggtctccaaggccaatttctccatcggtcccatgatgcttgcccttgcagggacctacagatgctacggttctgttactcacaccccctatcagttgtcagctcccagtgatcccctggacatcgtggtcacaggtccatatgagaaaccttctctctcagcccagccgggccccaaggttcaggcaggagagagcgtgaccttgtcctgtagctcccggagctcctatgacatgtaccatctatccagggaggggggagcccatgaacgtaggctccctgcagtgcgcaaggtcaacagaacattccaggcagatttccctctgggccctgccacccacggagggacctacagatgcttcggctctttccgtcactctccctacgagtggtcagacccgagtgacccactgcttgtttctgtcacaggaaacccttcaagtagttggccttcacccacagaaccaagctccaaatctggtaaccccagacacctgcacattctgattgggacctcagtggtcatcatcctcttcatcctcctcctcttctttctccttcatctctggtgctccaacaaaaaaaatgctgctgtaatggaccaagagcctgcagggaacagaacagccaacagcgaggactctgatgaacaagaccctgaggaggtgacatacgcacagttggatcactgcgttttcacacagagaaaaatcactcgcccttctcagaggcccaagacaccccctacagataccatcttgtacacggaacttccaaatgctaagcccagatccaaagttgtctcctgcccatgagcaccacagtcaggccttgaggacgtcttctagggagacaacagccctgtctcaaaaccgagttgccagctcccatgtaccagcagctggaatctgaaggcgtgagtcttcatcttagggcatcgctcctcctcacgccacaaatctggtgcctctctcttgcttacaaatgtctaggtccccactgcctgctggaaagaaaacacactcctttgcttagcccacagttctccatttcacttgacccctgcccacctctccaacctaactggcttacttcctagtctacttgaggctgcaatcacactgaggaactcacaattccaaacatacaagaggctccctcttgacgtggcacttacccacgtgctgttccaccttccctcatgctgtttcacctttcttcggactattttccagccttctgtcagcagtgaaacttataaaattttttgtgatttcaatgtagctgtctcctcttcaaataaacatgtctgccctca

SEQ ID NO: 146075 - DNA, 1871 bp, Homo sapiens
  Payload ID: 8970
  Gene Symbol: KIR3DL1
  Gene Name: killer cell immunoglobulin-like receptor, three domains, long cytoplasmic tail, 1
  Uniprot ID: P43629
  ENST ID: ENST00000391728
  CDS Start-End: 34-1368
ggggcgcagccgcctgtctgcaccggcagcaccatgtcgctcatggtcgtcagcatggcgtgtgttgggttgttcttggtccagagggccggtccacacatgggtggtcaggacaaacccttcctgtctgcctggcccagcgctgtggtgcctcgaggaggacacgtgactcttcggtgtcactatcgtcataggtttaacaatttcatgctatacaaagaagacagaatccacattcccatcttccatggcagaatattccaggagagcttcaacatgagccctgtgaccacagcacatgcagggaactacacatgtcggggttcacacccacactcccccactgggtggtcggcacccagcaaccccgtggtgatcatggtcacaggaaaccacagaaaaccttccctcctggcccacccaggtcccctggtgaaatcaggagagagagtcatcctgcaatgttggtcagatatcatgtttgagcacttctttctgcacaaagaggggatctctaaggacccctcacgcctcgttggacagatccatgatggggtctccaaggccaatttctccatcggtcccatgatgcttgcccttgcagggacctacagatgctacggttctgttactcacaccccctatcagttgtcagctcccagtgatcccctggacatcgtggtcacaggtccatatgagaaaccttctctctcagcccagccgggccccaaggttcaggcaggagagagcgtgaccttgtcctgtagctcccggagctcctatgacatgtaccatctatccagggaggggggagcccatgaacgtaggctccctgcagtgcgcaaggtcaacagaacattccaggcagatttccctctgggccctgccacccacggagggacctacagatgcttcggctctttccgtcactctccctacgagtggtcagacccgagtgacccactgcttgtttctgtcacaggaaacccttcaagtagttggccttcacccacagaaccaagctccaaatctggtaaccccagacacctgcacattctgattgggacctcagtggtcatcatcctcttcatcctcctcctcttctttctccttcatctctggtgctccaacaaaaaaaatgctgctgtaatggaccaagagcctgcagggaacagaacagccaacagcgaggactctgatgaacaagaccctgaggaggtgacatacgcacagttggatcactgcgttttcacacagagaaaaatcactcgcccttctcagaggcccaagacaccccctacagataccatcttgtacacggaacttccaaatgctaagcccagatccaaagttgtctcctgcccatgagcaccacagtcaggccttgaggacgtcttctagggagacaacagccctgtctcaaaaccgagttgccagctcccatgtaccagcagctggaatctgaaggcgtgagtcttcatcttagggcatcgctcctcctcacgccacaaatctggtgcctctctcttgcttacaaatgtctaggtccccactgcctgctggaaagaaaacacactcctttgcttagcccacagttctccatttcacttgacccctgcccacctctccaacctaactggcttacttcctagtctacttgaggctgcaatcacactgaggaactcacaattccaaacatacaagaggctccctcttgacgtggcacttacccacgtgctgttccaccttccctcatgctgtttcacctttcttcggactattttccagccttctgtcagcagtgaaacttataaaattttttgtgatttcaatgtagctgtctcctcttcaaataaacatgtctgccctca

SEQ ID NO: 146076 - DNA, 1663 bp, Homo sapiens
  Payload ID: 8970
  Gene Symbol: KIR3DL1
  Gene Name: killer cell immunoglobulin-like receptor, three domains, long cytoplasmic tail, 1
  ENST ID: ENST00000402254
  CDS Start-End: 34-1401
ggggcgcagccgcctgtctgcaccggcagcaccatgtcgctcatggtcgtcagcatggcgtgtgttgggttgttcttggtccagagggccggtccacacatgggtggtcaggacaaacccttcctgtctgcctggcccagcgctgtggtgcctcgaggaggacacgtgactcttcggtgtcactatcgtcataggtttaacaatttcatgctatacaaagaagacagaatccacattcccatcttccatggcagaatattccaggagagcttcaacatgagccctgtgaccacagcacatgcagggaactacacatgtcggggttcacacccacactcccccactgggtggtcggcacccagcaaccccgtggtgatcatggtcacaggaaaccacagaaaaccttccctcctggcccacccaggtcccctggtgaaatcaggagagagagtcatcctgcaatgttggtcagatatcatgtttgagcacttctttctgcacaaagaggggatctctaaggacccctcacgcctcgttggacagatccatgatggggtctccaaggccaatttctccatcggtcccatgatgcttgcccttgcagggacctacagatgctacggttctgttactcacaccccctatcagttgtcagctcccagtgatcccctggacatcgtggtcacaggtccatatgagaaaccttctctctcagcccagccgggccccaaggttcaggcaggagagagcgtgaccttgtcctgtagctcccggagctcctatgacatgtaccatctatccagggaggggggagcccatgaacgtaggctccctgcagtgcgcaaggtcaacagaacattccaggcagatttccctctgggccctgccacccacggagggacctacagatgcttcggctctttccgtcactctccctacgagtggtcagacccgagtgacccactgcttgtttctgtcacaggaaacccttcaagtagttggccttcacccacagaaccaagctccaaatctggtatctgcagacacctgcatgttctgattgggacctcagtggtcatcttcctcttcatcctcctcctcttctttctcctttatcgctggtgctccaacaaaaagaatgctgctgtaatggaccaagagcctgcgggggacagaacagtgaataggcaggactctgatgaacaagaccctcaggaggtgacgtacgcacagttggatcactgcgttttcatacagagaaaaatcagtcgcccttctcagaggcccaagacacccctaacagataccagcgtgtacacggaacttccaaatgctgagcccagatccaaagttgtctcctgcccacgagcaccacagtcaggtcttgagggggttttctagggagacaacagccctgtctcaaaaccaggttgccagatccaatgaaccagcagctggaatctgaaggcatcagtctgcatcttaggggatcgctcttcctcacaccacgaatctgaacatgcctctctcttgcttacaaatgcctaaggtcgccactgcctgctgcagagaaaacacactcctttgcttagcccacaagtatctatttcacttgacccctgcccacctctccaacctaactggcttacttcctagtcctact

SEQ ID NO: 146077 - DNA, 1810 bp, Homo sapiens
  Payload ID: 8970
  Gene Symbol: KIR3DL1
  Gene Name: killer cell immunoglobulin-like receptor, three domains, long cytoplasmic tail, 1
  ENST ID: ENST00000622691
  CDS Start-End: 25-1308
ccgcctgtctgcaccggcagcaccatgttgctcatggtcgtcagcatggcgtgtgttgggttcttcttggtccagagggccggtccacacgtgggtggtcaggacaagcccttcctgtctgcctggcccagcgctgtggtgcctcgaggaggacacgtgactcttcggtgtcactatcgtcataggtttaacaatttcatgctatacaaagaagacagaatccacgttcccatcttccatggcagattattccaggagagcttcaacatgagccctgtgaccacagcacatgcagggaactacacatgtcggggttcacacccacactcccccactgggtggtcggcacccagcaaccccgtggtgatcatggtcacaggaaaccacagaaaaccttccctcctggcccacccaggtcccctggtgaaatcaggagagagagtcatcctgcaatgttggtcagatatcatgtttgagcacttctttctgcacaaagaggggatctctaaggacccctcacgcctcgttggacagatccatgatggggtctccaaggccaatttctccatcggtcccatgatgcttgcccttgcagggacctacagatgctacggttctgttactcacaccccctatcagttgtcagctcccagtgatcccctggacatcgtggtcacaggtccatatgagaaaccttctctctcagcccagccgggccccaaggttcaggcaggagagagcgtgaccttgtcctgcagctcccggagctcctatgacatgtaccatctatccagggagcggggagcccatgaacgtaggctccctgcagtgcgcaaggtcaacagaacattccaggcagatttccctctgggccctgccacccacggagggacctacagatgcttcggctctttccgtcactctccctacgagtggtcagacccgagtgacccactgcttgtttctgtcacaggtaaccccagacacctgcacattctgattgggacctcagtggtcatcatcctcttcatcctcctcctcttctttctccttcatctctggtgctccaacaaaaaaaatgctgctgtaatggaccaagagcctgcagggaacagaacagccaacagcgaggactctgatgaacaagaccctgaggaggtgacatacgcacagttggatcactgcgttttcacacagagaaaaatcactcgcccttctcagaggcccaagacaccccctacagataccatcttgtacacggaacttccaaatgctaagcccagatccaaagttgtctcctgcccatgagcaccacagtcaggccttgaggacgtcttctagggagacaacagccctgtctcaaaaccgagttgccagctcccatgtaccagcagctggaatctgaaggcgtgagtcttcatcttagggcatcgctcctcctcacgccacaaatctggtgcctctctcttgcttacaaatgtctaggtccccactgcctgctggaaagaaaacacactcctttgcttagcccacagttctccatttcacttgacccctgcccacctctccaacctaactggcttacttcctagtctacttgaggctgcaatcacactgaggaactcacaattccaaacatacaagaggctccctcttgacgtggcacttacccacgtgctgttccaccttccctcatgctgtttcacctttcttcggactattttccagccttctgtcagcagtgaaacttataaaattttttgtgatttcaatgtagctgtctcctcttcaaataaacatgtctgccctc

SEQ ID NO: 146078 - DNA, 1852 bp, Homo sapiens
  Payload ID: 8970
  Gene Symbol: KIR3DL1
  Gene Name: killer cell immunoglobulin-like receptor, three domains, long cytoplasmic tail, 1
  ENST ID: ENST00000619247
  CDS Start-End: 1-1368
atgtcgctcatggtcgtcagcatggcgtgtgttgggttgttcttggtccagagggccggtccacacatgggtggtcaggacaaacccttcctgtctgcctggcccagcgctgtggtgcctcgaggaggacacgtgactcttcggtgtcactatcgtcataggtttaacaatttcatgctatacaaagaagacagaatccacattcccatcttccatggcagaatattccaggagagcttcaacatgagccctgtgaccacagcacatgcagggaactacacatgtcggggttcacacccacactcccccactgggtggtcggcacccagcaaccccgtggtgatcatggtcacaggaaaccacagaaaaccttccctcctggcccacccaggtcccctggtgaaatcaggagagagagtcatcctgcaatgttggtcagatatcatgtttgagcacttctttctgcacaaagaggggatctctaaggacccctcacgcctcgttggacagatccatgatggggtctccaaggccaatttctccatcggtcccatgatgcttgcccttgcagggacctacagatgctacggttctgttactcacaccccctatcagttgtcagctcccagtgatcccctggacatcgtggtcacaggtccatatgagaaaccttctctctcagcccagccgggccccaaggttcaggcaggagagagcgtgaccttgtcctgtagctcccggagctcctatgacatgtaccatctatccagggaggggggagcccatgaacgtaggctccctgcagtgcgcaaggtcaacagaacattccaggcagatttccctctgggccctgccacccacggagggacctacagatgcttcggctctttccgtcactctccctacgagtggtcagacccgagtgacccactgcttgtttctgtcacaggaaacccttcaagtagttggccttcacccacagaaccaagctccaaatctggtatctgcagacacctgcatgttctgattgggacctcagtggtcatcttcctcttcatcctcctcctcttctttctcctttatcgctggtgctccaacaaaaagaatgctgctgtaatggaccaagagcctgcgggggacagaacagtgaataggcaggactctgatgaacaagaccctcaggaggtgacgtacgcacagttggatcactgcgttttcatacagagaaaaatcagtcgcccttctcagaggcccaagacacccctaacagataccagcgtgtacacggaacttccaaatgctgagcccagatccaaagttgtctcctgcccacgagcaccacagtcaggtcttgagggggttttctagggagacaacagccctgtctcaaaaccaggttgccagatccaatgaaccagcagctggaatctgaaggcatcagtctgcatcttaggggatcgctcttcctcacaccacgaatctgaacatgcctctctcttgcttacaaatgcctaaggtcgccactgcctgctgcagagaaaacacactcctttgcttagcccacaagtatctatttcacttgacccctgcccacctctccaacctaactggcttacttcctagtcctacttgaggctgcaatcacactgaggaactcacaattccaaacatacaagaggctccctcttaacacggcacttacacacttgctgttccaccttccctcatgctgttccacctcccctcagactatctttcagccttctgtcatcagtaaaatttataaattttttttataacttcagtgtagctctctcctcttcaaataaacatgtctgccctcatggtttcg

SEQ ID NO: 146079 - DNA, 1900 bp, Homo sapiens
  Payload ID: 8970
  Gene Symbol: KIR3DL1
  Gene Name: killer cell immunoglobulin-like receptor, three domains, long cytoplasmic tail, 1
  ENST ID: ENST00000612391
  CDS Start-End: 64-1398
ataacatcctgtgcgctgctgagctgagctggggcgcggccgcctgtctgcaccggcagcaccatgtcgctcatggtcgtcagcatggcgtgtgttgggttcttcttggtccagagggccggtccacacgtgggtggtcaggacaagcccttcctgtctgcctggcccagcgctgtggtgcctcgaggaggacacgtgactcttcggtgtcactatcgtcataggtttaacaatttcatgctatacaaagaagacagaatccacgttcccatcttccatggcagattattccaggagagcttcaacatgagccctgtgaccacagcacatgcagggaactacacatgtcggggttcacacccacactcccccactgggtggtcggcacccagcaaccccgtggtgatcatggtcacaggaaaccacagaaaaccttccctcctggcccacccaggtcccctggtgaaatcaggagagagagtcatcctgcaatgttggtcagatatcatgtttgagcacttctttctgcacaaagaggggatctctaaggacccctcacgcctcgttggacagatccatgatggggtctccaaggccaatttctccatcggtcccatgatgcttgcccttgcagggacctacagatgctacggttctgttactcacaccccctatcagttgtcagctcccagtgatcccctggacatcgtggtcacaggtccatatgagaaaccttctctctcagcccagccgggccccaaggttcaggcaggagagagcgtgaccttgtcctgcagctcccggagctcctatgacatgtaccatctatccagggaggggggagcccatgaacgtaggctccctgcagtgcgcaaggtcaacagaacattcaaggcagatttccctctgggccctgccacccacggagggacctacagatgcttcggctctttccgtcactctccctacgagtggtcagacccgagtgacccactgcttgtttctgtcacaggaaacccttcaagtagttggccttcacccacagaaccaagctccaaatctggtaaccccagacacctgcacattctgattgggacctcagtggtcatcatcctcttcatcctcctcctcttctttctccttcatctctggtgctccaacaaaaaaaatgctgctgtaatggaccaagagcctgcagggaacagaacagccaacagcgaggactctgatgaacaagaccctgaggaggtgacatacgcacagttggatcactgcgttttcacacagagaaaaatcactcgcccttctcagaggcccaagacaccccctacagataccatcttgtacacggaacttccaaatgctaagcccagatccaaagttgtctcctgcccatgagcaccacagtcaggccttgaggacgtcttctagggagacaacagccctgtctcaaaaccgagttgccagctcccatgtaccagcagctggaatctgaaggcgtgagtcttcatcttagggcatcgctcctcctcacgccacaaatctggtgcctctctcttgcttacaaatgtctaggtccccactgcctgctggaaagaaaacacactcctttgcttagcccacagttctccatttcacttgacccctgcccacctctccaacctaactggcttacttcctagtctacttgaggctgcaatcacactgaggaactcacaattccaaacatacaagaggctccctcttgacgtggcacttacccacgtgctgttccaccttccctcatgctgtttcacctttcttcggactattttccagccttctgtcagcagtgaaacttataaaattttttgtgatttcaatgtagctgtctcctcttcaaataaacatgtctgccctc

SEQ ID NO: 146080 - DNA, 1497 bp, Homo sapiens
  Payload ID: 8970
  Gene Symbol: KIR3DL1
  Gene Name: killer cell immunoglobulin-like receptor, three domains, long cytoplasmic tail, 1
  ENST ID: ENST00000620643
  CDS Start-End: 26-1393
gctgcctgtctgcaccggcagcaccatgtcgctcatggtcgtcagcatggcgtgtgttgggttcttcttgctgcagggggcctggccacatgagggtggtcaggacaagcccttcctgtctgcctggcccagcgctgtggtgcctcgaggaggacacgtgactcttcggtgtcactatcgtcataggtttaacaatttcatgctatacaaagaagacagaatccacgttcccatcttccatggcagattattccaggagagcttcaacatgagccctgtgaccacagcacatgcagggaactacacatgtcggggttcacacccacactcccccactgggtggtcggcacccagcaaccccgtggtgatcatggtcacaggaaaccacagaaaaccttccctcctggcccacccaggtcccctggtgaaatcaggagagagagtcatcctgcaatgttggtcagatatcatgtttgagcacttctttctgcacaaagaggggatctctaaggacccctcacgcctcgttggacagatccatgatggggtctccaaggccaatttctccatcggtcccatgatgcttgcccttgcagggacctacagatgctacggttctgttactcacaccccctatcagttgtcagctcccagtgatcccctggacatcgtggtcacaggtccatatgagaaaccttctctctcagcccagccgggccccaaggttcaggcaggagagagcgtgaccttgtcctgcagctcccggagctcctatgacatgtaccatctatccagggaggggggagcccatgaacgtaggctccctgcagtgcgcaaggtcaacagaacattcaaggcagatttccctctgggccctgccacccacggagggacctacagatgcttcggctctttccgtcactctccctacgagtggtcagacccgagtgacccactgcttgtttctgtcacaggaaacccttcaagtagttggccttcacccacagaaccaagctccaaatctggtaaccccagacacctgcacattctgattgggacctcagtggtcatcatcctcttcatcctcctcctcttctttctccttcatctctggtgctccaacaaaaaaaatgctgctgtaatggaccaagagcctgcagggaacagaacagccaacagcgaggactctgatgaacaagaccctgaggaggtgacatacgcacagttggatcactgcgttttcacacagagaaaaatcactcgcccttctcagaggcccaagacaccccctacagataccatcttgtacacggaacttccaaatgctaagcccagatccaaagttgtctcctgcccacgagcaccacagtcaggccttgaggggatcttctagggagacaacagccctgtctcaaaaccgggttgccagctcccatgtaccagcagctggaatctgaaggcatcagtcttcatcttagggcatcgctcttcctcaca

SEQ ID NO: 146081 - DNA, 1865 bp, Homo sapiens
  Payload ID: 8970
  Gene Symbol: KIR3DL1
  Gene Name: killer cell immunoglobulin-like receptor, three domains, long cytoplasmic tail, 1
  ENST ID: ENST00000621718
  CDS Start-End: 28-1362
cggccgcctgtctgcaccggcagcaccatgttgctcatggtcgtcagcatggcgtgtgttgggttcttcttggtccagagggccggtccacacgtgggtggtcaggacaagcccttcctgtctgcctggcccagcgctgtggtgcctcgaggaggacacgtgactcttcggtgtcactatcgtcataggtttaacaatttcatgctatacaaagaagacagaatccacgttcccatcttccatggcagattattccaggagagcttcaacatgagccctgtgaccacagcacatgcagggaactacacatgtcggggttcacacccacactcccccactgggtggtcggcacccagcaaccccgtggtgatcatggtcacaggaaaccacagaaaaccttccctcctggcccacccaggtcccctggtgaaatcaggagagagagtcatcctgcaatgttggtcagatatcatgtttgagcacttctttctgcacaaagaggggatctctaaggacccctcacgcctcgttggacagatccatgatggggtctccaaggccaatttctccatcggtcccatgatgcttgcccttgcagggacctacagatgctacggttctgttactcacaccccctatcagttgtcagctcccagtgatcccctggacatcgtggtcacaggtccatatgagaaaccttctctctcagcccagccgggccccaaggttcaggcaggagagagcgtgaccttgtcctgtagctcccggagctcctatgacatgtaccatctatccagggaggggggagcccatgaacgtaggctccctgcagtgcgcaaggtcaacagaacattccaggcagatttccctctgggccctgccacccacggagggacctacagatgcttcggctctttccgtcactctccctacgagtggtcagacccgagtgacccactgcttgtttctgtcacaggaaacccttcaagtagttggccttcacccacagaaccaagctccaaatctggtaaccccagacacctgcacgttctgattgggacctcagtggtcatcatcctcttcatcctcctcctcttctttctccttcatctctggtgctccaacaaaaaaaatgctgctgtaatggaccaagagcctgcagggaacagaacagccaacagcgaggactctgatgaacaagaccctcaggaggtgacatatgcacagttggatcactgcgttttcacacagagaaaaatcactcgcccttctcagaggcccaagacaccccctacagataccatcttgtacacggaacttccaaatgctaagcccagatccaaagttgtctcctgcccatgagcaccacagtcaggccttgagggcgtcttctagggagacaacagccctgtctcaaaaccgagttgccagctcccatgtaccagcagctggaatctgaaggcgtgagtcttcatcttagggcatcgctcctcctcacgccacaaatctggtgcctctctcttgcttacaaatgtctaggtccccactgcctgctggaaagaaaacacactcctttgcttagcccacagttctccatttcacttgacccctgcccacctctccaacctaactggcttacttcctagtctacttgaggctgcgatcacactgagtaactcacaattccaaacatacaagaggctccctcttgacgtggcacttacccacgtgctgttccaccttccctcatgctgtttcacctttcttcggactattttccagccttctgtcagcagtgaaacttataaaattttttgtgatttcaatgtagctgtctcctcttcaaataaacatgtctgccctca

SEQ ID NO: 146082 - DNA, 1658 bp, Homo sapiens
  Payload ID: 8970
  Gene Symbol: KIR3DL1
  Gene Name: killer cell immunoglobulin-like receptor, three domains, long cytoplasmic tail, 1
  ENST ID: ENST00000621071
  CDS Start-End: 34-1368
ggggcgcggccgcctgtctgcaccggcagcaccatgttgctcatggtcgtcagcatggcgtgtgttgggttcttcttggtccagagggccggtccacacgtgggtggtcaggacaagcccttcctgtctgcctggcccagcgctgtggtgcctcgaggaggacacgtgactcttcggtgtcactatcgtcataggtttaacaatttcatgctatacaaagaagacagaatccacgttcccatcttccatggcagattattccaggagagcttcaacatgagccctgtgaccacagcacatgcagggaactacacatgtcggggttcacacccacactcccccactgggtggtcggcacccagcaaccccgtggtgatcatggtcacaggaaaccacagaaaaccttccctcctggcccacccaggtcccctggtgaaatcaggagagagagtcatcctgcaatgttggtcagatatcatgtttgagcacttctttctgcacaaagaggggatctctaaggacccctcaagcctcgttggacagatccatgatggggtctccaaggccaatttctccatcggtcccatgatgcttgcccttgcagggacctacagatgctacggttctgttactcacaccccctatcagttgtcagctcccagtgatcccctggacatcgtggtcacaggtccatatgagaaaccttctctctcagcccagccgggccccaaggttcaggcaggagagagcgtgaccttgtcctgtagctcccggagctcctatgacatgtaccatctatccagggaggggggagcccatgaacgtaggctccctgcagtgcgcaaggtcaacagaacattccaggcagatttccctctgggccctgccacccacggagggacctacagatgcttcggctctttccgtcactctccctacgagtggtcagacccgagtgacccactgcttgtttctgtcacaggaaacccttcaagtagttggccttcacccacagaaccaagctccaaatctggtaaccccagacacctgcacattctgattgggacctcagtggtcatcatcctcttcatcctcctcctcttctttctccttcatctctggtgctccaacaaaaaaaatgctgctgtaatggaccaagagcctgcagggaacagaacagccaacagcgaggactctgatgaacaagaccctcaggaggtgacatacgcacagttggatcactgcgttttcacacagagaaaaatcactcgcccttctcagaggcccaagacaccccctacagataccatcttgtacacggaacttccaaatgctaagcccagatccaaagttgtctcctgcccatgagcaccacagtcaggccttgaggacgtcttctagggagacaacagccctgtctcaaaaccgagttgccagctcccatgtaccagcagctggaatctgaaggcgtgagtcttcatcttagggcatcgctcctcctcacgccacaaatctggtgcctctctcttgcttacaaatgtctaggtccccactgcctgctggaaagaaaacacactcctttgcttagcccacagttctccatttcacttgacccctgcccacctctccaacctaactggcttacttcctagtctact

SEQ ID NO: 146083 - DNA, 1900 bp, Homo sapiens
  Payload ID: 8970
  Gene Symbol: KIR3DL1
  Gene Name: killer cell immunoglobulin-like receptor, three domains, long cytoplasmic tail, 1
  ENST ID: ENST00000615312
  CDS Start-End: 64-1398
ataacatcctgtgcgctgctgagctgagctggggcgcggccgcctgtctgcaccggcagcaccatgtcgctcatggtcgtcagcatggcgtgtgttgggttcttcttggtccagagggccggtccacacgtgggtggtcaggacaagcccttcctgtctgcctggcccagcgctgtggtgcctcgaggaggacacgtgactcttcggtgtcactatcgtcataggtttaacaatttcatgctatacaaagaagacagaatccacgttcccatcttccatggcagattattccaggagagcttcaacatgagccctgtgaccacagcacatgcagggaactacacatgtcggggttcacacccacactcccccactgggtggtcggcacccagcaaccccgtggtgatcatggtcacaggaaaccacagaaaaccttccctcctggcccacccaggtcccctggtgaaatcaggagagagagtcatcctgcaatgttggtcagatatcatgtttgagcacttctttctgcacaaagaggggatctctaaggacccctcacgcctcgttggacagatccatgatggggtctccaaggccaatttctccatcggtcccatgatgcttgcccttgcagggacctacagatgctacggttctgttactcacaccccctatcagttgtcagctcccagtgatcccctggacatcgtggtcacaggtccatatgagaaaccttctctctcagcccagccgggccccaaggttcaggcaggagagagcgtgaccttgtcctgcagctcccggagctcctatgacatgtaccatctatccagggaggggggagcccatgaacgtaggctccctgcagtgcgcaaggtcaacagaacattccaggcagatttccctctgggccctgccacccacggagggacctacagatgcttcggctctttccgtcactctccctacgagtggtcagacccgagtgacccactgcttgtttctgtcacaggaaacccttcaagtagttggccttcacccacagaaccaagctccaaatctggtaaccccagacacctgcacattctgattgggacctcagtggtcatcatcctcttcatcctcctcctcttctttctccttcatctctggtgctccaacaaaaaaaatgctgctgtaatggaccaagagcctgcagggaacagaacagccaacagcgaggactctgatgaacaagaccctcaggaggtgacatacgcacagttggatcactgcgttttcacacagagaaaaatcactcgcccttctcagaggcccaagacaccccctacagataccatcttgtacacggaacttccaaatgctaagcccagatccaaagttgtctcctgcccatgagcaccacagtcaggccttgaggacgtcttctagggagacaacagccctgtctcaaaaccgagttgccagctcccatgtaccagcagctggaatctgaaggcgtgagtcttcatcttagggcatcgctcctcctcacgccacaaatctggtgcctctctcttgcttacaaatgtctaggtccccactgcctgctggaaagaaaacacactcctttgcttagcccacagttctccatttcacttgacccctgcccacctctccaacctaactggcttacttcctagtctacttgaggctgcaatcacactgaggaactcacaattccaaacatacaagaggctccctcttgacgtggcacttacccacgtgctgttccaccttccctcatgctgtttcacctttcttcggactattttccagccttctgtcagcagtgaaacttataaaattttttgtgatttcaatgtagctgtctcctcttcaaataaacatgtctgccctc

SEQ ID NO: 146084 - DNA, 1810 bp, Homo sapiens
  Payload ID: 8970
  Gene Symbol: KIR3DL1
  Gene Name: killer cell immunoglobulin-like receptor, three domains, long cytoplasmic tail, 1
  ENST ID: ENST00000619271
  CDS Start-End: 25-1308
ccgcctgtctgcaccggcagcaccatgttgctcatggtcgtcagcatggcgtgtgttgggttcttcttggtccagagggccggtccacacatgggtggtcaggacaagcccttcctgtctgcctggcccagcgctgtggtgcctcgaggaggacacgtgactcttcggtgtcactatcgtcataggtttaacaatttcatgctatacaaagaagacagaatccacgttcccatcttccatggcagattattccaggagagcttcaacatgagccctgtgaccacagcacatgcagggaactacacatgtcggggttcacacccacactcccccactgggtggtcggcacccagcaaccccgtggtgatcatggtcacaggaaaccacagaaaaccttccctcctggcccacccaggtcccctggtgaaatcaggagagagagtcatcctgcaatgttggtcagatatcatgtttgagcacttctttctgcacaaagaggggatctctaaggacccctcacgcctcgttggacagatccatgatggggtctccaaggccaatttctccatcggtcccatgatgcttgcccttgcagggacctacagatgctacggttctgttactcacaccccctatcagttgtcagctcccagtgatcccctggacatcgtggtcacaggtccatatgagaaaccttctctctcagcccagccgggccccaaggttcaggcaggagagagcgtgaccttgtcctgtagctcccggagctcctatgacatgtaccatctatccagggaggggggagcccatgaacgtaggctccctgcagtgcgcaaggtcaacagaacattccaggcagatttccctctgggccctgccacccacggagggacctacagatgcttcggctctttccgtcactctccctacgagtggtcagacccgagtgacccactgcttgtttctgtcacaggtaaccccagacacctgcacattctgattgggacctcagtggtcatcatcctcttcatcctcctcctcttctttctccttcatctctggtgctccaacaaaaaaaatgctgctgtaatggaccaagagcctgcagggaacagaacagccaacagcgaggactctgatgaacaagaccctgaggaggtgacatacgcacagttggatcactgcgttttcacacagagaaaaatcactcgcccttctcagaggcccaagacaccccctacagataccatcttgtacacggaacttccaaatgctaagcccagatccaaagttgtctcctgcccatgagcaccacagtcaggccttgaggacgtcttctagggagacaacagccctgtctcaaaaccgagttgccagctcccatgtaccagcagctggaatctgaaggcgtgagtcttcatcttagggcatcgctcctcctcacgccacaaatctggtgcctctctcttgcttacaaatgtctaggtccccactgcctgctggaaagaaaacacactcctttgcttagcccacagttctccatttcacttgacccctgcccacctctccaacctaactggcttacttcctagtctacttgaggctgcaatcacactgaggaactcagaattccaaacatacaagaggctccctcttgacgtggcacttacccacgtgctgttccaccttccctcatgctgtttcacctttcttcggactattttccagccttctgtcagcagtgaaacttataaaattttttgtgatttcaatgtagctgtctcctcttcaaataaacatgtctgccctc

SEQ ID NO: 146085 - DNA, 1810 bp, Homo sapiens
  Payload ID: 8970
  Gene Symbol: KIR3DL1
  Gene Name: killer cell immunoglobulin-like receptor, three domains, long cytoplasmic tail, 1
  ENST ID: ENST00000620450
  CDS Start-End: 25-1308
ccgcctgtctgcaccggcagcaccatgttgctcatggtcgtcagcatggcgtgtgttgggttcttcttggtccagagggccggtccacacgtgggtggtcaggacaagcccttcctgtctgcctggcccagcgctgtggtgcctcgaggaggacacgtgactcttcggtgtcactatcgtcataggtttaacaatttcatgctatacaaagaagacagaatccacgttcccatcttccatggcagattattccaggagagcttcaacatgagccctgtgaccacagcacatgcagggaactacacatgtcggggttcacacccacactcccccactgggtggtcggcacccagcaaccccgtggtgatcatggtcacaggaaaccacagaaaaccttccctcctggcccacccaggtcccctggtgaaatcaggagagagagtcatcctgcaatgttggtcagatatcatgtttgagcacttctttctgcacaaagaggggatctctaaggacccctcacgcctcgttggacagatccatgatggggtctccaaggccaatttctccatcggtcccatgatgcttgcccttgcagggacctacagatgctacggttctgttactcacaccccctatcagttgtcagctcccagtgatcccctggacatcgtggtcacaggtccatatgagaaaccttctctctcagcccagccgggccccaaggttcaggcaggagagagcgtgaccttgtcctgcagctcccggagctcctatgacatgtaccatctatccagggaggggggagcccatgaacgtaggctccctgcagtgcgcaaggtcaacagaacattccaggcagatttccctctgggccctgccacccacggagggacctacagatgcttcggctctttccgtcactctccctacgagtggtcagacccgagtgacccactgcttgtttctgtcacaggtaaccccagacacctgcacattctgattgggacctcagtggtcatcatcctcttcatcctcctcctcttctttctccttcatctctggtgctccaacaaaaaaaatgctgctgtaatggaccaagagcctgcagggaacagaacagccaacagcgaggactctgatgaacaagaccctgaggaggtgacatacgcacagttggatcactgcgttttcacacagagaaaaatcactcgcccttctcagaggcccaagacaccccctacagataccatcttgtacacggaacttccaaatgctaagcccagatccaaagttgtctcctgcccatgagcaccacagtcaggccttgaggacgtcttctagggagacaacagccctgtctcaaaaccgagttgccagctcccatgtaccagcagctggaatctgaaggcgtgagtcttcatcttagggcatcgctcctcctcacgccacaaatctggtgcctctctcttgcttacaaatgtctaggtccccactgcctgctggaaagaaaacacactcctttgcttagcccacagttctccatttcacttgacccctgcccacctctccaacctaactggcttacttcctagtctacttgaggctgcaatcacactgaggaactcacaattccaaacatacaagaggctccctcttgacgtggcacttacccacgtgctgttccaccttccctcatgctgtttcacctttcttcggactattttccagccttctgtcagcagtgaaacttataaaattttttgtgatttcaatgtagctgtctcctcttcaaataaacatgtctgccctc

SEQ ID NO: 146086 - DNA, 1658 bp, Homo sapiens
  Payload ID: 8970
  Gene Symbol: KIR3DL1
  Gene Name: killer cell immunoglobulin-like receptor, three domains, long cytoplasmic tail, 1
  ENST ID: ENST00000619211
  CDS Start-End: 34-1368
ggggcgcggccgcctgtctgcaccggcagcaccatgttgctcatggtcgtcagcatggcgtgtgttgggttcttcttggtccagagggccggtccacacgtgggtggtcaggacaagcccttcctgtctgcctggcccagcgctgtggtgcctcgaggaggacacgtgactcttcggtgtcactatcgtcataggtttaacaatttcatgctatacaaagaagacagaatccacgttcccatcttccatggcagattattccaggagagcttcaacatgagccctgtgaccacagcacatgcagggaactacacatgtcggggttcacacccacactcccccactgggtggtcggcacccagcaaccccgtggtgatcatggtcacaggaaaccacagaaaaccttccctcctggcccacccaggtcccctggtgaaatcaggagagagagtcatcctgcaatgttggtcagatatcatgtttgagcacttctttctgcacaaagaggggatctctaaggacccctcacgcctcgttggacagatccatgatggggtctccaaggccaatttctccatcggtcccatgatgcttgcccttgcagggacctacagatgctacggttctgttactcacaccccctatcagttgtcagctcccagtgatcccctggacatcgtggtcacaggtccatatgagaaaccttctctctcagcccagccgggccccaaggttcaggcaggagagagcgtgaccttgtcctgcagctcccggagctcctatgacatgtaccatctatccagggaggggggagcccatgaacgtaggctccctgcagtgcgcaaggtcaacagaacattccaggcagatttccctctgggccctgccacccacggagggacctacagatgcttcggctctttccgtcactctccctacgagtggtcagacccgagtgacccactgcttgtttctgtcacaggaaacccttcaagtagttggccttcacccacagaaccaagctccaaatctggtaaccccagacacctgcacattctgattgggacctcagtggtcatcatcctcttcatcctcctcctcttctttctccttcatctctggtgctccaacaaaaaaaatgctgctgtaatggaccaagagcctgcagggaacagaacagccaacagcgaggactctgatgaacaagaccctcaggaggtgacatacgcacagttggatcactgcgttttcacacagagaaaaatcactcgcccttctcagaggcccaagacaccccctacagataccatcttgtacacggaacttccaaatgctaagcccagatccaaagttgtctcctgcccatgagcaccacagtcaggccttgaggacgtcttctagggagacaacagccctgtctcaaaaccgagttgccagctcccatgtaccagcagctggaatctgaaggcgtgagtcttcatcttagggcatcgctcctcctcacgccacaaatctggtgcctctctcttgcttacaaatgtctaggtccccactgcctgctggaaagaaaacacactcctttgcttagcccacagttctccatttcacttgacccctgcccacctctccaacctaactggcttacttcctagtctact

SEQ ID NO: 146087 - DNA, 1852 bp, Homo sapiens; identical to SEQ ID NO: 146078
  Payload ID: 8970
  Gene Symbol: KIR3DL1
  Gene Name: killer cell immunoglobulin-like receptor, three domains, long cytoplasmic tail, 1
  ENST ID: ENST00000617464
  CDS Start-End: 1-1368

SEQ ID NO: 146088 - DNA, 1900 bp, Homo sapiens
  Payload ID: 8970
  Gene Symbol: KIR3DL1
  Gene Name: killer cell immunoglobulin-like receptor, three domains, long cytoplasmic tail, 1
  ENST ID: ENST00000620343
  CDS Start-End: 64-1398
ataacatcctgtgcgctgctgagctgagctggggcgcggccgcctgtctgcaccggcagcaccatgtcgctcatggtcgtcagcatggcgtgtgttgggttcttcttggtccagagggccggtccacacgtgggtggtcaggacaagcccttcctgtctgcctggcccagcgctgtggtgcctcgaggaggacacgtgactcttcggtgtcactatcgtcataggtttaacaatttcatgctatacaaagaagacagaatccacgttcccatcttccatggcagattattccaggagagcttcaacatgagccctgtgaccacagcacatgcagggaactacacatgtcggggttcacacccacactcccccactgggtggtcggcacccagcaaccccgtggtgatcatggtcacaggaaaccacagaaaaccttccctcctggcccacccaggtcccctggtgaaatcaggagagagagtcatcctgcaatgttggtcagatatcatgtttgagcacttctttctgcacaaagaggggatctctaaggacccctcacgcctcgttggacagatccatgatggggtctccaaggccaatttctccatcggtcccatgatgcttgcccttgcagggacctacagatgctacggttctgttactcacaccccctatcagttgtcagctcccagtgatcccctggacatcgtggtcacaggtccatatgagaaaccttctctctcagcccagccgggccccaaggttcaggcaggagagagcgtgaccttgtcctgcagctcccggagctcctatgacatgtaccatctatccagggaggggggagcccatgaacgtaggctccctgcagtgcgcaaggtcaacagaacattccaggcagatttccctctgggccctgccacccacggagggacctacagatgcttcggctctttccgtcactctccctacgagtggtcagacccgagtgacccactgcttgtttctgtcacaggaaacccttcaagtagttggccttcacccacagaaccaagctccaaatctggtaaccccagacacctgcacattctgattgggacctcagtggtcatcatcctcttcatcctcctcctcttctttctccttcatctctggtgctccaacaaaaaaaatgctgctgtaatggaccaagagcctgcagggaacagaacagccaacagcgaggactctgatgaacaagaccctgaggaggtgacatacgcacagttggatcactgcgttttcacacagagaaaaatcactcgcccttctcagaggcccaagacaccccctacagataccatcttgtacacggaacttccaaatgctaagcccagatccaaagttgtctcctgcccatgagcaccacagtcaggccttgaggacgtcttctagggagacaacagccctgtctcaaaaccgagttgccagctcccatgtaccagcagctggaatctgaaggcgtgagtcttcatcttagggcatcgctcctcctcacgccacaaatctggtgcctctctcttgcttacaaatgtctaggtccccactgcctgctggaaagaaaacacactcctttgcttagcccacagttctccatttcacttgacccctgcccacctctccaacctaactggcttacttcctagtctacttgaggctgcaatcacactgaggaactcacaattccaaacatacaagaggctccctcttgacgtggcacttacccacgtgctgttccaccttccctcatgctgtttcacctttcttcggactattttccagccttctgtcagcagtgaaacttataaaattttttgtgatttcaatgtagctgtctcctcttcaaataaacatgtctgccctc

SEQ ID NO: 146089 - DNA, 1865 bp, Homo sapiens
  Payload ID: 8970
  Gene Symbol: KIR3DL1
  Gene Name: killer cell immunoglobulin-like receptor, three domains, long cytoplasmic tail, 1
  ENST ID: ENST00000619476
  CDS Start-End: 28-1362
cagccgcctgtctgcaccggcagcaccatgtcgctcatggtcgtcagcatggcgtgtgttgggttgttcttggtccagagggccggtccacacatgggtggtcaggacaaacccttcctgtctgcctggcccagcgctgtggtgcctcgaggaggacacgtgactcttcggtgtcactatcgtcataggtttaacaatttcatgctatacaaagaagacagaatccacattcccatcttccatggcagaatattccaggagagcttcaacatgagccctgtgaccacagcacatgcagggaactacacatgtcggggttcacacccacactcccccactgggtggtcggcacccagcaaccccgtggtgatcatggtcacaggaaaccacagaaaaccttccctcctggcccacccaggtcccctggtgaaatcaggagagagagtcatcctgcaatgttggtcagatatcatgtttgagcacttctttctgcacaaagaggggatctctaaggacccctcacgcctcgttggacagatccatgatggggtctccaaggccaatttctccatcggtcccatgatgcttgcccttgcagggacctacagatgctacggttctgttactcacacctcctatcagttgtcagctcccagtgatcccctggacatcgtggtcacaggtccatatgagaaaccttctctctcagcccagccgggccccaaggttcaggcaggagagagcgtgaccttgtcctgtagctcccggagctcctatgacatgtaccatctatccagggaggggggagcccatgaacgtaggctccctgcagtgcgcaaggtcaacagaacattccaggcagatttccctctgggccctgccacccacggagggacctacagatgctttggctctttccgtcactctccctacgagttgtcagacccgagtgacccactgcttgtttctgtcacaggaaacccttcaagtagttggccttcacccacagaaccaagctccaaatctggtaaccccagacacctgcacattctgattgggacctcagtggtcatcatcctcttcatcctcctcctcttctttctccttcatctctggtgctccaacaaaaaaaatgctgctgtaatggaccaagagcctgcagggaacagaacagccaacagcgaggactctgatgaacaagaccctgaggaggtgacatacgcacagttggatcactgcgttttcacacagagaaaaatcactcgcccttctcagaggcccaagacaccccctacagataccatcttgtacacggaacttccaaatgctaagcccagatccaaagttgtctcctgcccatgagcaccacagtcaggccttgagggcgtcttctagggagacaacagccctgtctcaaaaccgagttgccagctcccatgtaccagcagctggaatctgaaggcgtgagtcttcatcttagggcatcgctcctcctcacgccacaaatctggtgcctctctcttgcttacaaatgtctaggtccccactgcctgctggaaagaaaacacactcctttgcttagcccacagttctccatttcacttgacccctgcccacctctccaacctaactggcttacttcctagtctacttgaggctgcgatcacactgaggaactcacaattccaaacatacaagaggctccctcttgacgtggcacttacccacgtgctgttccaccttccctcatgctgtttcacctttcttcggactattttccagccttctgtcagcagtgaaacttataaaattttttgtgatttcaatgtagctgtctcctcttcaaataaacatgtctgccctca

SEQ ID NO: 146090 - DNA, 1865 bp, Homo sapiens; identical to SEQ ID NO: 146089
  Payload ID: 8970
  Gene Symbol: KIR3DL1
  Gene Name: killer cell immunoglobulin-like receptor, three domains, long cytoplasmic tail, 1
  ENST ID: ENST00000622515
  CDS Start-End: 28-1362

SEQ ID NO: 146091 - DNA, 1658 bp, Homo sapiens
  Payload ID: 8970
  Gene Symbol: KIR3DL1
  Gene Name: killer cell immunoglobulin-like receptor, three domains, long cytoplasmic tail, 1
  Uniprot ID: P43629
  ENST ID: ENST00000621398
  CDS Start-End: 34-1368
ggggcgcggccgcctgtctgcaccggcagcaccatgtcgctcatggtcgtcagcatggcgtgtgttgggttgttcttggtccagagggccggtccacacatgggtggtcaggacaaacccttcctgtctgcctggcccagcgctgtggtgcctcgaggaggacacgtgactcttcggtgtcactatcgtcataggtttaacaatttcatgctatacaaagaagacagaatccacattcccatcttccatggcagaatattccaggagagcttcaacatgagccctgtgaccacagcacatgcagggaactacacatgtcggggttcacacccacactcccccactgggtggtcggcacccagcaaccccgtggtgatcatggtcacaggaaaccacagaaaaccttccctcctggcccacccaggtcccctggtgaaatcaggagagagagtcatcctgcaatgttggtcagatatcatgtttgagcacttctttctgcacaaagaggggatctctaaggacccctcacgcctcgttggacagatccatgatggggtctccaaggccaatttctccatcggtcccatgatgcttgcccttgcagggacctacagatgctacggttctgttactcacaccccctatcagttgtcagctcccagtgatcccctggacatcgtggtcacaggtccatatgagaaaccttctctctcagcccagccgggccccaaggttcaggcaggagagagcgtgaccttgtcctgtagctcccggagctcctatgacatgtaccatctatccagggaggggggagcccatgaacgtaggctccctgcagtgcgcaaggtcaacagaacattccaggcagatttccctctgggccctgccacccacggagggacctacagatgcttcggctctttccgtcactctccctacgagtggtcagacccgagtgacccactgcttgtttctgtcacaggaaacccttcaagtagttggccttcacccacagaaccaagctccaaatctggtaaccccagacacctgcacattctgattgggacctcagtggtcatcatcctcttcatcctcctcctcttctttctccttcatctctggtgctccaacaaaaaaaatgctgctgtaatggaccaagagcctgcagggaacagaacagccaacagcgaggactctgatgaacaagaccctgaggaggtgacatacgcacagttggatcactgcgttttcacacagagaaaaatcactcgcccttctcagaggcccaagacaccccctacagataccatcttgtacacggaacttccaaatgctaagcccagatccaaagttgtctcctgcccatgagcaccacagtcaggccttgaggacgtcttctagggagacaacagccctgtctcaaaaccgagttgccagctcccatgtaccagcagctggaatctgaaggcgtgagtcttcatcttagggcatcgctcctcctcacgccacaaatctggtgcctctctcttgcttacaaatgtctaggtccccactgcctgctggaaagaaaacacactcctttgcttagcccacagttctccatttcacttgacccctgcccacctctccaacctaactggcttacttcctagtctact

SEQ ID NO: 146092 - DNA, 1863 bp, Homo sapiens
  Payload ID: 8970
  Gene Symbol: KIR3DL1
  Gene Name: killer cell immunoglobulin-like receptor, three domains, long cytoplasmic tail, 1
  ENST ID: ENST00000613869
  CDS Start-End: 26-1360
gccgcctgtctgcaccggcagcaccatgttgctcatggtcgtcagcatggcgtgtgttgggttcttcttggtccagagggccggtccacacgtgggtggtcaggacaagcccttcctgtctgcctggcccagcgctgtggtgcctcgaggaggacacgtgactcttcggtgtcactatcgtcataggtttaacaatttcatgctatacaaagaagacagaatccacgttcccatcttccatggcagattattccaggagagcttcaacatgagccctgtgaccacagcacatgcagggaactacacatgtcggggttcacacccacactcccccactgggtggtcggcacccagcaaccccgtggtgatcatggtcacaggaaaccacagaaaaccttccctcctggcccacccaggtcccctggtgaaatcaggagagagagtcatcctgcaatgttggtcagatatcatgtttgagcacttctttctgcacaaagaggggatctctaaggacccctcacgcctcgttggacagatccatgatggggtctccaaggccaatttctccatcggtcccatgatgcttgcccttgcagggacctacagatgctacggttctgttactcacaccccctatcagttgtcagctcccagtgatcccctggacatcgtggtcacaggtccatatgagaaaccttctctctcagcccagccgggccccaaggttcaggcaggagagagcgtgaccttgtcctgtagctcccggagctcctatgacatgtaccatctatccagggaggggggagcccatgaacgtaggctccctgcagtgcgcaaggtcaacagaacattccaggcagatttccctctgggccctgccacccacggagggacctacagatgcttcggctctttccgtcactctccctacgagtggtcagacccgagtgacccactgcttgtttctgtcacaggaaacccttcaagtagttggccttcacccacagaaccaagctccaaatctggtaaccccagacacctgcacattctgattgggacctcagtggtcatcatcctcttcatcctcctcctcttctttctccttcatctctggtgctccaacaaaaaaaatgctgctgtaatggaccaagagcctgcagggaacagaacagccaacagcgaggactctgatgaacaagaccctgaggaggtgacatacgcacagttggatcactgcgttttcacacagagaaaaatcactcgcccttctcagaggcccaagacaccccctacagataccatcttgtacacggaacttccaaatgctaagcccagatccaaagttgtctcctgcccatgagcaccacagtcaggccttgaggacatcttctagggagacaacagccctgtctcaaaaccgagttgccagctcccatgtaccagcagctggaatctgaaggcgtgagtcttcatcttagggcatcgctcctcctcacgccacaaatctggtgcctctctcttgcttacaaatgtctaggtccccactgcctgctggaaagaaaacacactcctttgcttagcccacagttctccatttcacttgacccctgcccacctctccaacctaactggcttacttcctagtctacttgaggctgcaatcacactgaggaactcacaattccaaacatacaagaggctccctcttgacgtggcacttacccacgtgctgttccaccttccctcatgctgtttcacctttcttcggactattttccagccttctgtcagcagtgaaacttataaaattttttgtgatttcaatgtagctgtctcctcttcaaataaacatgtctgccctca

SEQ ID NO: 146093 - DNA, 1900 bp, Homo sapiens; identical to SEQ ID NO: 146088
  Payload ID: 8970
  Gene Symbol: KIR3DL1
  Gene Name: killer cell immunoglobulin-like receptor, three domains, long cytoplasmic tail, 1
  ENST ID: ENST00000618560
  CDS Start-End: 64-1398

SEQ ID NO: 146094 - DNA, 1811 bp, Homo sapiens
  Payload ID: 8970
  Gene Symbol: KIR3DL1
  Gene Name: killer cell immunoglobulin-like receptor, three domains, long cytoplasmic tail, 1
  ENST ID: ENST00000620834
  CDS Start-End: 25-1308
ccgcctgtctgcaccggcagcaccatgttgctcatggtcgtcagcatggcgtgtgttgggttcttcttggtccagagggccggtccacacgtgggtggtcaggacaagcccttcctgtctgcctggcccagcgctgtggtgcctcgaggaggacacgtgactcttcggtgtcactatcgtcataggtttaacaatttcatgctatacaaagaagacagaatccacgttcccatcttccatggcagattattccaggagagcttcaacatgagccctgtgaccacagcacatgcagggaactacacatgtcggggttcacacccacactcccccactgggtggtcggcacccagcaaccccgtggtgatcatggtcacaggaaaccacagaaaaccttccctcctggcccacccaggtcccctggtgaaatcaggagagagagtcatcctgcaatgttggtcagatatcatgtttgagcacttctttctgcacaaagaggggatctctaaggacccctcaagcctcgttggacagatccatgatggggtctccaaggccaatttctccatcggtcccatgatgcttgcccttgcagggacctacagatgctacggttctgttactcacaccccctatcagttgtcagctcccagtgatcccctggacatcgtggtcacaggtccatatgagaaaccttctctctcagcccagccgggccccaaggttcaggcaggagagagcgtgaccttgtcctgtagctcccggagctcctatgacatgtaccatctatccagggaggggggagcccatgaacgtaggctccctgcagtgcgcaaggtcaacagaacattccaggcagatttccctctgggccctgccacccacggagggacctacagatgcttcggctctttccgtcactctccctacgagtggtcagacccgagtgacccactgcttgtttctgtcacaggtaaccccagacacctgcacattctgattgggacctcagtggtcatcatcctcttcatcctcctcctcttctttctccttcatctctggtgctccaacaaaaaaaatgctgctgtaatggaccaagagcctgcagggaacagaacagccaacagcgaggactctgatgaacaagaccctcaggaggtgacatacgcacagttggatcactgcgttttcacacagagaaaaatcactcgcccttctcagaggcccaagacaccccctacagataccatcttgtacacggaacttccaaatgctaagcccagatccaaagttgtctcctgcccatgagcaccacagtcaggccttgaggacgtcttctagggagacaacagccctgtctcaaaaccgagttgccagctcccatgtaccagcagctggaatctgaaggcgtgagtcttcatcttagggcatcgctcctcctcacgccacaaatctggtgcctctctcttgcttacaaatgtctaggtccccactgcctgctggaaagaaaacacactcctttgcttagcccacagttctccatttcacttgacccctgcccacctctccaacctaactggcttacttcctagtctacttgaggctgcaatcacactgaggaactcacaattccaaacatacaagaggctccctcttgacgtggcacttacccacgtgctgttccaccttccctcatgctgtttcacctttcttcggactattttccagccttctgtcagcagtgaaacttataaaattttttgtgatttcaatgtagctgtctcctcttcaaataaacatgtctgccctca

SEQ ID NO: 146095 - DNA, 1663 bp, Homo sapiens
  Payload ID: 8970
  Gene Symbol: KIR3DL1
  Gene Name: killer cell immunoglobulin-like receptor, three domains, long cytoplasmic tail, 1
  ENST ID: ENST00000620750
  CDS Start-End: 34-1401
ggggcgcggccgcctgtctgcaccggcagcaccatgtcgctcatggtcgtcagcatggcgtgtgttgggttcttcttggtccagagggccggtccacacgtgggtggtcaggacaagcccttcctgtctgcctggcccagcgctgtggtgcctcgaggaggacacgtgactcttcggtgtcactatcgtcataggtttaacaatttcatgctatacaaagaagacagaatccacgttcccatcttccatggcagattattccaggagagcttcaacatgagccctgtgaccacagcacatgcagggaactacacatgtcggggttcacacccacactcccccactgggtggtcggcacccagcaaccccgtggtgatcatggtcacaggaaaccacagaaaaccttccctcctggcccacccaggtcccctggtgaaatcaggagagagagtcatcctgcaatgttggtcagatatcatgtttgagcacttctttctgcacaaagaggggatctctaaggacccctcacgcctcgttggacagatccatgatggggtctccaaggccaatttctccatcggtcccatgatgcttgcccttgcagggacctacagatgctacggttctgttactcacaccccctatcagttgtcagctcccagtgatcccctggacatcgtggtcacaggtccatatgagaaaccttctctctcagcccagccgggccccaaggttcaggcaggagagagcgtgaccttgtcctgcagctcccggagctcctatgacatgtaccatctatccagggaggggggagcccatgaacgtaggctccctgcagtgcgcaaggtcaacagaacattccaggcagatttccctctgggccctgccacccacggagggacctacagatgcttcggctctttccgtcactctccctacgagtggtcagacccgagtgacccactgcttgtttctgtcacaggaaacccttcaagtagttggccttcacccacagaaccaagctccaaatctggtatctgcagacacctgcatgttctgattgggacctcagtggtcatcttcctcttcatcctcctcctcttctttctcctttatcgctggtgctccaacaaaaagaatgctgctgtaatggaccaagagcctgcgggggacagaacagtgaataggcaggactctgatgaacaagaccctcaggaggtgacgtacgcacagttggatcactgcgttttcatacagagaaaaatcagtcgcccttctcagaggcccaagacacccctaacagataccagcgtgtacacggaacttccaaatgctgagcccagatccaaagttgtctcctgcccacgagcaccacagtcaggtcttgagggggttttctagggagacaacagccctgtctcaaaaccaggttgccagatccaatgaaccagcagctggaatctgaaggcatcagtctgcatcttaggggatcgctcttcctcacaccacgaatctgaacatgcctctctcttgcttacaaatgcctaaggtcgccactgcctgctgcagagaaaacacactcctttgcttagcccacaagtatctatttcacttgacccctgcccacctctccaacctaactggcttacttcctagtcctact

SEQ ID NO: 146096 - DNA, 1900 bp, Homo sapiens
  Payload ID: 8970
  Gene Symbol: KIR3DL1
  Gene Name: killer cell immunoglobulin-like receptor, three domains, long cytoplasmic tail, 1
  ENST ID: ENST00000622825
  CDS Start-End: 64-1398
ataacatcctgtgcgctgctgagctgagctggggcgcggccgcctgtctgcaccggcagcaccatgtcgctcatggtcgtcagcatggcgtgtgttgggttcttcttggtccagagggccggtccacacatgggtggtcaggacaagcccttcctgtctgcctggcccagcgctgtggtgcctcgaggaggacacgtgactcttcggtgtcactatcgtcataggtttaacaatttcatgctatacaaagaagacagaatccacgttcccatcttccatggcagattattccaggagagcttcaacatgagccctgtgaccacagcacatgcagggaactacacatgtcggggttcacacccacactcccccactgggtggtcggcacccagcaaccccgtggtgatcatggtcacaggaaaccacagaaaaccttccctcctggcccacccaggtcccctggtgaaatcaggagagagagtcatcctgcaatgttggtcagatatcatgtttgagcacttctttctgcacaaagaggggatctctaaggacccctcacgcctcgttggacagatccatgatggggtctccaaggccaatttctccatcggtcccatgatgcttgcccttgcagggacctacagatgctacggttctgttactcacaccccctatcagttgtcagctcccagtgatcccctggacatcgtggtcacaggtccatatgagaaaccttctctctcagcccagccgggccccaaggttcaggcaggagagagcgtgaccttgtcctgtagctcccggagctcctatgacatgtaccatctatccagggaggggggagcccatgaacgtaggctccctgcagtgcgcaaggtcaacagaacattccaggcagatttccctctgggccctgccacccacggagggacctacagatgcttcggctctttccgtcactctccctacgagtggtcagacccgagtgacccactgcttgtttctgtcacaggaaacccttcaagtagttggccttcacccacagaaccaagctccaaatctggtaaccccagacacctgcacattctgattgggacctcagtggtcatcatcctcttcatcctcctcctcttctttctccttcatctctggtgctccaacaaaaaaaatgctgctgtaatggaccaagagcctgcagggaacagaacagccaacagcgaggactctgatgaacaagaccctgaggaggtgacatacgcacagttggatcactgcgttttcacacagagaaaaatcactcgcccttctcagaggcccaagacaccccctacagataccatcttgtacacggaacttccaaatgctaagcccagatccaaagttgtctcctgcccatgagcaccacagtcaggccttgaggacgtcttctagggagacaacagccctgtctcaaaaccgagttgccagctcccatgtaccagcagctggaatctgaaggcgtgagtcttcatcttagggcatcgctcctcctcacgccacaaatctggtgcctctctcttgcttacaaatgtctaggtccccactgcctgctggaaagaaaacacactcctttgcttagcccacagttctccatttcacttgacccctgcccacctctccaacctaactggcttacttcctagtctacttgaggctgcaatcacactgaggaactcagaattccaaacatacaagaggctccctcttgacgtggcacttacccacgtgctgttccaccttccctcatgctgtttcacctttcttcggactattttccagccttctgtcagcagtgaaacttataaaattttttgtgatttcaatgtagctgtctcctcttcaaataaacatgtctgccctc

SEQ ID NO: 146097 - DNA, 1663 bp, Homo sapiens
  Payload ID: 8970
  Gene Symbol: KIR3DL1
  Gene Name: killer cell immunoglobulin-like receptor, three domains, long cytoplasmic tail, 1
  ENST ID: ENST00000611181
  CDS Start-End: 34-1401
ggggcgcagccgcctgtctgcaccggcagcaccatgtcgctcatggtcgtcagcatggcgtgtgttgggttgttcttggtccagagggccggtccacacatgggtggtcaggacaaacccttcctgtctgcctggcccagcgctgtggtgcctcgaggaggacacgtgactcttcggtgtcactatcgtcataggtttaacaatttcatgctatacaaagaagacagaatccacattcccatcttccatggcagaatattccaggagagcttcaacatgagccctgtgaccacagcacatgcagggaactacacatgtcggggttcacacccacactcccccactgggtggtcggcacccagcaaccccgtggtgatcatggtcacaggaaaccacagaaaaccttccctcctggcccacccaggtcccctggtgaaatcaggagagagagtcatcctgcaatgttggtcagatatcatgtttgagcacttctttctgcacaaagaggggatctctaaggacccctcacgcctcgttggacagatccatgatggggtctccaaggccaatttctccatcggtcccatgatgcttgcccttgcagggacctacagatgctacggttctgttactcacacctcctatcagttgtcagctcccagtgatcccctggacatcgtggtcacaggtccatatgagaaaccttctctctcagcccagccgggccccaaggttcaggcaggagagagcgtgaccttgtcctgtagctcccggagctcctatgacatgtaccatctatccagggaggggggagcccatgaacgtaggctccctgcagtgcgcaaggtcaacagaacattccaggcagatttccctctgggccctgccacccacggagggacctacagatgctttggctctttccgtcactctccctacgagttgtcagacccgagtgacccactgcttgtttctgtcacaggaaacccttcaagtagttggccttcacccacagaaccaagctccaaatctggtatctgcagacacctgcatgttctgattgggacctcagtggtcatcttcctcttcatcctcctcctcttctttctcctttatcgctggtgctccaacaaaaagaatgctgctgtaatggaccaagagcctgcgggggacagaacagtgaataggcaggactctgatgaacaagaccctcaggaggtgacgtacgcacagttggatcactgcgttttcatacagagaaaaatcagtcgcccttctcagaggcccaagacacccctaacagataccagcgtgtacacggaacttccaaatgctgagcccagatccaaagttgtctcctgcccacgagcaccacagtcaggtcttgagggggttttctagggagacaacagccctgtctcaaaaccaggttgccagatccaatgaaccagcagctggaatctgaaggcatcagtctgcatcttaggggatcgctcttcctcacaccacgaatctgaacatgcctctctcttgcttacaaatgcctaaggtcgccactgcctgctgcagagaaaacacactcctttgcttagcccacaagtatctatttcacttgacccctgcccacctctccaacctaactggcttacttcctagtcctact

SEQ ID NO: 146098 - DNA, 1658 bp, Homo sapiens
  Payload ID: 8970
  Gene Symbol: KIR3DL1
  Gene Name: killer cell immunoglobulin-like receptor, three domains, long cytoplasmic tail, 1
  ENST ID: ENST00000620062
  CDS Start-End: 34-1368
ggggcgcggccgcctgtctgcaccggcagcaccatgttgctcatggtcgtcagcatggcgtgtgttgggttcttcttggtccagagggccggtccacacgtgggtggtcaggacaagcccttcctgtctgcctggcccagcgctgtggtgcctcgaggaggacacgtgactcttcggtgtcactatcatcataggtttaacaatttcatgctatacaaagaagacagaatccacgttcccatcttccatggcagattattccaggagagcttcaacatgagccctgtgaccacagcacatgcagggaactacacatgtcggggttcacacccacactcccccactgggtggtcggcacccagcaaccccgtggtgatcatggtcacaggaaaccacagaaaaccttccctcctggcccacccaggtcccctggtgaaatcaggagagagagtcatcctgcaatgttggtcagatatcatgtttgagcacttctttctgcacaaagaggggatctctaaggacccctcacgcctcgttggacagatccatgatggggtctccaaggccaatttctccatcggtcccatgatgcttgcccttgcagggacctacagatgctacggttctgttactcacaccccctatcagttgtcagctcccagtgatcccctggacatcgtggtcacaggtccatatgagaaaccttctctctcagcccagccgggccccaaggttcaggcaggagagagcgtgaccttgtcctgtagctcccggagctcctatgacatgtaccatctatccagggaggggggagcccatgaacgtaggctccctgcagtgcgcaaggtcaacagaacattccaggcagatttccctctgggccctgccacccacggagggacctacagatgcttcggctctttccgtcactctccctacgagtggtcagacccgagtgacccactgcttgtttctgtcacaggaaacccttcaagtagttggccttcacccacagaaccaagctccaaatctggtaaccccagacacctgcacattctgattgggacctcagtggtcatcatcctcttcatcctcctcctcttctttctccttcatctctggtgctccaacaaaaaaaatgctgctgtaatggaccaagagcctgcagggaacagaacagccaacagcgaggactctgatgaacaagaccctgaggaggtgacatacgcacagttggatcactgcgttttcacacagagaaaaatcactcgcccttctcagaggcccaagacaccccctacagataccatcttgtacacggaacttccaaatgctaagcccagatccaaagttgtctcctgcccatgagcaccacagtcaggccttgaggacgtcttctagggagacaacagccctgtctcaaaaccgagttgccagctcccatgtaccagcagctggaatctgaaggcgtgagtcttcatcttagggcatcgctcctcctcacgccacaaatctggtgcctctctcttgcttacaaatgtctaggtccccactgcctgctggaaagaaaacacactcctttgcttagcccacagttctccatttcacttgacccctgcccacctctccaacctaactggcttacttcctagtctact

SEQ ID NO: 146099 - DNA, 1810 bp, Homo sapiens
  Payload ID: 8970
  Gene Symbol: KIR3DL1
  Gene Name: killer cell immunoglobulin-like receptor, three domains, long cytoplasmic tail, 1
  ENST ID: ENST00000621759
  CDS Start-End: 25-1308
ccgcctgtctgcaccggcagcaccatgttgctcatggtcgtcagcatggcgtgtgttgggttcttcttggtccagagggccggtccacacgtgggtggtcaggacaagcccttcctgtctgcctggcccagcgctgtggtgcctcgaggaggacacgtgactcttcggtgtcactatcgtcataggtttaacaatttcatgctatacaaagaagacagaatccacgttcccatcttccatggcagattattccaggagagcttcaacatgagccctgtgaccacagcacatgcagggaactacacatgtcggggttcacacccacactcccccactgggtggtcggcacccagcaaccccgtggtgatcatggtcacaggaaaccacagaaaaccttccctcctggcccacccaggtcccctggtgaaatcaggagagagagtcatcctgcaatgttggtcagatatcatgtttgagcacttctttctgcacaaagaggggatctctaaggacccctcacgcctcgttggacagatccatgatggggtctccaaggccaatttctccatcggtcccatgatgcttgcccttgcagggacctacagatgctacggttctgttactcacaccccctatcagttgtcagctcccagtgatcccctggacatcgtggtcacaggtccatatgagaaaccttctctctcagcccagccgggccccaaggttcaggcaggagagagcgtgaccttgtcctgtagctcccggagctcctatgacatgtaccatctatccagggaggggggagcccatgaacgtaggctccctgcagtgcgcaaggtcaacagaacattccaggcagatttccctctgggccctgccacccacggagggacctacagatgcttcggctctttccgtcactctccctacgagtggtcagacccgagtgacccactgcttgtttctgtcacaggtaaccccagacacctgcacgttctgattgggacctcagtggtcatcatcctcttcatcctcctcctcttctttctccttcatctctggtgctccaacaaaaaaaatgctgctgtaatggaccaagagcctgcagggaacagaacagccaacagcgaggactctgatgaacaagaccctcaggaggtgacatatgcacagttggatcactgcgttttcacacagagaaaaatcactcgcccttctcagaggcccaagacaccccctacagataccatcttgtacacggaacttccaaatgctaagcccagatccaaagttgtctcctgcccatgagcaccacagtcaggccttgagggcgtcttctagggagacaacagccctgtctcaaaaccgagttgccagctcccatgtaccagcagctggaatctgaaggcgtgagtcttcatcttagggcatcgctcctcctcacgccacaaatctggtgcctctctcttgcttacaaatgtctaggtccccactgcctgctggaaagaaaacacactcctttgcttagcccacagttctccatttcacttgacccctgcccacctctccaacctaactggcttacttcctagtctacttgaggctgcgatcacactgagtaactcacaattccaaacatacaagaggctccctcttgacgtggcacttacccacgtgctgttccaccttccctcatgctgtttcacctttcttcggactattttccagccttctgtcagcagtgaaacttataaaattttttgtgatttcaatgtagctgtctcctcttcaaataaacatgtctgccctc

SEQ ID NO: 146100 - DNA, 1497 bp, Homo sapiens
  Payload ID: 8970
  Gene Symbol: KIR3DL1
  Gene Name: killer cell immunoglobulin-like receptor, three domains, long cytoplasmic tail, 1
  ENST ID: ENST00000620703
  CDS Start-End: 26-1393
gccgcctgtctgcaccggcagcaccatgtcgctcatggtcgtcagcatggcgtgtgttgggttcttcttgctgcagggggcctggccacatgagggtggtcaggacaaacccttcctgtctgcctggcccagcgctgtggtgcctcgaggaggacacgtgactcttcggtgtcactatcatcataggtttaacaatttcatgctatacaaagaagacggaatccacattcccatcttccatggcagaatattccaggagagcttcaacatgagccctgtgaccacagcacatgcagggaactacacatgtcggggttcacacccacactcccccactgggtggtcggcacccagcaaccccgtggtgatcatggtcacaggaaaccacagaaaaccttccctcctggcccacccaggtcccctggtgaaatcaggagagagagtcatcctgcaatgttggtcagatatcatgtttgagcacttctttctgcacaaagaggggatctctaaggacccctcacgcctcgttggacagatccatgatggggtctccaaggccaatttctccatcggtcccatgatgcttgcccttgcagggacctacagatgctacggttctgttactcacacctcctatcagttgtcagctcccagtgatcccctggacatcgtggtcacaggtccatatgagaaaccttctctctcagcccagccgggccccaaggttcaggcaggagagagcgtgaccttgtcctgtagctcccggagctcctatgacatgtaccatctatccagggaggggggagcccatgaacgtaggctccctgcagtgcgcaaggtcaacagaacattccaggcagatttccctctgggccctgccacccacggagggacctacagatgctttggctctttccgtcactctccctacgagttgtcagacccgagtgacccactgcttgtttctgtcacaggaaacccttcaagtagttggccttcacccacagaaccaagctccaaatctggtaaccccagacacctgcatgttctcattgggacctcagtggtcatcatcctcttcatcctcctcctcttctttctccttcatctctggtactccaacaaaaaaaatgctgctgtaatggaccaagagcctgcagggaacagaacagccaacagcgaggactctgatgaacaagaccctcaggaggtgacatacgcacagttggatcactgcgttttcacacagagaaaaatcactcgcccttctcagaggcccaagacaccccctacagataccatcttgtacacggaacttccaaatgctaagcccagatccaaagttgtctcctgcccacgagcaccacagtcaggccttgaggggatcttctagggagacaacagccctgtctcaaaaccgggttgccagctcccatgtaccagcagctggaatctgaaggcatcagtcttcatcttagggcatcgctcttcctcaca

SEQ ID NO: 146101 - DNA, 1663 bp, Homo sapiens
  Payload ID: 8970
  Gene Symbol: KIR3DL1
  Gene Name: killer cell immunoglobulin-like receptor, three domains, long cytoplasmic tail, 1
  ENST ID: ENST00000615752
  CDS Start-End: 34-1401
ggggcgcagccgcctgtctgcaccggcagcaccatgtcgctcatggtcgtcagcatggcgtgtgttgggttgttcttggtccagagggccggtccacacatgggtggtcaggacaaacccttcctgtctgcctggcccagcgctgtggtgcctcgaggaggacacgtgactcttcggtgtcactatcgtcataggtttaacaatttcatgctatacaaagaagacagaatccacattcccatcttccatggcagaatattccaggagagcttcaacatgagccctgtgaccacagcacatgcagggaactacacatgtcggggttcacacccacactcccccactgggtggtcggcacccagcaaccccgtggtgatcatggtcacaggaaaccacagaaaaccttccctcctggcccacccaggtcccctggtgaaatcaggagagagagtcatcctgcaatgttggtcagatatcatgtttgagcacttctttctgcacaaagaggggatctctaaggacccctcacgcctcgttggacagatccatgatggggtctccaaggccaatttctccatcggtcccatgatgcttgcccttgcagggacctacagatgctacggttctgttactcacacctcctatcagttgtcagctcccagtgatcccctggacatcgtggtcacaggtccatatgagaaaccttctctctcagcccagccgggccccaaggttcaggcaggagagagcgtgaccttgtcctgtagctcccggagctcctatgacatgtaccatctatccagggaggggggagcccatgaacgtaggctccctgcagtgcgcaaggtcaacagaacattccaggcagatttccctctgggccctgccacccacggagggacctacagatgctttggctctttccgtcactctccctacgagttgtcagacccgagtgacccactgcttgtttctgtcacaggaaacccttcaagtagttggccttcacccacagaaccaagctccaaatctggtatctgcagacacctgcatgttctgattgggacctcagtggtcatcttcctcttcatcctcctcctcttctttctcctttatcgctggtgctccaacaaaaagaatgctgctgtaatggaccaagagcctgcgggggacagaacagtgaataggcaggactctgatgaacaagaccctcaggaggtgatgtacgcacagttggatcactgcgttttcatacagagaaaaatcagtcgcccttctcagaggcccaagacacccctaacagataccagcgtgtacacggaacttccaaatgctgagcccagatccaaagttgtctcctgcccacgagcaccacagtcaggtcttgagggggttttctagggagacaacagccctgtctcaaaaccaggttgccagatccaatgaaccagcagctggaatctgaaggcatcagtctgcatcttaggggatcgctcttcctcacaccacgaatctgaacatgcctctctcttgcttacaaatgcctaaggtcgccactgcctgctgcagagaaaacacactcctttgcttagcccacaagtatctatttcacttgacccctgcccacctctccaacctaactggcttacttcctagtcctact

SEQ ID NO: 146102 - DNA, 1860 bp, Homo sapiens
  Payload ID: 8970
  Gene Symbol: KIR3DL1
  Gene Name: killer cell immunoglobulin-like receptor, three domains, long cytoplasmic tail, 1
  ENST ID: ENST00000610602
  CDS Start-End: 64-1398
ataacatcctgtgcgctgctgagctgagctggggcgcggccgcctgtctgcaccggcagcaccatgttgctcatggtcgtcagcatggcgtgtgttgggttcttcttggtccagagggccggtccacacgtgggtggtcaggacaagcccttcctgtctgcctggcccagcgctgtggtgcctcgaggaggacacgtgactcttcggtgtcactatcgtcataggtttaacaatttcatgctatacaaagaagacagaatccacgttcccatcttccatggcagattattccaggagagcttcaacatgagccctgtgaccacagcacatgcagggaactacacatgtcggggttcacacccacactcccccactgggtggtcggcacccagcaaccccgtggtgatcatggtcacaggaaaccacagaaaaccttccctcctggcccacccaggtcccctggtgaaatcaggagagagagtcatcctgcaatgttggtcagatatcatgtttgagcacttctttctgcacaaagaggggatctctaaggacccctcacgcctcgttggacagatccatgatggggtctccaaggccaatttctccatcggtcccatgatgcttgcccttgcagggacctacagatgctacggttctgttactcacaccccctatcagttgtcagctcccagtgatcccctggacatcgtggtcacaggtccatatgagaaaccttctctctcagcccagccgggccccaaggttcaggcaggagagagcgtgaccttgtcctgcagctcccggagctcctatgacatgtaccatctatccagggaggggggagcccatgaacgtaggctccctgcagtgcgcaaggtcaacagaacattccaggcagatttccctctgggccctgccacccacggagggacctacagatgcttcggctctttccgtcactctccctacgagtggtcagacccgagtgacccactgcttgtttctgtcacaggaaacccttcaagtagttggccttcacccacagaaccaagctccaaatctggtaaccccagacacctgcacattctgattgggacctcagtggtcatcatcctcttcatcctcctcctcttctttctccttcatctctggtgctccaacaaaaaaaatgctgctgtaatggaccaagagcctgcagggaacagaacagccaacagcgaggactctgatgaacaagaccctgaggaggtgacatacgcacagttggatcactgcgttttcacacagagaaaaatcactcgcccttctcagaggcccaagacaccccctacagataccatcttgtacacggaacttccaaatgctaagcccagatccaaagttgtctcctgcccatgagcaccacagtcaggccttgaggacgtcttctagggagacaacagccctgtctcaaaaccgagttgccagctcccatgtaccagcagctggaatctgaaggcgtgagtcttcatcttagggcatcgctcctcctcacgccacaaatctggtgcctctctcttgcttacaaatgtctaggtccccactgcctgctggaaagaaaacacactcctttgcttagcccacagttctccatttcacttgacccctgcccacctctccaacctaactggcttacttcctagtctacttgaggctgcaatcacactgaggaactcacaattccaaacatacaagaggctccctcttgacgtggcacttacccacgtgctgttccaccttccctcatgctgtttcacctttcttcggactattttccagccttctgtcagcagtgaaacttataaaattttttgtgatttc

SEQ ID NO: 146103 - DNA, 1810 bp, Homo sapiens; identical to SEQ ID NO: 146085
  Payload ID: 8970
  Gene Symbol: KIR3DL1
  Gene Name: killer cell immunoglobulin-like receptor, three domains, long cytoplasmic tail, 1
  ENST ID: ENST00000611567
  CDS Start-End: 25-1308

SEQ ID NO: 146104 - DNA, 1663 bp, Homo sapiens
  Payload ID: 8970
  Gene Symbol: KIR3DL1
  Gene Name: killer cell immunoglobulin-like receptor, three domains, long cytoplasmic tail, 1
  ENST ID: ENST00000614238
  CDS Start-End: 34-1401
ggggcgcagccgcctgtctgcaccggcagcaccatgtcgctcatggtcgtcagcatggcgtgtgttgggttgttcttggtccagagggccggtccacacatgggtggtcaggacaaacccttcctgtctgcctggcccagcgctgtggtgcctcgaggaggacacgtgactcttcggtgtcactatcatcataggtttaacaatttcatgctatacaaagaagacggaatccacattcccatcttccatggcagaatattccaggagagcttcaacatgagccctgtgaccacagcacatgcagggaactacacatgtcggggttcacacccacactcccccactgggtggttggcacccagcaaccccgtggtgatcatggtcacaggaaaccacagaaaaccttccctcctggcccacccaggtcccctggtgaaatcaggagagagagtcatcctgcaatgttggtcagatatcatgtttgagcacttctttctgcacaaagaggggatctctaaggacccctcacgcctcgttggacagatccatgatggggtctccaaggccaatttctccatcggtcccatgatgcttgcccttgcagggacctacagatgctacggttctgttactcacacctcctatcagttgtcagctcccagtgatcccctggacatcgtggtcacaggtccatatgagaaaccttctctctcagcccagccgggccccaaggttcaggcaggagagagcgtgaccttgtcctgtagctcccggagctcctatgacatgtaccatctatccagggaggggggagcccatgaacgtaggctccctgcagtgcgcaaggtcaacagaacattccaggcagatttccctctgggccctgccacccacggagggacctacagatgctttggctctttccgtcactctccctacgagttgtcagacccgagtgacccactgcttgtttctgtcacaggaaacccttcaagtagttggccttcacccacagaaccaagctccaaatctggtatctgcagacacctgcatgttctgattgggacctcagtggtcatcttcctcttcatcctcctcctcttctttctcctttatcgctggtgctccaacaaaaagaatgctgctgtaatggaccaagagcctgcgggggacagaacagtgaataggcaggactctgatgaacaagaccctcaggaggtgacgtacgcacagttggatcactgcgttttcatacagagaaaaatcagtcgcccttctcagaggcccaagacacccctaacagataccagcgtgtacacggaacttccaaatgctgagcccagatccaaagttgtctcctgcccacgagcaccacagtcaggtcttgagggggttttctagggagacaacagccctgtctcaaaaccaggttgccagatccaatgaaccagcagctggaatctgaaggcatcagtctgcatcttaggggatcgctcttcctcacaccacgaatctgaacatgcctctctcttgcttacaaatgcctaaggtcgccactgcctgctgcagagaaaacacactcctttgcttagcccacaagtatctatttcacttgacccctgcccacctctccaacctaactggcttacttcctagtcctact

SEQ ID NO: 146105 - DNA, 1810 bp, Homo sapiens
  Payload ID: 8970
  Gene Symbol: KIR3DL1
  Gene Name: killer cell immunoglobulin-like receptor, three domains, long cytoplasmic tail, 1
  ENST ID: ENST00000619277
  CDS Start-End: 25-1308
ccgcctgtctgcaccggcagcaccatgttgctcatggtcgtcagcatggcgtgtgttgggttcttcttggtccagagggccggtccacacgtgggtggtcaggacaagcccttcctgtctgcctggcccagcgctgtggtgcctcgaggaggacacgtgactcttcggtgtcactatcgtcataggtttaacaatttcatgctatacaaagaagacagaatccacgttcccatcttccatggcagattattccaggagagcttcaacatgagccctgtgaccacagcacatgcagggaactacacatgtcggggttcacacccacactcccccactgggtggtcggcacccagcaaccccgtggtgatcatggtcacaggaaaccacagaaaaccttccctcctggcccacccaggtcccctggtgaaatcaggagagagagtcatcctgcaatgttggtcagatatcatgtttgagcacttctttctgcacaaagaggggatctctaaggacccctcacgcctcgttggacagatccatgatggggtctccaaggccaatttctccatcggtcccatgatgcttgcccttgcagggacctacagatgctacggttctgttactcacaccccctatcagttgtcagctcccagtgatcccctggacatcgtggtcacaggtccatatgagaaaccttctctctcagcccagccgggccccaaggttcaggcaggagagagcgtgaccttgtcctgcagctcccggagctcctatgacatgtaccatctatccagggaggggggagcccatgaacgtaggctccctgcagtgcgcaaggtcaacagaacattccaggcagatttccctctgggccctgccacccacggagggacctacagatgcttcggctctttccgtcactctccctacgagtggtcagacccgagtgacccactgcttgtttctgtcacaggtaaccccagacacctgcacattctgattgggacctcagtggtcatcatcctcttcatcctcctcctcttctttctccttcatctctggtgctccaacaaaaaaaatgctgctgtaatggaccaagagcctgcagggaacagaacagccaacagcgaggactctgatgaacaagaccctcaggaggtgacatacgcacagttggatcactgcgttttcacacagagaaaaatcactcgcccttctcagaggcccaagacaccccctacagataccatcttgtacacggaacttccaaatgctaagcccagatccaaagttgtctcctgcccatgagcaccacagtcaggccttgaggacgtcttctagggagacaacagccctgtctcaaaaccgagttgccagctcccatgtaccagcagctggaatctgaaggcgtgagtcttcatcttagggcatcgctcctcctcacgccacaaatctggtgcctctctcttgcttacaaatgtctaggtccccactgcctgctggaaagaaaacacactcctttgcttagcccacagttctccatttcacttgacccctgcccacctctccaacctaactggcttacttcctagtctacttgaggctgcaatcacactgaggaactcacaattccaaacatacaagaggctccctcttgacgtggcacttacccacgtgctgttccaccttccctcatgctgtttcacctttcttcggactattttccagccttctgtcagcagtgaaacttataaaattttttgtgatttcaatgtagctgtctcctcttcaaataaacatgtctgccctc

SEQ ID NO: 146106 - DNA, 1900 bp, Homo sapiens
  Payload ID: 8970
  Gene Symbol: KIR3DL1
  Gene Name: killer cell immunoglobulin-like receptor, three domains, long cytoplasmic tail, 1
  ENST ID: ENST00000615523
  CDS Start-End: 64-1398
ataacatcctgtgcgctgctgagctgagctggggcgcggccgcctgtctgcaccggcagcaccatgttgctcatggtcgtcagcatggcgtgtgttgggttcttcttggtccagagggccggtccacacgtgggtggtcaggacaagcccttcctgtctgcctggcccagcgctgtggtgcctcgaggaggacacgtgactcttcggtgtcactatcgtcataggtttaacaatttcatgctatacaaagaagacagaatccacgttcccatcttccatggcagattattccaggagagcttcaacatgagccctgtgaccacagcacatgcagggaactacacatgtcggggttcacacccacactcccccactgggtggtcggcacccagcaaccccgtggtgatcatggtcacaggaaaccacagaaaaccttccctcctggcccacccaggtcccctggtgaaatcaggagagagagtcatcctgcaatgttggtcagatatcatgtttgagcacttctttctgcacaaagaggggatctctaaggacccctcacgcctcgttggacagatccatgatggggtctccaaggccaatttctccatcggtcccatgatgcttgcccttgcagggacctacagatgctacggttctgttactcacaccccctatcagttgtcagctcccagtgatcccctggacatcgtggtcacaggtccatatgagaaaccttctctctcagcccagccgggccccaaggttcaggcaggagagagcgtgaccttgtcctgcagctcccggagctcctatgacatgtaccatctatccagggaggggggagcccatgaacgtaggctccctgcagtgcgcaaggtcaacagaacattcaaggcagatttccctctgggccctgccacccacggagggacctacagatgcttcggctctttccgtcactctccctacgagtggtcagacccgagtgacccactgcttgtttctgtcacaggaaacccttcaagtagttggccttcacccacagaaccaagctccaaatctggtaaccccagacacctgcacattctgattgggacctcagtggtcatcatcctcttcatcctcctcctcttctttctccttcatctctggtgctccaacaaaaaaaatgctgctgtaatggaccaagagcctgcagggaacagaacagccaacagcgaggactctgatgaacaagaccctgaggaggtgacatacgcacagttggatcactgcgttttcacacagagaaaaatcactcgcccttctcagaggcccaagacaccccctacagataccatcttgtacacggaacttccaaatgctaagcccagatccaaagttgtctcctgcccatgagcaccacagtcaggccttgaggacgtcttctagggagacaacagccctgtctcaaaaccgagttgccagctcccatgtaccagcagctggaatctgaaggcgtgagtcttcatcttagggcatcgctcctcctcacgccacaaatctggtgcctctctcttgcttacaaatgtctaggtccccactgcctgctggaaagaaaacacactcctttgcttagcccacagttctccatttcacttgacccctgcccacctctccaacctaactggcttacttcctagtctacttgaggctgcaatcacactgaggaactcacaattccaaacatacaagaggctccctcttgacgtggcacttacccacgtgctgttccaccttccctcatgctgtttcacctttcttcggactattttccagccttctgtcagcagtgaaacttataaaattttttgtgatttcaatgtagctgtctcctcttcaaataaacatgtctgccctc

SEQ ID NO: 146107 - DNA, 1900 bp, Homo sapiens
  Payload ID: 8970
  Gene Symbol: KIR3DL1
  Gene Name: killer cell immunoglobulin-like receptor, three domains, long cytoplasmic tail, 1
  ENST ID: ENST00000616835
  CDS Start-End: 64-1398
ataacatcctgtgcgctgctgagctgagctggggcgcggccgcctgtctgcaccggcagcaccatgtcgctcatggtcgtcagcatggcgtgtgttgggttcttcttggtccagagggccggtccacacgtgggtggtcaggacaagcccttcctgtctgcctggcccagcgctgtggtgcctcgaggaggacacgtgactcttcggtgtcactatcgtcataggtttaacaatttcatgctatacaaagaagacagaatccacgttcccatcttccatggcagattattccaggagagcttcaacatgagccctgtgaccacagcacatgcagggaactacacatgtcggggttcacacccacactcccccactgggtggtcggcacccagcaaccccgtggtgatcatggtcacaggaaaccacagaaaaccttccctcctggcccacccaggtcccctggtgaaatcaggagagagagtcatcctgcaatgttggtcagatatcatgtttgagcacttctttctgcacaaagaggggatctctaaggacccctcacgcctcgttggacagatccatgatggggtctccaaggccaatttctccatcggtcccatgatgcttgcccttgcagggacctacagatgctacggttctgttactcacaccccctatcagttgtcagctcccagtgatcccctggacatcgtggtcacaggtccatatgagaaaccttctctctcagcccagccgggccccaaggttcaggcaggagagagcgtgaccttgtcctgtagctcccggagctcctatgacatgtaccatctatccagggaggggggagcccatgaacgtaggctccctgcagtgcgcaaggtcaacagaacattccaggcagatttccctctgggccctgccacccacggagggacctacagatgcttcggctctttccgtcactctccctacgagtggtcagacccgagtgacccactgcttgtttctgtcacaggaaacccttcaagtagttggccttcacccacagaaccaagctccaaatctggtaaccccagacacctgcacattctgattgggacctcagtggtcatcatcctcttcatcctcctcctcttctttctccttcatctctggtgctccaacaaaaaaaatgctgctgtaatggaccaagagcctgcagggaacagaacagccaacagcgaggactctgatgaacaagaccctgaggaggtgacatacgcacagttggatcactgcgttttcacacagagaaaaatcactcgcccttctcagaggcccaagacaccccctacagataccatcttgtacacggaacttccaaatgctaagcccagatccaaagttgtctcctgcccatgagcaccacagtcaggccttgaggacatcttctagggagacaacagccctgtctcaaaaccgagttgccagctcccatgtaccagcagctggaatctgaaggcgtgagtcttcatcttagggcatcgctcctcctcacgccacaaatctggtgcctctctcttgcttacaaatgtctaggtccccactgcctgctggaaagaaaacacactcctttgcttagcccacagttctccatttcacttgacccctgcccacctctccaacctaactggcttacttcctagtctacttgaggctgcaatcacactgaggaactcacaattccaaacatacaagaggctccctcttgacgtggcacttacccacgtgctgttccaccttccctcatgctgtttcacctttcttcggactattttccagccttctgtcagcagtgaaacttataaaattttttgtgatttcaatgtagctgtctcctcttcaaataaacatgtctgccctc

SEQ ID NO: 146108 - DNA, 1863 bp, Homo sapiens
  Payload ID: 8970
  Gene Symbol: KIR3DL1
  Gene Name: killer cell immunoglobulin-like receptor, three domains, long cytoplasmic tail, 1
  ENST ID: ENST00000612415
  CDS Start-End: 26-1360
gccgcctgtctgcaccggcagcaccatgttgctcatggtcgtcagcatggcgtgtgttgggttcttcttggtccagagggccggtccacacgtgggtggtcaggacaagcccttcctgtctgcctggcccagcgctgtggtgcctcgaggaggacacgtgactcttcggtgtcactatcgtcataggtttaacaatttcatgctatacaaagaagacagaatccacgttcccatcttccatggcagattattccaggagagcttcaacatgagccctgtgaccacagcacatgcagggaactacacatgtcggggttcacacccacactcccccactgggtggtcggcacccagcaaccccgtggtgatcatggtcacaggaaaccacagaaaaccttccctcctggcccacccaggtcccctggtgaaatcaggagagagagtcatcctgcaatgttggtcagatatcatgtttgagcacttctttctgcacaaagaggggatctctaaggacccctcacgcctcgttggacagatccatgatggggtctccaaggccaatttctccatcggtcccatgatgcttgcccttgcagggacctacagatgctacggttctgttactcacaccccctatcagttgtcagctcccagtgatcccctggacatcgtggtcacaggtccatatgagaaaccttctctctcagcccagccgggccccaaggttcaggcaggagagagcgtgaccttgtcctgcagctcccggagctcctatgacatgtaccatctatccagggaggggggagcccatgaacgtaggctccctgcagtgcgcaaggtcaacagaacattccaggcagatttccctctgggccctgccacccacggagggacctacagatgcttcggctctttccgtcactctccctacgagtggtcagacccgagtgacccactgcttgtttctgtcacaggaaacccttcaagtagttggccttcacccacagaaccaagctccaaatctggtaaccccagacacctgcacattctgattgggacctcagtggtcatcatcctcttcatcctcctcctcttctttctccttcatctctggtgctccaacaaaaaaaatgctgctgtaatggaccaagagcctgcagggaacagaacagccaacagcgaggactctgatgaacaagaccctgaggaggtgacatacgcacagttggatcactgcgttttcacacagagaaaaatcactcgcccttctcagaggcccaagacaccccctacagataccatcttgtacacggaacttccaaatgctaagcccagatccaaagttgtctcctgcccatgagcaccacagtcaggccttgaggacgtcttctagggagacaacagccctgtctcaaaaccgagttgccagctcccatgtaccagcagctggaatctgaaggcgtgagtcttcatcttagggcatcgctcctcctcacgccacaaatctggtgcctctctcttgcttacaaatgtctaggtccccactgcctgctggaaagaaaacacactcctttgcttagcccacagttctccatttcacttgacccctgcccacctctccaacctaactggcttacttcctagtctacttgaggctgcaatcacactgaggaactcacaattccaaacatacaagaggctccctcttgacgtggcacttacccacgtgctgttccaccttccctcatgctgtttcacctttcttcggactattttccagccttctgtcagcagtgaaacttataaaattttttgtgatttcaatgtagctgtctcctcttcaaataaacatgtctgccctca

SEQ ID NO: 146109 - DNA, 1849 bp, Homo sapiens
  Payload ID: 8970
  Gene Symbol: KIR3DL1
  Gene Name: killer cell immunoglobulin-like receptor, three domains, long cytoplasmic tail, 1
  ENST ID: ENST00000611574
  CDS Start-End: 64-1347
ataacatcctgtgcgctgctgagctgagctggggcgcggccgcctgtctgcaccggcagcaccatgttgctcatggtcgtcagcatggcgtgtgttgggttcttcttggtccagagggccggtccacacgtgggtggtcaggacaagcccttcctgtctgcctggcccagcgctgtggtgcctcgaggaggacacgtgactcttcggtgtcactatcgtcataggtttaacaatttcatgctatacaaagaagacagaatccacgttcccatcttccatggcagattattccaggagagcttcaacatgagccctgtgaccacagcacatgcagggaactacacatgtcggggttcacacccacactcccccactgggtggtcggcacccagcaaccccgtggtgatcatggtcacaggaaaccacagaaaaccttccctcctggcccacccaggtcccctggtgaaatcaggagagagagtcatcctgcaatgttggtcagatatcatgtttgagcacttctttctgcacaaagaggggatctctaaggacccctcacgcctcgttggacagatccatgatggggtctccaaggccaatttctccatcggtcccatgatgcttgcccttgcagggacctacagatgctacggttctgttactcacaccccctatcagttgtcagctcccagtgatcccctggacatcgtggtcacaggtccatatgagaaaccttctctctcagcccagccgggccccaaggttcaggcaggagagagcgtgaccttgtcctgcagctcccggagctcctatgacatgtaccatctatccagggaggggggagcccatgaacgtaggctccctgcagtgcgcaaggtcaacagaacattcaaggcagatttccctctgggccctgccacccacggagggacctacagatgcttcggctctttccgtcactctccctacgagtggtcagacccgagtgacccactgcttgtttctgtcacaggtaaccccagacacctgcacattctgattgggacctcagtggtcatcatcctcttcatcctcctcctcttctttctccttcatctctggtgctccaacaaaaaaaatgctgctgtaatggaccaagagcctgcagggaacagaacagccaacagcgaggactctgatgaacaagaccctgaggaggtgacatacgcacagttggatcactgcgttttcacacagagaaaaatcactcgcccttctcagaggcccaagacaccccctacagataccatcttgtacacggaacttccaaatgctaagcccagatccaaagttgtctcctgcccatgagcaccacagtcaggccttgaggacgtcttctagggagacaacagccctgtctcaaaaccgagttgccagctcccatgtaccagcagctggaatctgaaggcgtgagtcttcatcttagggcatcgctcctcctcacgccacaaatctggtgcctctctcttgcttacaaatgtctaggtccccactgcctgctggaaagaaaacacactcctttgcttagcccacagttctccatttcacttgacccctgcccacctctccaacctaactggcttacttcctagtctacttgaggctgcaatcacactgaggaactcacaattccaaacatacaagaggctccctcttgacgtggcacttacccacgtgctgttccaccttccctcatgctgtttcacctttcttcggactattttccagccttctgtcagcagtgaaacttataaaattttttgtgatttcaatgtagctgtctcctcttcaaataaacatgtctgccctc

SEQ ID NO: 146110 - DNA, 1860 bp, Homo sapiens
  Payload ID: 8970
  Gene Symbol: KIR3DL1
  Gene Name: killer cell immunoglobulin-like receptor, three domains, long cytoplasmic tail, 1
  ENST ID: ENST00000610345
  CDS Start-End: 64-1398
ataacatcctgtgcgctgctgagctgagctggggcgcggccgcctgtctgcaccggcagcaccatgttgctcatggtcgtcagcatggcgtgtgttgggttcttcttggtccagagggccggtccacacgtgggtggtcaggacaagcccttcctgtctgcctggcccagcgctgtggtgcctcgaggaggacacgtgactcttcggtgtcactatcgtcataggtttaacaatttcatgctatacaaagaagacagaatccacgttcccatcttccatggcagattattccaggagagcttcaacatgagccctgtgaccacagcacatgcagggaactacacatgtcggggttcacacccacactcccccactgggtggtcggcacccagcaaccccgtggtgatcatggtcacaggaaaccacagaaaaccttccctcctggcccacccaggtcccctggtgaaatcaggagagagagtcatcctgcaatgttggtcagatatcatgtttgagcacttctttctgcacaaagaggggatctctaaggacccctcacgcctcgttggacagatccatgatggggtctccaaggccaatttctccatcggtcccatgatgcttgcccttgcagggacctacagatgctacggttctgttactcacaccccctatcagttgtcagctcccagtgatcccctggacatcgtggtcacaggtccatatgagaaaccttctctctcagcccagccgggccccaaggttcaggcaggagagagcgtgaccttgtcctgcagctcccggagctcctatgacatgtaccatctatccagggaggggggagcccatgaacgtaggctccctgcagtgcgcaaggtcaacagaacattcaaggcagatttccctctgggccctgccacccacggagggacctacagatgcttcggctctttccgtcactctccctacgagtggtcagacccgagtgacccactgcttgtttctgtcacaggaaacccttcaagtagttggccttcacccacagaaccaagctccaaatctggtaaccccagacacctgcacattctgattgggacctcagtggtcatcatcctcttcatcctcctcctcttctttctccttcatctctggtgctccaacaaaaaaaatgctgctgtaatggaccaagagcctgcagggaacagaacagccaacagcgaggactctgatgaacaagaccctgaggaggtgacatacgcacagttggatcactgcgttttcacacagagaaaaatcactcgcccttctcagaggcccaagacaccccctacagataccatcttgtacacggaacttccaaatgctaagcccagatccaaagttgtctcctgcccatgagcaccacagtcaggccttgaggacgtcttctagggagacaacagccctgtctcaaaaccgagttgccagctcccatgtaccagcagctggaatctgaaggcgtgagtcttcatcttagggcatcgctcctcctcacgccacaaatctggtgcctctctcttgcttacaaatgtctaggtccccactgcctgctggaaagaaaacacactcctttgcttagcccacagttctccatttcacttgacccctgcccacctctccaacctaactggcttacttcctagtctacttgaggctgcaatcacactgaggaactcacaattccaaacatacaagaggctccctcttgacgtggcacttacccacgtgctgttccaccttccctcatgctgtttcacctttcttcggactattttccagccttctgtcagcagtgaaacttataaaattttttgtgatttc

SEQ ID NO: 146111 - DNA, 1858 bp, Homo sapiens
  Payload ID: 8970
  Gene Symbol: KIR3DL1
  Gene Name: killer cell immunoglobulin-like receptor, three domains, long cytoplasmic tail, 1
  ENST ID: ENST00000612933
  CDS Start-End: 64-1398
ataacatcctgtgcgctgctgagctgagctggggcgcggccgcctgtctgcaccggcagcaccatgtcgctcatggtcgtcagcatggcgtgtgttgggttgttcttggtccagagggccggtccacacatgggtggtcaggacaaacccttcctgtctgcctggcccagcgctgtggtgcctcgaggaggacacgtgactcttcggtgtcactatcatcataggtttaacaatttcatgctatacaaagaagacggaatccacattcccatcttccatggcagaatattccaggagagcttcaacatgagccctgtgaccacagcacatgcagggaactacacatgtcggggttcacacccacactcccccactgggtggtcggcacccagcaaccccgtggtgatcatggtcacaggaaaccacagaaaaccttccctcctggcccacccaggtcccctggtgaaatcaggagagagagtcatcctgcaatgttggtcagatatcatgtttgagcacttctttctgcacaaagaggggatctctaaggacccctcacgcctcgttggacagatccatgatggggtctccaaggccaatttctccatcggtcccatgatgcttgcccttgcagggacctacagatgctacggttctgttactcacacctcctatcagttgtcagctcccagtgatcccctggacatcgtggtcacaggtccatatgagaaaccttctctctcagcccagccgggccccaaggttcaggcaggagagagcgtgaccttgtcctgtagctcccggagctcctatgacatgtaccatctatccagggaggggggagcccatgaacgtaggctccctgcagtgcgcaaggtcaacagaacattccaggcagatttccctctgggccctgccacccacggagggacctacagatgctttggctctttccgtcactctccctacgagttgtcagacccgagtgacccactgcttgtttctgtcacaggaaacccttcaagtagttggccttcacccacagaaccaagctccaaatctggtaaccccagacacctgcatgttctcattgggacctcagtggtcatcatcctcttcatcctcctcctcttctttctccttcatctctggtactccaacaaaaaaaatgctgctgtaatggaccaagagcctgcagggaacagaacagccaacagcgaggactctgatgaacaagaccctcaggaggtgacatacgcacagttggatcactgcgttttcacacagagaaaaatcactcgcccttctcagaggcccaagacaccccctacagataccatcttgtacacggaacttccaaatgctaagcccagatccaaagttgtctcctgcccatgagcaccacagtcaggccttgagggcgtcttctagggagacaacagccctgtctcaaaaccgagttgccagctcccatgtaccagcagctggaatctgaaggcctgagtcttcatcttagggcatcgctcctcctcacgccacaaatctggcctctctcttgcttacaaatgtctaggtccccactgcctgctggaaagaaaacacactcctttgcttagcccacagttctccatttcacttgacccctgcccacctctccaacctaactggcttacttcctagtctacttgaggctgcgatcacactgaggaactcacaattccaaacatacaagaggctccctcttgacgtggcacttacccacgtgctgttccaccttccctcatgctgtttcacctttcttcggactattttccagccttctgtcagcagtgaaacttataaaattttttgtgatttc

SEQ ID NO: 146112 - DNA, 1900 bp, Homo sapiens; identical to SEQ ID NO: 146088
  Payload ID: 8970
  Gene Symbol: KIR3DL1
  Gene Name: killer cell immunoglobulin-like receptor, three domains, long cytoplasmic tail, 1
  ENST ID: ENST00000619411
  CDS Start-End: 64-1398

SEQ ID NO: 146113 - DNA, 1658 bp, Homo sapiens; identical to SEQ ID NO: 146091
  Payload ID: 8970
  Gene Symbol: KIR3DL1
  Gene Name: killer cell immunoglobulin-like receptor, three domains, long cytoplasmic tail, 1
  Uniprot ID: P43629
  ENST ID: ENST00000616945
  CDS Start-End: 34-1368

SEQ ID NO: 146114 - DNA, 1810 bp, Homo sapiens; identical to SEQ ID NO: 146099
  Payload ID: 8970
  Gene Symbol: KIR3DL1
  Gene Name: killer cell immunoglobulin-like receptor, three domains, long cytoplasmic tail, 1
  ENST ID: ENST00000614221
  CDS Start-End: 25-1308

SEQ ID NO: 146115 - DNA, 1810 bp, Homo sapiens
  Payload ID: 8970
  Gene Symbol: KIR3DL1
  Gene Name: killer cell immunoglobulin-like receptor, three domains, long cytoplasmic tail, 1
  ENST ID: ENST00000616424
  CDS Start-End: 25-1308
ccgcctgtctgcaccggcagcaccatgttgctcatggtcgtcagcatggcgtgtgttgggttcttcttggtccagagggccggtccacacgtgggtggtcaggacaagcccttcctgtctgcctggcccagcgctgtggtgcctcgaggaggacacgtgactcttcggtgtcactatcgtcataggtttaacaatttcatgctatacaaagaagacagaatccacgttcccatcttccatggcagattattccaggagagcttcaacatgagccctgtgaccacagcacatgcagggaactacacatgtcggggttcacacccacactcccccactgggtggtcggcacccagcaaccccgtggtgatcatggtcacaggaaaccacagaaaaccttccctcctggcccacccaggtcccctggtgaaatcaggagagagagtcatcctgcaatgttggtcagatatcatgtttgagcacttctttctgcacaaagaggggatctctaaggacccctcacgcctcgttggacagatccatgatggggtctccaaggccaatttctccatcggtcccatgatgcttgcccttgcagggacctacagatgctacggttctgttactcacaccccctatcagttgtcagctcccagtgatcccctggacatcgtggtcacaggtccatatgagaaaccttctctctcagcccagccgggccccaaggttcaggcaggagagagcgtgaccttgtcctgcagctcccggagctcctatgacatgtaccatctatccagggaggggggagcccatgaacgtaggctccctgcagtgcgcaaggtcaacagaacattcaaggcagatttccctctgggccctgccacccacggagggacctacagatgcttcggctctttccgtcactctccctacgagtggtcagacccgagtgacccactgcttgtttctgtcacaggtaaccccagacacctgcacattctgattgggacctcagtggtcatcatcctcttcatcctcctcctcttctttctccttcatctctggtgctccaacaaaaaaaatgctgctgtaatggaccaagagcctgcagggaacagaacagccaacagcgaggactctgatgaacaagaccctgaggaggtgacatacgcacagttggatcactgcgttttcacacagagaaaaatcactcgcccttctcagaggcccaagacaccccctacagataccatcttgtacacggaacttccaaatgctaagcccagatccaaagttgtctcctgcccatgagcaccacagtcaggccttgaggacgtcttctagggagacaacagccctgtctcaaaaccgagttgccagctcccatgtaccagcagctggaatctgaaggcgtgagtcttcatcttagggcatcgctcctcctcacgccacaaatctggtgcctctctcttgcttacaaatgtctaggtccccactgcctgctggaaagaaaacacactcctttgcttagcccacagttctccatttcacttgacccctgcccacctctccaacctaactggcttacttcctagtctacttgaggctgcaatcacactgaggaactcacaattccaaacatacaagaggctccctcttgacgtggcacttacccacgtgctgttccaccttccctcatgctgtttcacctttcttcggactattttccagccttctgtcagcagtgaaacttataaaattttttgtgatttcaatgtagctgtctcctcttcaaataaacatgtctgccctc

SEQ ID NO: 146116 - DNA, 1860 bp, Homo sapiens
  Payload ID: 8970
  Gene Symbol: KIR3DL1
  Gene Name: killer cell immunoglobulin-like receptor, three domains, long cytoplasmic tail, 1
  ENST ID: ENST00000613229
  CDS Start-End: 64-1398
ataacatcctgtgcgctgctgagctgagctggggcgcagccgcctgtctgcaccggcagcaccatgtcgctcatggtcgtcagcatggcgtgtgttgggttgttcttggtccagagggccggtccacacatgggtggtcaggacaaacccttcctgtctgcctggcccagcgctgtggtgcctcgaggaggacacgtgactcttcggtgtcactatcatcataggtttaacaatttcatgctatacaaagaagacggaatccacattcccatcttccatggcagaatattccaggagagcttcaacatgagccctgtgaccacagcacatgcagggaactacacatgtcggggttcacacccacactcccccactgggtggttggcacccagcaaccccgtggtgatcatggtcacaggaaaccacagaaaaccttccctcctggcccacccaggtcccctggtgaaatcaggagagagagtcatcctgcaatgttggtcagatatcatgtttgagcacttctttctgcacaaagaggggatctctaaggacccctcacgcctcgttggacagatccatgatggggtctccaaggccaatttctccatcggtcccatgatgcttgcccttgcagggacctacagatgctacggttctgttactcacacctcctatcagttgtcagctcccagtgatcccctggacatcgtggtcacaggtccatatgagaaaccttctctctcagcccagccgggccccaaggttcaggcaggagagagcgtgaccttgtcctgtagctcccggagctcctatgacatgtaccatctatccagggaggggggagcccatgaacgtaggctccctgcagtgcgcaaggtcaacagaacattccaggcagatttccctctgggccctgccacccacggagggacctacagatgctttggctctttccgtcactctccctacgagttgtcagacccgagtgacccactgcttgtttctgtcacaggaaacccttcaagtagttggccttcacccacagaaccaagctccaaatctggtaaccccagacacctgcatgttctcattgggacctcagtggtcatcatcctcttcatcctcctcctcttctttctccttcatctctggtactccaacaaaaaaaatgctgctgtaatggaccaagagcctgcagggaacagaacagccaacagcgaggactctgatgaacaagaccctcaggaggtgacatacgcacagttggatcactgcgttttcacacagagaaaaatcactcgcccttctcagaggcccaagacaccccctacagataccatcttgtacacggaacttccaaatgctaagcccagatccaaagttgtctcctgcccatgagcaccacagtcaggccttgagggcgtcttctagggagacaacagccctgtctcaaaaccgagttgccagctcccatgtaccagcagctggaatctgaaggcctgagtcttcatcttagggcatcgctcctcctcacgccacaaatctggtgcctctctcttgcttacaaatgtctaggtccccactgcctgctggaaagaaaacacactcctttgcttagcccacagttctccatttcacttgacccctgcccacctctccaacctaactggcttacttcctagtctacttgaggctgcgatcacactgaggaactcacaattccaaacatacaagaggctccctcttgacgtggcacttacccacgtgctgttccaccttccctcatgctgtttcacctttcttcggactattttccagccttctgtcagcagtgaaacttataaaattttttgtgatttc

SEQ ID NO: 146117 - DNA, 1852 bp, Homo sapiens; identical to SEQ ID NO: 146078
  Payload ID: 8970
  Gene Symbol: KIR3DL1
  Gene Name: killer cell immunoglobulin-like receptor, three domains, long cytoplasmic tail, 1
  ENST ID: ENST00000618016
  CDS Start-End: 1-1368

SEQ ID NO: 146118 - DNA, 1900 bp, Homo sapiens
  Payload ID: 8970
  Gene Symbol: KIR3DL1
  Gene Name: killer cell immunoglobulin-like receptor, three domains, long cytoplasmic tail, 1
  ENST ID: ENST00000613816
  CDS Start-End: 64-1398
ataacatcctgtgcgctgctgagctgagctggggcgcggccgcctgtctgcaccggcagcaccatgtcgctcatggtcgtcagcatggcgtgtgttgggttcttcttggtccagagggccggtccacacgtgggtggtcaggacaagcccttcctgtctgcctggcccagcgctgtggtgcctcgaggaggacacgtgactcttcggtgtcactatcgtcataggtttaacaatttcatgctatacaaagaagacagaatccacgttcccatcttccatggcagattattccaggagagcttcaacatgagccctgtgaccacagcacatgcagggaactacacatgtcggggttcacacccacactcccccactgggtggtcggcacccagcaaccccgtggtgatcatggtcacaggaaaccacagaaaaccttccctcctggcccacccaggtcccctggtgaaatcaggagagagagtcatcctgcaatgttggtcagatatcatgtttgagcacttctttctgcacaaagaggggatctctaaggacccctcacgcctcgttggacagatccatgatggggtctccaaggccaatttctccatcggtcccatgatgcttgcccttgcagggacctacagatgctacggttctgttactcacaccccctatcagttgtcagctcccagtgatcccctggacatcgtggtcacaggtccatatgagaaaccttctctctcagcccagccgggccccaaggttcaggcaggagagagcgtgaccttgtcctgtagctcccggagctcctatgacatgtaccatctatccagggaggggggagcccatgaacgtaggctccctgcagtgcgcaaggtcaacagaacattccaggcagatttccctctgggccctgccacccacggagggacctacagatgcttcggctctttccgtcactctccctacgagtggtcagacccgagtgacccactgcttgtttctgtcacaggaaacccttcaagtagttggccttcacccacagaaccaagctccaaatctggtaaccccagacacctgcacgttctgattgggacctcagtggtcatcatcctcttcatcctcctcctcttctttctccttcatctctggtgctccaacaaaaaaaatgctgctgtaatggaccaagagcctgcagggaacagaacagccaacagcgaggactctgatgaacaagaccctcaggaggtgacatatgcacagttggatcactgcgttttcacacagagaaaaatcactcgcccttctcagaggcccaagacaccccctacagataccatcttgtacacggaacttccaaatgctaagcccagatccaaagttgtctcctgcccatgagcaccacagtcaggccttgagggcgtcttctagggagacaacagccctgtctcaaaaccgagttgccagctcccatgtaccagcagctggaatctgaaggcgtgagtcttcatcttagggcatcgctcctcctcacgccacaaatctggtgcctctctcttgcttacaaatgtctaggtccccactgcctgctggaaagaaaacacactcctttgcttagcccacagttctccatttcacttgacccctgcccacctctccaacctaactggcttacttcctagtctacttgaggctgcgatcacactgagtaactcacaattccaaacatacaagaggctccctcttgacgtggcacttacccacgtgctgttccaccttccctcatgctgtttcacctttcttcggactattttccagccttctgtcagcagtgaaacttataaaattttttgtgatttcaatgtagctgtctcctcttcaaataaacatgtctgccctc

SEQ ID NO: 146119 - DNA, 1900 bp, Homo sapiens
  Payload ID: 8970
  Gene Symbol: KIR3DL1
  Gene Name: killer cell immunoglobulin-like receptor, three domains, long cytoplasmic tail, 1
  ENST ID: ENST00000620579
  CDS Start-End: 64-1398
ataacatcctgtgcgctgctgagctgagctggggcgcggccgcctgtctgcaccggcagcaccatgtcgctcatggtcgtcagcatggcgtgtgttgggttcttcttggtccagagggccggtccacacgtgggtggtcaggacaagcccttcctgtctgcctggcccagcgctgtggtgcctcgaggaggacacgtgactcttcggtgtcactatcgtcataggtttaacaatttcatgctatacaaagaagacagaatccacgttcccatcttccatggcagattattccaggagagcttcaacatgagccctgtgaccacagcacatgcagggaactacacatgtcggggttcacacccacactcccccactgggtggtcggcacccagcaaccccgtggtgatcatggtcacaggaaaccacagaaaaccttccctcctggcccacccaggtcccctggtgaaatcaggagagagagtcatcctgcaatgttggtcagatatcatgtttgagcacttctttctgcacaaagaggggatctctaaggacccctcaagcctcgttggacagatccatgatggggtctccaaggccaatttctccatcggtcccatgatgcttgcccttgcagggacctacagatgctacggttctgttactcacaccccctatcagttgtcagctcccagtgatcccctggacatcgtggtcacaggtccatatgagaaaccttctctctcagcccagccgggccccaaggttcaggcaggagagagcgtgaccttgtcctgtagctcccggagctcctatgacatgtaccatctatccagggaggggggagcccatgaacgtaggctccctgcagtgcgcaaggtcaacagaacattccaggcagatttccctctgggccctgccacccacggagggacctacagatgcttcggctctttccgtcactctccctacgagtggtcagacccgagtgacccactgcttgtttctgtcacaggaaacccttcaagtagttggccttcacccacagaaccaagctccaaatctggtaaccccagacacctgcacattctgattgggacctcagtggtcatcatcctcttcatcctcctcctcttctttctccttcatctctggtgctccaacaaaaaaaatgctgctgtaatggaccaagagcctgcagggaacagaacagccaacagcgaggactctgatgaacaagaccctcaggaggtgacatacgcacagttggatcactgcgttttcacacagagaaaaatcactcgcccttctcagaggcccaagacaccccctacagataccatcttgtacacggaacttccaaatgctaagcccagatccaaagttgtctcctgcccatgagcaccacagtcaggccttgaggacgtcttctagggagacaacagccctgtctcaaaaccgagttgccagctcccatgtaccagcagctggaatctgaaggcgtgagtcttcatcttagggcatcgctcctcctcacgccacaaatctggtgcctctctcttgcttacaaatgtctaggtccccactgcctgctggaaagaaaacacactcctttgcttagcccacagttctccatttcacttgacccctgcccacctctccaacctaactggcttacttcctagtctacttgaggctgcaatcacactgaggaactcacaattccaaacatacaagaggctccctcttgacgtggcacttacccacgtgctgttccaccttccctcatgctgtttcacctttcttcggactattttccagccttctgtcagcagtgaaacttataaaattttttgtgatttcaatgtagctgtctcctcttcaaataaacatgtctgccctc

SEQ ID NO: 146120 - DNA, 1865 bp, Homo sapiens
  Payload ID: 8970
  Gene Symbol: KIR3DL1
  Gene Name: killer cell immunoglobulin-like receptor, three domains, long cytoplasmic tail, 1
  ENST ID: ENST00000620568
  CDS Start-End: 28-1362
cggccgcctgtctgcaccggcagcaccatgttgctcatggtcgtcagcatggcgtgtgttgggttcttcttggtccagagggccggtccacacgtgggtggtcaggacaagcccttcctgtctgcctggcccagcgctgtggtgcctcgaggaggacacgtgactcttcggtgtcactatcgtcataggtttaacaatttcatgctatacaaagaagacagaatccacgttcccatcttccatggcagattattccaggagagcttcaacatgagccctgtgaccacagcacatgcagggaactacacatgtcggggttcacacccacactcccccactgggtggtcggcacccagcaaccccgtggtgatcatggtcacaggaaaccacagaaaaccttccctcctggcccacccaggtcccctggtgaaatcaggagagagagtcatcctgcaatgttggtcagatatcatgtttgagcacttctttctgcacaaagaggggatctctaaggacccctcacgcctcgttggacagatccatgatggggtctccaaggccaatttctccatcggtcccatgatgcttgcccttgcagggacctacagatgctacggttctgttactcacaccccctatcagttgtcagctcccagtgatcccctggacatcgtggtcacaggtccatatgagaaaccttctctctcagcccagccgggccccaaggttcaggcaggagagagcgtgaccttgtcctgcagctcccggagctcctatgacatgtaccatctatccagggaggggggagcccatgaacgtaggctccctgcagtgcgcaaggtcaacagaacattccaggcagatttccctctgggccctgccacccacggagggacctacagatgcttcggctctttccgtcactctccctacgagtggtcagacccgagtgacccactgcttgtttctgtcacaggaaacccttcaagtagttggccttcacccacagaaccaagctccaaatctggtaaccccagacacctgcacattctgattgggacctcagtggtcatcatcctcttcatcctcctcctcttctttctccttcatctctggtgctccaacaaaaaaaatgctgctgtaatggaccaagagcctgcagggaacagaacagccaacagcgaggactctgatgaacaagaccctgaggaggtgacatacgcacagttggatcactgcgttttcacacagagaaaaatcactcgcccttctcagaggcccaagacaccccctacagataccatcttgtacacggaacttccaaatgctaagcccagatccaaagttgtctcctgcccatgagcaccacagtcaggccttgaggacgtcttctagggagacaacagccctgtctcaaaaccgagttgccagctcccatgtaccagcagctggaatctgaaggcgtgagtcttcatcttagggcatcgctcctcctcacgccacaaatctggtgcctctctcttgcttacaaatgtctaggtccccactgcctgctggaaagaaaacacactcctttgcttagcccacagttctccatttcacttgacccctgcccacctctccaacctaactggcttacttcctagtctacttgaggctgcaatcacactgaggaactcacaattccaaacatacaagaggctccctcttgacgtggcacttacccacgtgctgttccaccttccctcatgctgtttcacctttcttcggactattttccagccttctgtcagcagtgaaacttataaaattttttgtgatttcaatgtagctgtctcctcttcaaataaacatgtctgccctca

SEQ ID NO: 146121 - DNA, 1453 bp, Homo sapiens
  Payload ID: 8970
  Gene Symbol: KIR3DL1
  Gene Name: killer cell immunoglobulin-like receptor, three domains, long cytoplasmic tail, 1
  ENST ID: ENST00000611230
  CDS Start-End: 12-1061
ccggcagcaccatgttgctcatggtcgtcagcatggcgtgtgttgggttcttcttggtccagagggccggtccacacgtgggaaaccacagaaaaccttccctcctggcccacccaggtcccctggtgaaatcaggagagagagtcatcctgcaatgttggtcagatatcatgtttgagcacttctttctgcacaaagaggggatctctaaggacccctcacgcctcgttggacagatccatgatggggtctccaaggccaatttctccatcggtcccatgatgcttgcccttgcagggacctacagatgctacggttctgttactcacaccccctatcagttgtcagctcccagtgatcccctggacatcgtggtcacaggtccatatgagaaaccttctctctcagcccagccgggccccaaggttcaggcaggagagagcgtgaccttgtcctgcagctcccggagctcctatgacatgtaccatctatccagggaggggggagcccatgaacgtaggctccctgcagtgcgcaaggtcaacagaacattccaggcagatttccctctgggccctgccacccacggagggacctacagatgcttcggctctttccgtcactctccctacgagtggtcagacccgagtgacccactgcttgtttctgtcacaggaaacccttcaagtagttggccttcacccacagaaccaagctccaaatctggtaaccccagacacctgcacattctgattgggacctcagtggtcatcatcctcttcatcctcctcctcttctttctccttcatctctggtgctccaacaaaaaaaatgctgctgtaatggaccaagagcctgcagggaacagaacagccaacagcgaggactctgatgaacaagaccctcaggaggtgacatacgcacagttggatcactgcgttttcacacagagaaaaatcactcgcccttctcagaggcccaagacaccccctacagataccatcttgtacacggaacttccaaatgctaagcccagatccaaagttgtctcctgcccatgagcaccacagtcaggccttgaggacgtcttctagggagacaacagccctgtctcaaaaccgagttgccagctcccatgtaccagcagctggaatctgaaggcgtgagtcttcatcttagggcatcgctcctcctcacgccacaaatctggtgcctctctcttgcttacaaatgtctaggtccccactgcctgctggaaagaaaacacactcctttgcttagcccacagttctccatttcacttgacccctgcccacctctccaacctaactggcttacttcctagtctacttgaggctgcaatcacactgaggaactcacaattccaaacatacaagaggctccctcttgacgtggcacttacccacgtgctgttccaccttccctcatgctg

SEQ ID NO: 146122 - DNA, 1852 bp, Homo sapiens; identical to SEQ ID NO: 146078
  Payload ID: 8970
  Gene Symbol: KIR3DL1
  Gene Name: killer cell immunoglobulin-like receptor, three domains, long cytoplasmic tail, 1
  ENST ID: ENST00000614736
  CDS Start-End: 1-1368

SEQ ID NO: 146123 - DNA, 1810 bp, Homo sapiens
  Payload ID: 8970
  Gene Symbol: KIR3DL1
  Gene Name: killer cell immunoglobulin-like receptor, three domains, long cytoplasmic tail, 1
  ENST ID: ENST00000618436
  CDS Start-End: 25-1308
ccgcctgtctgcaccggcagcaccatgtcgctcatggtcgtcagcatggcgtgtgttgggttgttcttggtccagagggccggtccacacatgggtggtcaggacaaacccttcctgtctgcctggcccagcgctgtggtgcctcgaggaggacacgtgactcttcggtgtcactatcgtcataggtttaacaatttcatgctatacaaagaagacagaatccacattcccatcttccatggcagaatattccaggagagcttcaacatgagccctgtgaccacagcacatgcagggaactacacatgtcggggttcacacccacactcccccactgggtggtcggcacccagcaaccccgtggtgatcatggtcacaggaaaccacagaaaaccttccctcctggcccacccaggtcccctggtgaaatcaggagagagagtcatcctgcaatgttggtcagatatcatgtttgagcacttctttctgcacaaagaggggatctctaaggacccctcacgcctcgttggacagatccatgatggggtctccaaggccaatttctccatcggtcccatgatgcttgcccttgcagggacctacagatgctacggttctgttactcacacctcctatcagttgtcagctcccagtgatcccctggacatcgtggtcacaggtccatatgagaaaccttctctctcagcccagccgggccccaaggttcaggcaggagagagcgtgaccttgtcctgtagctcccggagctcctatgacatgtaccatctatccagggaggggggagcccatgaacgtaggctccctgcagtgcgcaaggtcaacagaacattccaggcagatttccctctgggccctgccacccacggagggacctacagatgctttggctctttccgtcactctccctacgagttgtcagacccgagtgacccactgcttgtttctgtcacaggtaaccccagacacctgcacattctgattgggacctcagtggtcatcatcctcttcatcctcctcctcttctttctccttcatctctggtgctccaacaaaaaaaatgctgctgtaatggaccaagagcctgcagggaacagaacagccaacagcgaggactctgatgaacaagaccctgaggaggtgacatacgcacagttggatcactgcgttttcacacagagaaaaatcactcgcccttctcagaggcccaagacaccccctacagataccatcttgtacacggaacttccaaatgctaagcccagatccaaagttgtctcctgcccatgagcaccacagtcaggccttgagggcgtcttctagggagacaacagccctgtctcaaaaccgagttgccagctcccatgtaccagcagctggaatctgaaggcgtgagtcttcatcttagggcatcgctcctcctcacgccacaaatctggtgcctctctcttgcttacaaatgtctaggtccccactgcctgctggaaagaaaacacactcctttgcttagcccacagttctccatttcacttgacccctgcccacctctccaacctaactggcttacttcctagtctacttgaggctgcgatcacactgaggaactcacaattccaaacatacaagaggctccctcttgacgtggcacttacccacgtgctgttccaccttccctcatgctgtttcacctttcttcggactattttccagccttctgtcagcagtgaaacttataaaattttttgtgatttcaatgtagctgtctcctcttcaaataaacatgtctgccctc

SEQ ID NO: 146124 - DNA, 1810 bp, Homo sapiens; identical to SEQ ID NO: 146123
  Payload ID: 8970
  Gene Symbol: KIR3DL1
  Gene Name: killer cell immunoglobulin-like receptor, three domains, long cytoplasmic tail, 1
  ENST ID: ENST00000620836
  CDS Start-End: 25-1308

SEQ ID NO: 146125 - DNA, 1466 bp, Homo sapiens
  Payload ID: 8970
  Gene Symbol: KIR3DL1
  Gene Name: killer cell immunoglobulin-like receptor, three domains, long cytoplasmic tail, 1
  ENST ID: ENST00000619931
  CDS Start-End: 25-1074
ccgcctgtctgcaccggcagcaccatgttgctcatggtcgtcagcatggcgtgtgttgggttcttcttggtccagagggccggtccacacgtgggaaaccacagaaaaccttccctcctggcccacccaggtcccctggtgaaatcaggagagagagtcatcctgcaatgttggtcagatatcatgtttgagcacttctttctgcacaaagaggggatctctaaggacccctcaagcctcgttggacagatccatgatggggtctccaaggccaatttctccatcggtcccatgatgcttgcccttgcagggacctacagatgctacggttctgttactcacaccccctatcagttgtcagctcccagtgatcccctggacatcgtggtcacaggtccatatgagaaaccttctctctcagcccagccgggccccaaggttcaggcaggagagagcgtgaccttgtcctgtagctcccggagctcctatgacatgtaccatctatccagggaggggggagcccatgaacgtaggctccctgcagtgcgcaaggtcaacagaacattccaggcagatttccctctgggccctgccacccacggagggacctacagatgcttcggctctttccgtcactctccctacgagtggtcagacccgagtgacccactgcttgtttctgtcacaggaaacccttcaagtagttggccttcacccacagaaccaagctccaaatctggtaaccccagacacctgcacattctgattgggacctcagtggtcatcatcctcttcatcctcctcctcttctttctccttcatctctggtgctccaacaaaaaaaatgctgctgtaatggaccaagagcctgcagggaacagaacagccaacagcgaggactctgatgaacaagaccctcaggaggtgacatacgcacagttggatcactgcgttttcacacagagaaaaatcactcgcccttctcagaggcccaagacaccccctacagataccatcttgtacacggaacttccaaatgctaagcccagatccaaagttgtctcctgcccatgagcaccacagtcaggccttgaggacgtcttctagggagacaacagccctgtctcaaaaccgagttgccagctcccatgtaccagcagctggaatctgaaggcgtgagtcttcatcttagggcatcgctcctcctcacgccacaaatctggtgcctctctcttgcttacaaatgtctaggtccccactgcctgctggaaagaaaacacactcctttgcttagcccacagttctccatttcacttgacccctgcccacctctccaacctaactggcttacttcctagtctacttgaggctgcaatcacactgaggaactcacaattccaaacatacaagaggctccctcttgacgtggcacttacccacgtgctgttccaccttccctcatgctg

SEQ ID NO: 146126 - DNA, 1865 bp, Homo sapiens; identical to SEQ ID NO: 146081
  Payload ID: 8970
  Gene Symbol: KIR3DL1
  Gene Name: killer cell immunoglobulin-like receptor, three domains, long cytoplasmic tail, 1
  ENST ID: ENST00000611451
  CDS Start-End: 28-1362

SEQ ID NO: 146127 - DNA, 1658 bp, Homo sapiens
  Payload ID: 8970
  Gene Symbol: KIR3DL1
  Gene Name: killer cell immunoglobulin-like receptor, three domains, long cytoplasmic tail, 1
  ENST ID: ENST00000615258
  CDS Start-End: 39-1373
gagctggggcgcggccgcctgtctgcaccggcagcaccatgtcgctcatggtcgtcagcatggcgtgtgttgggttgttcttggtccagagggccggtccacacatgggtggtcaggacaaacccttcctgtctgcctggcccagcgctgtggtgcctcgaggaggacacgtgactcttcggtgtcactatcatcataggtttaacaatttcatgctatacaaagaagacggaatccacattcccatcttccatggcagaatattccaggagagcttcaacatgagccctgtgaccacagcacatgcagggaactacacatgtcggggttcacacccacactcccccactgggtggttggcacccagcaaccccgtggtgatcatggtcacaggaaaccacagaaaaccttccctcctggcccacccaggtcccctggtgaaatcaggagagagagtcatcctgcaatgttggtcagatatcatgtttgagcacttctttctgcacaaagaggggatctctaaggacccctcacgcctcgttggacagatccatgatggggtctccaaggccaatttctccatcggtcccatgatgcttgcccttgcagggacctacagatgctacggttctgttactcacacctcctatcagttgtcagctcccagtgatcccctggacatcgtggtcacaggtccatatgagaaaccttctctctcagcccagccgggccccaaggttcaggcaggagagagcgtgaccttgtcctgtagctcccggagctcctatgacatgtaccatctatccagggaggggggagcccatgaacgtaggctccctgcagtgcgcaaggtcaacagaacattccaggcagatttccctctgggccctgccacccacggagggacctacagatgctttggctctttccgtcactctccctacgagttgtcagacccgagtgacccactgcttgtttctgtcacaggaaacccttcaagtagttggccttcacccacagaaccaagctccaaatctggtaaccccagacacctgcatgttctcattgggacctcagtggtcatcatcctcttcatcctcctcctcttctttctccttcatctctggtactccaacaaaaaaaatgctgctgtaatggaccaagagcctgcagggaacagaacagccaacagcgaggactctgatgaacaagaccctcaggaggtgacatacgcacagttggatcactgcgttttcacacagagaaaaatcactcgcccttctcagaggcccaagacaccccctacagataccatcttgtacacggaacttccaaatgctaagcccagatccaaagttgtctcctgcccatgagcaccacagtcaggccttgagggcgtcttctagggagacaacagccctgtctcaaaaccgagttgccagctcccatgtaccagcagctggaatctgaaggcctgagtcttcatcttagggcatcgctcctcctcacgccacaaatctggtgcctctctcttgcttacaaatgtctaggtccccactgcctgctggaaagaaaacacactcctttgcttagcccacagttctccatttcacttgacccctgcccacctctccaacctaactggcttacttcctagt

SEQ ID NO: 146128 - DNA, 1658 bp, Homo sapiens
  Payload ID: 8970
  Gene Symbol: KIR3DL1
  Gene Name: killer cell immunoglobulin-like receptor, three domains, long cytoplasmic tail, 1
  ENST ID: ENST00000611993
  CDS Start-End: 39-1373
gagctggggcgcggccgcctgtctgcaccggcagcaccatgtcgctcatggtcgtcagcatggcgtgtgttgggttgttcttggtccagagggccggtccacacatgggtggtcaggacaaacccttcctgtctgcctggcccagcgctgtggtgcctcgaggaggacacgtgactcttcggtgtcactatcgtcataggtttaacaatttcatgctatacaaagaagacagaatccacattcccatcttccatggcagaatattccaggagagcttcaacatgagccctgtgaccacagcacatgcagggaactacacatgtcggggttcacacccacactcccccactgggtggtcggcacccagcaaccccgtggtgatcatggtcacaggaaaccacagaaaaccttccctcctggcccacccaggtcccctggtgaaatcaggagagagagtcatcctgcaatgttggtcagatatcatgtttgagcacttctttctgcacaaagaggggatctctaaggacccctcacgcctcgttggacagatccatgatggggtctccaaggccaatttctccatcggtcccatgatgcttgcccttgcagggacctacagatgctacggttctgttactcacacctcctatcagttgtcagctcccagtgatcccctggacatcgtggtcacaggtccatatgagaaaccttctctctcagcccagccgggccccaaggttcaggcaggagagagcgtgaccttgtcctgtagctcccggagctcctatgacatgtaccatctatccagggaggggggagcccatgaacgtaggctccctgcagtgcgcaaggtcaacagaacattccaggcagatttccctctgggccctgccacccacggagggacctacagatgctttggctctttccgtcactctccctacgagttgtcagacccgagtgacccactgcttgtttctgtcacaggaaacccttcaagtagttggccttcacccacagaaccaagctccaaatctggtaaccccagacacctgcacattctgattgggacctcagtggtcatcatcctcttcatcctcctcctcttctttctccttcatctctggtgctccaacaaaaaaaatgctgctgtaatggaccaagagcctgcagggaacagaacagccaacagcgaggactctgatgaacaagaccctgaggaggtgacatacgcacagttggatcactgcgttttcacacagagaaaaatcactcgcccttctcagaggcccaagacaccccctacagataccatcttgtacacggaacttccaaatgctaagcccagatccaaagttgtctcctgcccatgagcaccacagtcaggccttgagggcgtcttctagggagacaacagccctgtctcaaaaccgagttgccagctcccatgtaccagcagctggaatctgaaggcgtgagtcttcatcttagggcatcgctcctcctcacgccacaaatctggtgcctctctcttgcttacaaatgtctaggtccccactgcctgctggaaagaaaacacactcctttgcttagcccacagttctccatttcacttgacccctgcccacctctccaacctaactggcttacttcctagt

SEQ ID NO: 146129 - DNA, 1875 bp, Homo sapiens
  Payload ID: 8970
  Gene Symbol: KIR3DL1
  Gene Name: killer cell immunoglobulin-like receptor, three domains, long cytoplasmic tail, 1
  ENST ID: ENST00000614720
  CDS Start-End: 39-1373
gagctggggcgcggccgcctgtctgcaccggcagcaccatgttgctcatggtcgtcagcatggcgtgtgttgggttcttcttggtccagagggccggtccacacgtgggtggtcaggacaagcccttcctgtctgcctggcccagcgctgtggtgcctcgaggaggacacgtgactcttcggtgtcactatcgtcataggtttaacaatttcatgctatacaaagaagacagaatccacgttcccatcttccatggcagattattccaggagagcttcaacatgagccctgtgaccacagcacatgcagggaactacacatgtcggggttcacacccacactcccccactgggtggtcggcacccagcaaccccgtggtgatcatggtcacaggaaaccacagaaaaccttccctcctggcccacccaggtcccctggtgaaatcaggagagagagtcatcctgcaatgttggtcagatatcatgtttgagcacttctttctgcacaaagaggggatctctaaggacccctcacgcctcgttggacagatccatgatggggtctccaaggccaatttctccatcggtcccatgatgcttgcccttgcagggacctacagatgctacggttctgttactcacaccccctatcagttgtcagctcccagtgatcccctggacatcgtggtcacaggtccatatgagaaaccttctctctcagcccagccgggccccaaggttcaggcaggagagagcgtgaccttgtcctgcagctcccggagctcctatgacatgtaccatctatccagggagcggggagcccatgaacgtaggctccctgcagtgcgcaaggtcaacagaacattccaggcagatttccctctgggccctgccacccacggagggacctacagatgcttcggctctttccgtcactctccctacgagtggtcagacccgagtgacccactgcttgtttctgtcacaggaaacccttcaagtagttggccttcacccacagaaccaagctccaaatctggtaaccccagacacctgcacattctgattgggacctcagtggtcatcatcctcttcatcctcctcctcttctttctccttcatctctggtgctccaacaaaaaaaatgctgctgtaatggaccaagagcctgcagggaacagaacagccaacagcgaggactctgatgaacaagaccctgaggaggtgacatacgcacagttggatcactgcgttttcacacagagaaaaatcactcgcccttctcagaggcccaagacaccccctacagataccatcttgtacacggaacttccaaatgctaagcccagatccaaagttgtctcctgcccatgagcaccacagtcaggccttgaggacgtcttctagggagacaacagccctgtctcaaaaccgagttgccagctcccatgtaccagcagctggaatctgaaggcgtgagtcttcatcttagggcatcgctcctcctcacgccacaaatctggtgcctctctcttgcttacaaatgtctaggtccccactgcctgctggaaagaaaacacactcctttgcttagcccacagttctccatttcacttgacccctgcccacctctccaacctaactggcttacttcctagtctacttgaggctgcaatcacactgaggaactcacaattccaaacatacaagaggctccctcttgacgtggcacttacccacgtgctgttccaccttccctcatgctgtttcacctttcttcggactattttccagccttctgtcagcagtgaaacttataaaattttttgtgatttcaatgtagctgtctcctcttcaaataaacatgtctgccctc

SEQ ID NO: 146130 - DNA, 1860 bp, Homo sapiens
  Payload ID: 8970
  Gene Symbol: KIR3DL1
  Gene Name: killer cell immunoglobulin-like receptor, three domains, long cytoplasmic tail, 1
  Uniprot ID: P43629
  ENST ID: ENST00000616188
  CDS Start-End: 64-1398
ataacatcctgtgcgctgctgagctgagctggggcgcagccgcctgtctgcaccggcagcaccatgtcgctcatggtcgtcagcatggcgtgtgttgggttgttcttggtccagagggccggtccacacatgggtggtcaggacaaacccttcctgtctgcctggcccagcgctgtggtgcctcgaggaggacacgtgactcttcggtgtcactatcgtcataggtttaacaatttcatgctatacaaagaagacagaatccacattcccatcttccatggcagaatattccaggagagcttcaacatgagccctgtgaccacagcacatgcagggaactacacatgtcggggttcacacccacactcccccactgggtggtcggcacccagcaaccccgtggtgatcatggtcacaggaaaccacagaaaaccttccctcctggcccacccaggtcccctggtgaaatcaggagagagagtcatcctgcaatgttggtcagatatcatgtttgagcacttctttctgcacaaagaggggatctctaaggacccctcacgcctcgttggacagatccatgatggggtctccaaggccaatttctccatcggtcccatgatgcttgcccttgcagggacctacagatgctacggttctgttactcacaccccctatcagttgtcagctcccagtgatcccctggacatcgtggtcacaggtccatatgagaaaccttctctctcagcccagccgggccccaaggttcaggcaggagagagcgtgaccttgtcctgtagctcccggagctcctatgacatgtaccatctatccagggaggggggagcccatgaacgtaggctccctgcagtgcgcaaggtcaacagaacattccaggcagatttccctctgggccctgccacccacggagggacctacagatgcttcggctctttccgtcactctccctacgagtggtcagacccgagtgacccactgcttgtttctgtcacaggaaacccttcaagtagttggccttcacccacagaaccaagctccaaatctggtaaccccagacacctgcacattctgattgggacctcagtggtcatcatcctcttcatcctcctcctcttctttctccttcatctctggtgctccaacaaaaaaaatgctgctgtaatggaccaagagcctgcagggaacagaacagccaacagcgaggactctgatgaacaagaccctgaggaggtgacatacgcacagttggatcactgcgttttcacacagagaaaaatcactcgcccttctcagaggcccaagacaccccctacagataccatcttgtacacggaacttccaaatgctaagcccagatccaaagttgtctcctgcccatgagcaccacagtcaggccttgaggacgtcttctagggagacaacagccctgtctcaaaaccgagttgccagctcccatgtaccagcagctggaatctgaaggcgtgagtcttcatcttagggcatcgctcctcctcacgccacaaatctggtgcctctctcttgcttacaaatgtctaggtccccactgcctgctggaaagaaaacacactcctttgcttagcccacagttctccatttcacttgacccctgcccacctctccaacctaactggcttacttcctagtctacttgaggctgcaatcacactgaggaactcacaattccaaacatacaagaggctccctcttgacgtggcacttacccacgtgctgttccaccttccctcatgctgtttcacctttcttcggactattttccagccttctgtcagcagtgaaacttataaaattttttgtgatttc

SEQ ID NO: 146131 - DNA, 1852 bp, Homo sapiens; identical to SEQ ID NO: 146078
  Payload ID: 8970
  Gene Symbol: KIR3DL1
  Gene Name: killer cell immunoglobulin-like receptor, three domains, long cytoplasmic tail, 1
  ENST ID: ENST00000615693
  CDS Start-End: 1-1368

SEQ ID NO: 146132 - DNA, 1497 bp, Homo sapiens
  Payload ID: 8970
  Gene Symbol: KIR3DL1
  Gene Name: killer cell immunoglobulin-like receptor, three domains, long cytoplasmic tail, 1
  ENST ID: ENST00000622067
  CDS Start-End: 26-1393
gccgcctgtctgcacagacagcaccatgtcgctcatggtcgtcagcatggcgtgtgttgggttcttcttgctgcagggggcctggccacatgagggtggtcaggacaagcccttcctgtctgcctggcccagcgctgtggtgcctcgaggaggacacgtgactcttcggtgtcactatcgtcataggtttaacaatttcatgctatacaaagaagacagaatccacgttcccatcttccatggcagattattccaggagagcttcaacatgagccctgtgaccacagcacatgcagggaactacacatgtcggggttcacacccacactcccccactgggtggtcggcacccagcaaccccgtggtgatcatggtcacaggaaaccacagaaaaccttccctcctggcccacccaggtcccctggtgaaatcaggagagagagtcatcctgcaatgttggtcagatatcatgtttgagcacttctttctgcacaaagaggggatctctaaggacccctcacgcctcgttggacagatccatgatggggtctccaaggccaatttctccatcggtcccatgatgcttgcccttgcagggacctacagatgctacggttctgttactcacaccccctatcagttgtcagctcccagtgatcccctggacatcgtggtcacaggtccatatgagaaaccttctctctcagcccagccgggccccaaggttcaggcaggagagagcgtgaccttgtcctgtagctcccggagctcctatgacatgtaccatctatccagggaggggggagcccatgaacgtaggctccctgcagtgcgcaaggtcaacagaacattccaggcagatttccctctgggccctgccacccacggagggacctacagatgcttcggctctttccgtcactctccctacgagtggtcagacccgagtgacccactgcttgtttctgtcacaggaaacccttcaagtagttggccttcacccacagaaccaagctccaaatctggtaaccccagacacctgcacgttctgattgggacctcagtggtcatcatcctcttcatcctcctcctcttctttctccttcatctctggtgctccaacaaaaaaaatgctgctgtaatggaccaagagcctgcagggaacagaacagccaacagcgaggactctgatgaacaagaccctcaggaggtgacatatgcacagttggatcactgcgttttcacacagagaaaaatcactcgcccttctcagaggcccaagacaccccctacagataccatcttgtacacggaacttccaaatgctaagcccagatccaaagttgtctcctgcccacgagcaccacagtcaggccttgaggggatcttctagggagacaacagccctgtctcaaaaccgggttgccagctcccatgtaccagcagctggaatctgaaggcatcagtcttcatcttagggcatcgctcttcctcaca

SEQ ID NO: 146133 - DNA, 1810 bp, Homo sapiens
  Payload ID: 8970
  Gene Symbol: KIR3DL1
  Gene Name: killer cell immunoglobulin-like receptor, three domains, long cytoplasmic tail, 1
  ENST ID: ENST00000615036
  CDS Start-End: 25-1308
ccgcctgtctgcaccggcagcaccatgttgctcatggtcgtcagcatggcgtgtgttgggttcttcttggtccagagggccggtccacacgtgggtggtcaggacaagcccttcctgtctgcctggcccagcgctgtggtgcctcgaggaggacacgtgactcttcggtgtcactatcgtcataggtttaacaatttcatgctatacaaagaagacagaatccacgttcccatcttccatggcagattattccaggagagcttcaacatgagccctgtgaccacagcacatgcagggaactacacatgtcggggttcacacccacactcccccactgggtggtcggcacccagcaaccccgtggtgatcatggtcacaggaaaccacagaaaaccttccctcctggcccacccaggtcccctggtgaaatcaggagagagagtcatcctgcaatgttggtcagatatcatgtttgagcacttctttctgcacaaagaggggatctctaaggacccctcacgcctcgttggacagatccatgatggggtctccaaggccaatttctccatcggtcccatgatgcttgcccttgcagggacctacagatgctacggttctgttactcacaccccctatcagttgtcagctcccagtgatcccctggacatcgtggtcacaggtccatatgagaaaccttctctctcagcccagccgggccccaaggttcaggcaggagagagcgtgaccttgtcctgtagctcccggagctcctatgacatgtaccatctatccagggaggggggagcccatgaacgtaggctccctgcagtgcgcaaggtcaacagaacattccaggcagatttccctctgggccctgccacccacggagggacctacagatgcttcggctctttccgtcactctccctacgagtggtcagacccgagtgacccactgcttgtttctgtcacaggtaaccccagacacctgcacattctgattgggacctcagtggtcatcatcctcttcatcctcctcctcttctttctccttcatctctggtgctccaacaaaaaaaatgctgctgtaatggaccaagagcctgcagggaacagaacagccaacagcgaggactctgatgaacaagaccctgaggaggtgacatacgcacagttggatcactgcgttttcacacagagaaaaatcactcgcccttctcagaggcccaagacaccccctacagataccatcttgtacacggaacttccaaatgctaagcccagatccaaagttgtctcctgcccatgagcaccacagtcaggccttgaggacatcttctagggagacaacagccctgtctcaaaaccgagttgccagctcccatgtaccagcagctggaatctgaaggcgtgagtcttcatcttagggcatcgctcctcctcacgccacaaatctggtgcctctctcttgcttacaaatgtctaggtccccactgcctgctggaaagaaaacacactcctttgcttagcccacagttctccatttcacttgacccctgcccacctctccaacctaactggcttacttcctagtctacttgaggctgcaatcacactgaggaactcacaattccaaacatacaagaggctccctcttgacgtggcacttacccacgtgctgttccaccttccctcatgctgtttcacctttcttcggactattttccagccttctgtcagcagtgaaacttataaaattttttgtgatttcaatgtagctgtctcctcttcaaataaacatgtctgccctc

SEQ ID NO: 146134 - DNA, 1865 bp, Homo sapiens; identical to SEQ ID NO: 146089
  Payload ID: 8970
  Gene Symbol: KIR3DL1
  Gene Name: killer cell immunoglobulin-like receptor, three domains, long cytoplasmic tail, 1
  ENST ID: ENST00000620959
  CDS Start-End: 28-1362

SEQ ID NO: 146135 - DNA, 1810 bp, Homo sapiens; identical to SEQ ID NO: 146085
  Payload ID: 8970
  Gene Symbol: KIR3DL1
  Gene Name: killer cell immunoglobulin-like receptor, three domains, long cytoplasmic tail, 1
  ENST ID: ENST00000610515
  CDS Start-End: 25-1308

SEQ ID NO: 146136 - DNA, 1810 bp, Homo sapiens
  Payload ID: 8970
  Gene Symbol: KIR3DL1
  Gene Name: killer cell immunoglobulin-like receptor, three domains, long cytoplasmic tail, 1
  ENST ID: ENST00000614464
  CDS Start-End: 25-1308
ccgcctgtctgcaccggcagcaccatgttgctcatggtcgtcagcatggcgtgtgttgggttcttcttggtccagagggccggtccacacgtgggtggtcaggacaagcccttcctgtctgcctggcccagcgctgtggtgcctcgaggaggacacgtgactcttcggtgtcactatcatcataggtttaacaatttcatgctatacaaagaagacagaatccacgttcccatcttccatggcagattattccaggagagcttcaacatgagccctgtgaccacagcacatgcagggaactacacatgtcggggttcacacccacactcccccactgggtggtcggcacccagcaaccccgtggtgatcatggtcacaggaaaccacagaaaaccttccctcctggcccacccaggtcccctggtgaaatcaggagagagagtcatcctgcaatgttggtcagatatcatgtttgagcacttctttctgcacaaagaggggatctctaaggacccctcacgcctcgttggacagatccatgatggggtctccaaggccaatttctccatcggtcccatgatgcttgcccttgcagggacctacagatgctacggttctgttactcacaccccctatcagttgtcagctcccagtgatcccctggacatcgtggtcacaggtccatatgagaaaccttctctctcagcccagccgggccccaaggttcaggcaggagagagcgtgaccttgtcctgtagctcccggagctcctatgacatgtaccatctatccagggaggggggagcccatgaacgtaggctccctgcagtgcgcaaggtcaacagaacattccaggcagatttccctctgggccctgccacccacggagggacctacagatgcttcggctctttccgtcactctccctacgagtggtcagacccgagtgacccactgcttgtttctgtcacaggtaaccccagacacctgcacattctgattgggacctcagtggtcatcatcctcttcatcctcctcctcttctttctccttcatctctggtgctccaacaaaaaaaatgctgctgtaatggaccaagagcctgcagggaacagaacagccaacagcgaggactctgatgaacaagaccctgaggaggtgacatacgcacagttggatcactgcgttttcacacagagaaaaatcactcgcccttctcagaggcccaagacaccccctacagataccatcttgtacacggaacttccaaatgctaagcccagatccaaagttgtctcctgcccatgagcaccacagtcaggccttgaggacgtcttctagggagacaacagccctgtctcaaaaccgagttgccagctcccatgtaccagcagctggaatctgaaggcgtgagtcttcatcttagggcatcgctcctcctcacgccacaaatctggtgcctctctcttgcttacaaatgtctaggtccccactgcctgctggaaagaaaacacactcctttgcttagcccacagttctccatttcacttgacccctgcccacctctccaacctaactggcttacttcctagtctacttgaggctgcaatcacactgaggaactcacaattccaaacatacaagaggctccctcttgacgtggcacttacccacgtgctgttccaccttccctcatgctgtttcacctttcttcggactattttccagccttctgtcagcagtgaaacttataaaattttttgtgatttcaatgtagctgtctcctcttcaaataaacatgtctgccctc

SEQ ID NO: 146137 - DNA, 1900 bp, Homo sapiens
  Payload ID: 8970
  Gene Symbol: KIR3DL1
  Gene Name: killer cell immunoglobulin-like receptor, three domains, long cytoplasmic tail, 1
  ENST ID: ENST00000619018
  CDS Start-End: 64-1398
ataacatcctgtgcgctgctgagctgagctggggcgcggccgcctgtctgcaccggcagcaccatgtcgctcatggtcgtcagcatggcgtgtgttgggttcttcttggtccagagggccggtccacacgtgggtggtcaggacaagcccttcctgtctgcctggcccagcgctgtggtgcctcgaggaggacacgtgactcttcggtgtcactatcatcataggtttaacaatttcatgctatacaaagaagacagaatccacgttcccatcttccatggcagattattccaggagagcttcaacatgagccctgtgaccacagcacatgcagggaactacacatgtcggggttcacacccacactcccccactgggtggtcggcacccagcaaccccgtggtgatcatggtcacaggaaaccacagaaaaccttccctcctggcccacccaggtcccctggtgaaatcaggagagagagtcatcctgcaatgttggtcagatatcatgtttgagcacttctttctgcacaaagaggggatctctaaggacccctcacgcctcgttggacagatccatgatggggtctccaaggccaatttctccatcggtcccatgatgcttgcccttgcagggacctacagatgctacggttctgttactcacaccccctatcagttgtcagctcccagtgatcccctggacatcgtggtcacaggtccatatgagaaaccttctctctcagcccagccgggccccaaggttcaggcaggagagagcgtgaccttgtcctgtagctcccggagctcctatgacatgtaccatctatccagggaggggggagcccatgaacgtaggctccctgcagtgcgcaaggtcaacagaacattccaggcagatttccctctgggccctgccacccacggagggacctacagatgcttcggctctttccgtcactctccctacgagtggtcagacccgagtgacccactgcttgtttctgtcacaggaaacccttcaagtagttggccttcacccacagaaccaagctccaaatctggtaaccccagacacctgcacattctgattgggacctcagtggtcatcatcctcttcatcctcctcctcttctttctccttcatctctggtgctccaacaaaaaaaatgctgctgtaatggaccaagagcctgcagggaacagaacagccaacagcgaggactctgatgaacaagaccctgaggaggtgacatacgcacagttggatcactgcgttttcacacagagaaaaatcactcgcccttctcagaggcccaagacaccccctacagataccatcttgtacacggaacttccaaatgctaagcccagatccaaagttgtctcctgcccatgagcaccacagtcaggccttgaggacgtcttctagggagacaacagccctgtctcaaaaccgagttgccagctcccatgtaccagcagctggaatctgaaggcgtgagtcttcatcttagggcatcgctcctcctcacgccacaaatctggtgcctctctcttgcttacaaatgtctaggtccccactgcctgctggaaagaaaacacactcctttgcttagcccacagttctccatttcacttgacccctgcccacctctccaacctaactggcttacttcctagtctacttgaggctgcaatcacactgaggaactcacaattccaaacatacaagaggctccctcttgacgtggcacttacccacgtgctgttccaccttccctcatgctgtttcacctttcttcggactattttccagccttctgtcagcagtgaaacttataaaattttttgtgatttcaatgtagctgtctcctcttcaaataaacatgtctgccctc

SEQ ID NO: 146138 - DNA, 1865 bp, Homo sapiens
  Payload ID: 8970
  Gene Symbol: KIR3DL1
  Gene Name: killer cell immunoglobulin-like receptor, three domains, long cytoplasmic tail, 1
  Uniprot ID: P43629
  ENST ID: ENST00000612668
  CDS Start-End: 28-1362
cagccgcctgtctgcaccggcagcaccatgtcgctcatggtcgtcagcatggcgtgtgttgggttgttcttggtccagagggccggtccacacatgggtggtcaggacaaacccttcctgtctgcctggcccagcgctgtggtgcctcgaggaggacacgtgactcttcggtgtcactatcgtcataggtttaacaatttcatgctatacaaagaagacagaatccacattcccatcttccatggcagaatattccaggagagcttcaacatgagccctgtgaccacagcacatgcagggaactacacatgtcggggttcacacccacactcccccactgggtggtcggcacccagcaaccccgtggtgatcatggtcacaggaaaccacagaaaaccttccctcctggcccacccaggtcccctggtgaaatcaggagagagagtcatcctgcaatgttggtcagatatcatgtttgagcacttctttctgcacaaagaggggatctctaaggacccctcacgcctcgttggacagatccatgatggggtctccaaggccaatttctccatcggtcccatgatgcttgcccttgcagggacctacagatgctacggttctgttactcacaccccctatcagttgtcagctcccagtgatcccctggacatcgtggtcacaggtccatatgagaaaccttctctctcagcccagccgggccccaaggttcaggcaggagagagcgtgaccttgtcctgtagctcccggagctcctatgacatgtaccatctatccagggaggggggagcccatgaacgtaggctccctgcagtgcgcaaggtcaacagaacattccaggcagatttccctctgggccctgccacccacggagggacctacagatgcttcggctctttccgtcactctccctacgagtggtcagacccgagtgacccactgcttgtttctgtcacaggaaacccttcaagtagttggccttcacccacagaaccaagctccaaatctggtaaccccagacacctgcacattctgattgggacctcagtggtcatcatcctcttcatcctcctcctcttctttctccttcatctctggtgctccaacaaaaaaaatgctgctgtaatggaccaagagcctgcagggaacagaacagccaacagcgaggactctgatgaacaagaccctgaggaggtgacatacgcacagttggatcactgcgttttcacacagagaaaaatcactcgcccttctcagaggcccaagacaccccctacagataccatcttgtacacggaacttccaaatgctaagcccagatccaaagttgtctcctgcccatgagcaccacagtcaggccttgaggacgtcttctagggagacaacagccctgtctcaaaaccgagttgccagctcccatgtaccagcagctggaatctgaaggcgtgagtcttcatcttagggcatcgctcctcctcacgccacaaatctggtgcctctctcttgcttacaaatgtctaggtccccactgcctgctggaaagaaaacacactcctttgcttagcccacagttctccatttcacttgacccctgcccacctctccaacctaactggcttacttcctagtctacttgaggctgcaatcacactgaggaactcacaattccaaacatacaagaggctccctcttgacgtggcacttacccacgtgctgttccaccttccctcatgctgtttcacctttcttcggactattttccagccttctgtcagcagtgaaacttataaaattttttgtgatttcaatgtagctgtctcctcttcaaataaacatgtctgccctca

SEQ ID NO: 146139 - DNA, 1863 bp, Homo sapiens
  Payload ID: 8970
  Gene Symbol: KIR3DL1
  Gene Name: killer cell immunoglobulin-like receptor, three domains, long cytoplasmic tail, 1
  ENST ID: ENST00000617680
  CDS Start-End: 26-1360
gccgcctgtctgcaccggcagcaccatgttgctcatggtcgtcagcatggcgtgtgttgggttcttcttggtccagagggccggtccacacatgggtggtcaggacaagcccttcctgtctgcctggcccagcgctgtggtgcctcgaggaggacacgtgactcttcggtgtcactatcgtcataggtttaacaatttcatgctatacaaagaagacagaatccacgttcccatcttccatggcagattattccaggagagcttcaacatgagccctgtgaccacagcacatgcagggaactacacatgtcggggttcacacccacactcccccactgggtggtcggcacccagcaaccccgtggtgatcatggtcacaggaaaccacagaaaaccttccctcctggcccacccaggtcccctggtgaaatcaggagagagagtcatcctgcaatgttggtcagatatcatgtttgagcacttctttctgcacaaagaggggatctctaaggacccctcacgcctcgttggacagatccatgatggggtctccaaggccaatttctccatcggtcccatgatgcttgcccttgcagggacctacagatgctacggttctgttactcacaccccctatcagttgtcagctcccagtgatcccctggacatcgtggtcacaggtccatatgagaaaccttctctctcagcccagccgggccccaaggttcaggcaggagagagcgtgaccttgtcctgtagctcccggagctcctatgacatgtaccatctatccagggaggggggagcccatgaacgtaggctccctgcagtgcgcaaggtcaacagaacattccaggcagatttccctctgggccctgccacccacggagggacctacagatgcttcggctctttccgtcactctccctacgagtggtcagacccgagtgacccactgcttgtttctgtcacaggaaacccttcaagtagttggccttcacccacagaaccaagctccaaatctggtaaccccagacacctgcacattctgattgggacctcagtggtcatcatcctcttcatcctcctcctcttctttctccttcatctctggtgctccaacaaaaaaaatgctgctgtaatggaccaagagcctgcagggaacagaacagccaacagcgaggactctgatgaacaagaccctgaggaggtgacatacgcacagttggatcactgcgttttcacacagagaaaaatcactcgcccttctcagaggcccaagacaccccctacagataccatcttgtacacggaacttccaaatgctaagcccagatccaaagttgtctcctgcccatgagcaccacagtcaggccttgaggacgtcttctagggagacaacagccctgtctcaaaaccgagttgccagctcccatgtaccagcagctggaatctgaaggcgtgagtcttcatcttagggcatcgctcctcctcacgccacaaatctggtgcctctctcttgcttacaaatgtctaggtccccactgcctgctggaaagaaaacacactcctttgcttagcccacagttctccatttcacttgacccctgcccacctctccaacctaactggcttacttcctagtctacttgaggctgcaatcacactgaggaactcagaattccaaacatacaagaggctccctcttgacgtggcacttacccacgtgctgttccaccttccctcatgctgtttcacctttcttcggactattttccagccttctgtcagcagtgaaacttataaaattttttgtgatttcaatgtagctgtctcctcttcaaataaacatgtctgccctca

SEQ ID NO: 146140 - DNA, 1852 bp, Homo sapiens; identical to SEQ ID NO: 146078
  Payload ID: 8970
  Gene Symbol: KIR3DL1
  Gene Name: killer cell immunoglobulin-like receptor, three domains, long cytoplasmic tail, 1
  ENST ID: ENST00000612513
  CDS Start-End: 1-1368

SEQ ID NO: 146141 - DNA, 1857 bp, Homo sapiens
  Payload ID: 8970
  Gene Symbol: KIR3DL1
  Gene Name: killer cell immunoglobulin-like receptor, three domains, long cytoplasmic tail, 1
  Uniprot ID: P43629
  ENST ID: ENST00000621353
  CDS Start-End: 20-1354
tgtctgcaccggcagcaccatgtcgctcatggtcgtcagcatggcgtgtgttgggttgttcttggtccagagggccggtccacacatgggtggtcaggacaaacccttcctgtctgcctggcccagcgctgtggtgcctcgaggaggacacgtgactcttcggtgtcactatcgtcataggtttaacaatttcatgctatacaaagaagacagaatccacattcccatcttccatggcagaatattccaggagagcttcaacatgagccctgtgaccacagcacatgcagggaactacacatgtcggggttcacacccacactcccccactgggtggtcggcacccagcaaccccgtggtgatcatggtcacaggaaaccacagaaaaccttccctcctggcccacccaggtcccctggtgaaatcaggagagagagtcatcctgcaatgttggtcagatatcatgtttgagcacttctttctgcacaaagaggggatctctaaggacccctcacgcctcgttggacagatccatgatggggtctccaaggccaatttctccatcggtcccatgatgcttgcccttgcagggacctacagatgctacggttctgttactcacaccccctatcagttgtcagctcccagtgatcccctggacatcgtggtcacaggtccatatgagaaaccttctctctcagcccagccgggccccaaggttcaggcaggagagagcgtgaccttgtcctgtagctcccggagctcctatgacatgtaccatctatccagggaggggggagcccatgaacgtaggctccctgcagtgcgcaaggtcaacagaacattccaggcagatttccctctgggccctgccacccacggagggacctacagatgcttcggctctttccgtcactctccctacgagtggtcagacccgagtgacccactgcttgtttctgtcacaggaaacccttcaagtagttggccttcacccacagaaccaagctccaaatctggtaaccccagacacctgcacattctgattgggacctcagtggtcatcatcctcttcatcctcctcctcttctttctccttcatctctggtgctccaacaaaaaaaatgctgctgtaatggaccaagagcctgcagggaacagaacagccaacagcgaggactctgatgaacaagaccctgaggaggtgacatacgcacagttggatcactgcgttttcacacagagaaaaatcactcgcccttctcagaggcccaagacaccccctacagataccatcttgtacacggaacttccaaatgctaagcccagatccaaagttgtctcctgcccatgagcaccacagtcaggccttgaggacgtcttctagggagacaacagccctgtctcaaaaccgagttgccagctcccatgtaccagcagctggaatctgaaggcgtgagtcttcatcttagggcatcgctcctcctcacgccacaaatctggtgcctctctcttgcttacaaatgtctaggtccccactgcctgctggaaagaaaacacactcctttgcttagcccacagttctccatttcacttgacccctgcccacctctccaacctaactggcttacttcctagtctacttgaggctgcaatcacactgaggaactcacaattccaaacatacaagaggctccctcttgacgtggcacttacccacgtgctgttccaccttccctcatgctgtttcacctttcttcggactattttccagccttctgtcagcagtgaaacttataaaattttttgtgatttcaatgtagctgtctcctcttcaaataaacatgtctgccctca

SEQ ID NO: 146142 - DNA, 1900 bp, Homo sapiens
  Payload ID: 8970
  Gene Symbol: KIR3DL1
  Gene Name: killer cell immunoglobulin-like receptor, three domains, long cytoplasmic tail, 1
  ENST ID: ENST00000617665
  CDS Start-End: 64-1398
ataacatcctgtgcgctgctgagctgagctggggcgcggccgcctgtctgcaccggcagcaccatgtcgctcatggtcgtcagcatggcgtgtgttgggttcttcttggtccagagggccggtccacacgtgggtggtcaggacaagcccttcctgtctgcctggcccagcgctgtggtgcctcgaggaggacacgtgactcttcggtgtcactatcgtcataggtttaacaatttcatgctatacaaagaagacagaatccacgttcccatcttccatggcagattattccaggagagcttcaacatgagccctgtgaccacagcacatgcagggaactacacatgtcggggttcacacccacactcccccactgggtggtcggcacccagcaaccccgtggtgatcatggtcacaggaaaccacagaaaaccttccctcctggcccacccaggtcccctggtgaaatcaggagagagagtcatcctgcaatgttggtcagatatcatgtttgagcacttctttctgcacaaagaggggatctctaaggacccctcacgcctcgttggacagatccatgatggggtctccaaggccaatttctccatcggtcccatgatgcttgcccttgcagggacctacagatgctacggttctgttactcacaccccctatcagttgtcagctcccagtgatcccctggacatcgtggtcacaggtccatatgagaaaccttctctctcagcccagccgggccccaaggttcaggcaggagagagcgtgaccttgtcctgcagctcccggagctcctatgacatgtaccatctatccagggagcggggagcccatgaacgtaggctccctgcagtgcgcaaggtcaacagaacattccaggcagatttccctctgggccctgccacccacggagggacctacagatgcttcggctctttccgtcactctccctacgagtggtcagacccgagtgacccactgcttgtttctgtcacaggaaacccttcaagtagttggccttcacccacagaaccaagctccaaatctggtaaccccagacacctgcacattctgattgggacctcagtggtcatcatcctcttcatcctcctcctcttctttctccttcatctctggtgctccaacaaaaaaaatgctgctgtaatggaccaagagcctgcagggaacagaacagccaacagcgaggactctgatgaacaagaccctgaggaggtgacatacgcacagttggatcactgcgttttcacacagagaaaaatcactcgcccttctcagaggcccaagacaccccctacagataccatcttgtacacggaacttccaaatgctaagcccagatccaaagttgtctcctgcccatgagcaccacagtcaggccttgaggacgtcttctagggagacaacagccctgtctcaaaaccgagttgccagctcccatgtaccagcagctggaatctgaaggcgtgagtcttcatcttagggcatcgctcctcctcacgccacaaatctggtgcctctctcttgcttacaaatgtctaggtccccactgcctgctggaaagaaaacacactcctttgcttagcccacagttctccatttcacttgacccctgcccacctctccaacctaactggcttacttcctagtctacttgaggctgcaatcacactgaggaactcacaattccaaacatacaagaggctccctcttgacgtggcacttacccacgtgctgttccaccttccctcatgctgtttcacctttcttcggactattttccagccttctgtcagcagtgaaacttataaaattttttgtgatttcaatgtagctgtctcctcttcaaataaacatgtctgccctc

SEQ ID NO: 146143 - DNA, 1546 bp, Homo sapiens
  Payload ID: 8971
  Gene Symbol: KIR3DL2
  Gene Name: killer cell immunoglobulin-like receptor, three domains, long cytoplasmic tail, 2
  Uniprot ID: P43630
  ENST ID: ENST00000270442
  CDS Start-End: 1-1317
atgtcgctcacggtcgtcagcatggcgtgcgttgggttcttcttgctgcagggggcctggccactcatgggtggtcaggacaaacccttcctgtctgcccggcccagcactgtggtgcctcgaggaggacacgtggctcttcagtgtcactatcgtcgtgggtttaacaatttcatgctgtacaaagaagacagaagccacgttcccatcttccacggcagaatattccaggagagcttcatcatgggccctgtgaccccagcacatgcagggacctacagatgtcggggttcacgcccacactccctcactgggtggtcggcacccagcaaccccctggtgatcatggtcacaggaaaccacagaaaaccttccctcctggcccacccagggcccctgctgaaatcaggagagacagtcatcctgcaatgttggtcagatgtcatgtttgagcacttctttctgcacagagaggggatctctgaggacccctcacgcctcgttggacagatccatgatggggtctccaaggccaacttctccatcggtcccttgatgcctgtccttgcaggaacctacagatgttatggttctgttcctcactccccctatcagttgtcagctcccagtgaccccctggacatcgtgatcacaggtctatatgagaaaccttctctctcagcccagccgggccccacggttcaggcaggagagaacgtgaccttgtcctgtagctcctggagctcctatgacatctaccatctgtccagggaaggggaggcccatgaacgtaggctccgtgcagtgcccaaggtcaacagaacattccaggcagactttcctctgggccctgccacccacggagggacctacagatgcttcggctctttccgtgccctgccctgcgtgtggtcaaactcaagtgacccactgcttgtttctgtcacaggtatctgcagacacctgcatgttctgattgggacctcagtggtcatcttcctcttcatcctcctcctcttctttctcctttatcgctggtgctccaacaaaaagaatgctgctgtaatggaccaagagcctgcgggggacagaacagtgaataggcaggactctgatgaacaagaccctcaggaggtgacgtacgcacagttggatcactgcgttttcatacagagaaaaatcagtcgcccttctcagaggcccaagacacccctaacagataccagcgtgtacacggaacttccaaatgctgagcccagatccaaagttgtctcctgcccacgagcaccacagtcaggtcttgagggggttttctagggagacaacagccctgtctcaaaaccaggttgccagatccaatgaaccagcagctggaatctgaaggcatcagtctgcatcttaggggatcgctcttcctcacaccacgaatctgaacatgcctctctcttgcttacaaatgcctaaggtcgccactgcctgctgcagagaaaacacactcctttgcttagcccacaagtatctatttcacttgacccctgcccacctc

SEQ ID NO: 146144 - DNA, 1877 bp, Homo sapiens
  Payload ID: 8971
  Gene Symbol: KIR3DL2
  Gene Name: killer cell immunoglobulin-like receptor, three domains, long cytoplasmic tail, 2
  Uniprot ID: P43630
  ENST ID: ENST00000326321
  CDS Start-End: 34-1401
ggggcgcggcctcctgtctgcaccggcagcaccatgtcgctcacggtcgtcagcatggcgtgcgttgggttcttcttgctgcagggggcctggccactcatgggtggtcaggacaaacccttcctgtctgcccggcccagcactgtggtgcctcgaggaggacacgtggctcttcagtgtcactatcgtcgtgggtttaacaatttcatgctgtacaaagaagacagaagccacgttcccatcttccacggcagaatattccaggagagcttcatcatgggccctgtgaccccagcacatgcagggacctacagatgtcggggttcacgcccacactccctcactgggtggtcggcacccagcaaccccctggtgatcatggtcacaggaaaccacagaaaaccttccctcctggcccacccagggcccctgctgaaatcaggagagacagtcatcctgcaatgttggtcagatgtcatgtttgagcacttctttctgcacagagaggggatctctgaggacccctcacgcctcgttggacagatccatgatggggtctccaaggccaacttctccatcggtcccttgatgcctgtccttgcaggaacctacagatgttatggttctgttcctcactccccctatcagttgtcagctcccagtgaccccctggacatcgtgatcacaggtctatatgagaaaccttctctctcagcccagccgggccccacggttcaggcaggagagaacgtgaccttgtcctgtagctcctggagctcctatgacatctaccatctgtccagggaaggggaggcccatgaacgtaggctccgtgcagtgcccaaggtcaacagaacattccaggcagactttcctctgggccctgccacccacggagggacctacagatgcttcggctctttccgtgccctgccctgcgtgtggtcaaactcaagtgacccactgcttgtttctgtcacaggaaacccttcaagtagttggccttcacccacagaaccaagctccaaatctggtatctgcagacacctgcatgttctgattgggacctcagtggtcatcttcctcttcatcctcctcctcttctttctcctttatcgctggtgctccaacaaaaagaatgctgctgtaatggaccaagagcctgcgggggacagaacagtgaataggcaggactctgatgaacaagaccctcaggaggtgacgtacgcacagttggatcactgcgttttcatacagagaaaaatcagtcgcccttctcagaggcccaagacacccctaacagataccagcgtgtacacggaacttccaaatgctgagcccagatccaaagttgtctcctgcccacgagcaccacagtcaggtcttgagggggttttctagggagacaacagccctgtctcaaaaccaggttgccagatccaatgaaccagcagctggaatctgaaggcatcagtctgcatcttaggggatcgctcttcctcacaccacgaatctgaacatgcctctctcttgcttacaaatgcctaaggtcgccactgcctgctgcagagaaaacacactcctttgcttagcccacaagtatctatttcacttgacccctgcccacctctccaacctaactggcttacttcctagtcctacttgaggctgcaatcacactgaggaactcacaattccaaacatacaagaggctccctcttaacacggcacttacacacttgctgttccaccttccctcatgctgttccacctcccctcagactatctttcagccttctgtcatcagtaaaatttataaattttttttataacttcagtgtagctctctcctcttcaaataaacatgtctgccctca

SEQ ID NO: 146145 - DNA, 1597 bp, Homo sapiens
  Payload ID: 8971
  Gene Symbol: KIR3DL2
  Gene Name: killer cell immunoglobulin-like receptor, three domains, long cytoplasmic tail, 2
  Uniprot ID: P43630
  ENST ID: ENST00000622453
  CDS Start-End: 1-1368
atgtcgctcacggtcgtcagcatggcgtgcgttgggttcttcttgctgcagggggcctggccactcatgggtggtcaggacaaacccttcctgtctgcccggcccagcactgtggtgcctcgaggaggacacgtggctcttcagtgtcactatcgtcgtgggtttaacaatttcatgctgtacaaagaagacagaagccacgttcccatcttccacggcagaatattccaggagagcttcatcatgggccctgtgaccccagcacatgcagggacctacagatgtcggggttcacgcccacactccctcactgggtggtcggcacccagcaaccccctggtgatcatggtcacaggaaaccacagaaaaccttccctcctggcccacccagggcccctgctgaaatcaggagagacagtcatcctgcaatgttggtcagatgtcatgtttgagcacttctttctgcacagagaggggatctctgaggacccctcacgcctcgttggacagatccatgatggggtctccaaggccaacttctccatcggtcccttgatgcctgtccttgcaggaacctacagatgttatggttctgttcctcactccccctatcagttgtcagctcccagtgaccccctggacatcgtgatcacaggtctatatgagaaaccttctctctcagcccagccgggccccacggttcaggcaggagagaacgtgaccttgtcctgtagctcctggagctcctatgacatctaccatctgtccagggaaggggaggcccatgaacgtaggctccgtgcagtgcccaaggtcaacagaacattccaggcagactttcctctgggccctgccacccacggagggacctacagatgcttcggctctttccgtgccctgccctgcgtgtggtcaaactcaagtgacccactgcttgtttctgtcacaggaaacccttcaagtagttggccttcacccacagaaccaagctccaaatctggtatctgcagacacctgcatgttctgattgggacctcagtggtcatcttcctcttcatcctcctcctcttctttctcctttatcgctggtgctccaacaaaaagaatgctgctgtaatggaccaagagcctgcgggggacagaacagtgaataggcaggactctgatgaacaagaccctcaggaggtgacgtacgcacagttggatcactgcgttttcatacagagaaaaatcagtcgcccttctcagaggcccaagacacccctaacagataccagcgtgtacacggaacttccaaatgctgagcccagatccaaagttgtctcctgcccacgagcaccacagtcaggtcttgagggggttttctagggagacaacagccctgtctcaaaaccaggttgccagatccaatgaaccagcagctggaatctgaaggcatcagtctgcatcttaggggatcgctcttcctcacaccacgaatctgaacatgcctctctcttgcttacaaatgcctaaggtcgccactgcctgctgcagagaaaacacactcctttgcttagcccacaagtatctatttcacttgacccctgcccacctc

SEQ ID NO: 146146 - DNA, 1863 bp, Homo sapiens
  Payload ID: 8971
  Gene Symbol: KIR3DL2
  Gene Name: killer cell immunoglobulin-like receptor, three domains, long cytoplasmic tail, 2
  Uniprot ID: P43630
  ENST ID: ENST00000621155
  CDS Start-End: 20-1387
tgtctgcaccggcagcaccatgtcgctcactgtcgtcagcatggcgtgcgttgggttcttcttgctgcagggggcctggccactcatgggtggtcaggacaaacccttcctgtctgcccggcccagcactgtggtgcctcgaggaggacacgtggctcttcagtgtcactatcgtcgtgggtttaacaatttcatgctgtacaaagaagacagaagccacgttcccatcttccacggcagaatattccaggagagcttcatcatgggccctgtgaccccagcacatgcagggacctacagatgtcggggttcacgcccacactccctcactgggtggtcggcacccagcaaccccctggtgatcatggtcacaggaaaccacagaaaaccttccctcctggcccacccagggcccctgctgaaatcaggagagacagtcatcctgcaatgttggtcagatgtcatgtttgagcacttctttctgcacagagatgggatctctgaggacccctcacgcctcgttggacagatccatgatggggtctccaaggccaacttctccatcggtcccttgatgcctgtccttgcaggaacctacagatgttatggttctgttcctcactccccctatcagttgtcagctcccagtgaccccctggacatcgtgatcacaggtctatatgagaaaccttctctctcagcccagccgggccccacggttcaggcaggagagaacgtgaccttgtcctgtagctcctggagctcctatgacatctaccatctgtccagggaaggggaggcccatgaacgtaggctccgtgcagtgcccaaggtcaacagaacattccaggcagactttcctctgggccctgccacccacggagggacctacagatgcttcggctctttccgtgccctgccctgcgtgtggtcaaactcaagtgacccactgcttgtttctgtcacaggaaacccttcaagtagttggccttcacccacagaaccaagctccaaatctggtatctgcagacacctgcatgttctgattgggacctcagtggtcatcttcctcttcatcctcctcctcttctttctcctttatcgctggtgctccaacaaaaagaatgctgctgtaatggaccaagagcctgcgggggacagaacagtgaataggcaggactctgatgaacaagaccctcaggaggtgacgtacgcacagttggatcactgcgttttcatacagagaaaaatcagtcgcccttctcagaggcccaagacacccctaacagataccagcgtgtacacggaacttccaaatgctgagcccagatccaaagttgtctcctgcccacgagcaccacagtcaggtcttgagggggttttctagggagacaacagccctgtctcaaaaccaggttgccagatccaatgaaccagcagctggaatctgaaggcatcagtctgcatcttaggggatcgctcttcctcacaccacgaatctgaacatgcctctctcttgcttacaaatgcctaaggtcgccactgcctgctgcagagaaaacacactcctttgcttagcccacaagtatctatttcacttgacccctgcccacctctccaacctaactggcttacttcctagtcctacttgaggctgcaatcacactgaggaactcacaattccaaacatacaagaggctccctcttaacacggcacttacacacttgctgttccaccttccctcatgctgttccacctcccctcagactatctttcagccttctgtcatcagtaaaatttataaattttttttataacttcagtgtagctctctcctcttcaaataaacatgtctgccctca

SEQ ID NO: 146147 - DNA, 1834 bp, Homo sapiens
  Payload ID: 8971
  Gene Symbol: KIR3DL2
  Gene Name: killer cell immunoglobulin-like receptor, three domains, long cytoplasmic tail, 2
  ENST ID: ENST00000616854
  CDS Start-End: 34-1350
ggggcgcggcctcctgtctgcaccggcagcaccatgtcgctcactgtcgtcagcatggcgtgcgttgggttcttcttgctgcagggggcctggccactcatgggtggtcaggacaaacccttcctgtctgcctggcccagcactgtggtgcctcgaggaggacacgtggctcttcagtgtcactatcgtcgtgggtttaacaatttcatgctgtacaaagaagacagaagccacgttcccatcttccacggcagaatattccaggagagcttcatcatgggccctgtgaccccagcacatgcagggacctacagatgtcggggttcacgcccacactccctcactgggtggtcggcacccagcaaccccctggtgatcatggtcacaggaaaccacagaaaaccttccctcctggcccacccagggcccctgctgaaatcaggagagacagtcatcctgcaatgttggtcagatgtcatgtttgagcacttctttctgcacagagaggggatctctgaggacccctcacgcctcgttggacagatccatgatggggtctccaaggccaacttctccatcggtcccttgatgcctgtccttgcaggaacctacagatgttatggttctgttcctcactccccctatcagttgtcagctcccagtgaccccctggacatcgtgatcacaggtctatatgagaaaccttctctctcagcccagccgggccccacggttcaggcaggagagaacgtgaccttgtcctgtagctcctggagctcctatgacatctaccatctgtccagggaaggggaggcccatgaacgtaggctccgtgcagtgcccaaggtcaacagaacattccaggcagactttcctctgggccctgccacccacggagggacctacagatgcttcggctctttccgtgccctgccctgcgtgtggtcaaactcaagtgacccactgcttgtttctgtcacaggtatctgcagacacctgcatgttctgattgggacctcagtggtcatcttcctcttcatcctcctcctcttctttctcctttatcgctggtgctccaacaaaaagaatgctgctgtaatggaccaagagcctgcgggggacagaacagtgaataggcaggactctgatgaacaagaccctcaggaggtgacgtacgcacagttggatcactgcgttttcatacagagaaaaatcagtcgcccttctcagaggcccaagacacccctaacagataccagcgtgtacacggaacttccaaatgctgagcccagatccaaagttgtctcctgcccacgagcaccacagtcaggtcttgagggggttttctagggagacaacagccctgtctcaaaaccaggttgccagatccaatgaaccagcagctggaatctgaaggcatcagtctgcatcttaggggatcgctcttcctcacaccacgaatctgaacatgcctctctcttgcttacaaatgcctaaggtcgccactgcctgctgcagagaaaacacactcctttgcttagcccacaagtatctatttcacttgacccctgcccacctctccaacctaactggcttacttcctagtcctacttgaggctgcaatcacactgaggaactcacaattccaaacatacaagaggctccctcttaacacggcacttacacacttgctgttccaccttccctcatgctgttccacctcccctcagactatctttcagccttctgtcatcagtaaaatttataaattttttttataacttcagtgtagctctctcctcttcaaataaacatgtctgccctcatggtttcg

SEQ ID NO: 146148 - DNA, 1877 bp, Homo sapiens
  Payload ID: 8971
  Gene Symbol: KIR3DL2
  Gene Name: killer cell immunoglobulin-like receptor, three domains, long cytoplasmic tail, 2
  ENST ID: ENST00000622249
  CDS Start-End: 34-1401
ggggcgcggcctcctgtctgcaccggcagcaccatgtcgctcactgtcgtcagcatggcgtgcgttgggttcttcttgctgcagggggcctggccactcatgggtggtcaggacaaacccttcctgtctgcccggcccagcactgtggtgcctcgaggaggacacgtggctcttcagtgtcactatcgtcgtgggtttaacaatttcatgctgtacaaagaagacagaagccacgttcccatcttccacggcagaatattccaggagagcttcatcatgggccctgtgaccccagcacatgcagggacctacagatgtcggggttcacgcccacactccctcactgggtggtcgacacccagcaaccccctggtgatcatggtcacaggaaaccacagaaaaccttccctcctggcccacccagggcccctgctgaaatcaggagagacagtcatcctgcaatgttggtcagatgtcatgtttgagcacttctttctgcacagagaggggatctctgaggacccctcacgcctcgttggacagatccatgatggggtctccaaggccaacttctccatcggtcccttgatgcctgtccttgcaggaacctacagatgttatggttctgttcctcactccccctatcagttgtcagctcccagtgaccccctggacatcgtgatcacaggtctatatgagaaaccttctctctcagcccagccgggccccacggttcaggcaggagagaacgtgaccttgtcctgtagctcctggagctcctatgacatctaccatctgtccagggaaggggaggcccatgaacgtaggctccgtgcagtgcccaaggtcaacagaacattccaggcagactttcctctgggccctgccacccacggagggacctacagatgcttcggctctttccgtgccctgccctgcgtgtggtcaaactcaagtgacccactgcttgtttctgtcacaggaaacccttcaagtagttggccttcacccacagaaccaagctccaaatctggtatctgcagacacctgcatgttctgattgggacctcagtggtcatcttcctcttcatcctcctcctcttctttctcctttatcgctggtgctccaacaaaaagaatgctgctgtaatggaccaagagcctgcgggggacagaacagtgaataggcaggactctgatgaacaagaccctcaggaggtgatgtacgcacagttggatcactgcgttttcatacagagaaaaatcagtcgcccttctcagaggcccaagacacccctaacagataccagcgtgtacacggaacttccaaatgctgagcccagatccaaagttgtctcctgcccacgagcaccacagtcaggtcttgagggggttttctagggagacaacagccctgtctcaaaaccaggttgccagatccaatgaaccagcagctggaatctgaaggcatcagtctgcatcttaggggatcgctcttcctcacaccacgaatctgaacatgcctctctcttgcttacaaatgcctaaggtcgccactgcctgctgcagagaaaacacactcctttgcttagcccacaagtatctatttcacttgacccctgcccacctctccaacctaactggcttacttcctagtcctacttgaggctgcaatcacactgaggaactcacaattccaaacatgcaagaggctccctcttaacacggcacttacacacttgctgttccaccttccctcatgctgttccacctcccctcagactatctttcagccttctgtcatcagtaaaatttataaattttttttataacttcagtgtagctctctcctcttcaaataaacatgtctgccctca

SEQ ID NO: 146149 - DNA, 1915 bp, Homo sapiens
  Payload ID: 8971
  Gene Symbol: KIR3DL2
  Gene Name: killer cell immunoglobulin-like receptor, three domains, long cytoplasmic tail, 2
  ENST ID: ENST00000618237
  CDS Start-End: 64-1431
ataacatcctgtgcgctgctgagctgagctggggcgcggcctcctgtctgcaccggcagcaccatgtcgctcactgtcgtcagcatggcgtgcgttgggttcttcttgctgcagggggcctggccactcatgggtggtcaggacaaacccttcctgtctgcccggcccagcactgtggtgcctcgaggaggacacgtggctcttcagtgtcactatcgtcgtgggtttaacaatttcatgctgtacaaagaagacagaagccacgttcccatcttccacggcagaatattccaggagagcttcatcatgggccctgtgaccccagcacatgcagggacctacagatgtcggggttcacgcccacactccctcactgggtggtcgacacccagcaaccccctggtgatcatggtcacaggaaaccacagaaaaccttccctcctggcccacccagggcccctgctgaaatcaggagagacagtcatcctgcaatgttggtcagatgtcatgtttgagcacttctttctgcacagagaggggatctctgaggacccctcacgcctcgttggacagatccatgatggggtctccaaggccaacttctccatcggtcccttgatgcctgtccttgcaggaacctacagatgttatggttctgttcctcactccccctatcagttgtcagctcccagtgaccccctggacatcgtgatcacaggtctatatgagaaaccttctctctcagcccagccgggccccacggttcaggcaggagagaacgtgaccttgtcctgtagctcctggagctcctatgacatctaccatctgtccaggggaggggaggcccatgaacgtaggctccgtgcagtgcccaaggtcaacagaacattccaggcagactttcctctgggccctgccacccacggagggacctacagatgcttcggctctttccgtgccctgccctgcgtgtggtcaaactcaagtgacccactgcttgtttctgtcacaggaaacccttcaagtagttggccttcacccacagaaccaagctccaaatctggtatctgcagacacctgcatgttctgattgggacctcagtggtcatcttcctcttcatcctcctcctcttctttctcctttatcgctggtgctccaacaaaaagaatgctgctgtaatggaccaagagcctgcgggggacagaacagtgaataggcaggactctgatgaacaagaccctcaggaggtgatgtacgcacagttggatcactgcgttttcatacagagaaaaatcagtcgcccttctcagaggcccaagacacccctaacagataccagcgtgtacacggaacttccaaatgctgagcccagatccaaagttgtctcctgcccacgagcaccacagtcaggtcttgagggggttttctagggagacaacagccctgtctcaaaaccaggttgccagatccaatgaaccagcagctggaatctgaaggcatcagtctgcatcttaggggatcgctcttcctcacaccacgaatctgaacatgcctctctcttgcttacaaatgcctaaggtcgccactgcctgctgcagagaaaacacactcctttgcttagcccacaagtatctatttcacttgacccctgcccacctctccaacctaactggcttacttcctagtcctacttgaggctgcaatcacactgaggaactcacaattccaaacatgcaagaggctccctcttaacacggcacttacacacttgctgttccaccttccctcatgctgttccacctcccctcagactatctttcagccttctgtcatcagtaaaatttataaattttttttataacttcagtgtagctctctcctcttcaaataaacatgtctgccctcatggtttcg

SEQ ID NO: 146150 - DNA, 1497 bp, Homo sapiens
  Payload ID: 8971
  Gene Symbol: KIR3DL2
  Gene Name: killer cell immunoglobulin-like receptor, three domains, long cytoplasmic tail, 2
  ENST ID: ENST00000621841
  CDS Start-End: 26-1393
gccgcctgtctgcaccggcagcaccatgtcgctcacggtcgtcagcatggcgtgtgttgggttcttcttgctgcagggggcctggccactcatgggtggtcaggacaaacccttcctgtctgcccggcccagcactgtggtgcctcgaggaggacacgtggctcttcagtgtcactatcgtcgtgggtttaacaatttcatgctgtacaaagaagacagaagccacgttcccatcttccacggcagaatattccaggagagcttcatcatgggccctgtgaccccagcacatgcagggacctacagatgtcggggttcacgcccacactccctcactgggtggtcgacacccagcaaccccctggtgatcatggtcacaggaaaccacagaaaaccttccctcctggcccacccagggcccctgctgaaatcaggagagacagtcatcctgcaatgttggtcagatgtcatgtttgagcacttctttctgcacagagaggggatctctgaggacccctcacgcctcgttggacagatccatgatggggtctccaaggccaacttctccatcggtcccttgatgcctgtccttgcaggaacctacagatgttatggttctgttcctcactccccctatcagttgtcagctcccagtgaccccctggacatcgtgatcacaggtctatatgagaaaccttctctctcagcccagccgggccccacggttcaggcaggagagaacgtgaccttgtcctgtagctcctggagctcctatgacatctaccatctgtccaggggaggggaggcccatgaacgtaggctccgtgcagtgcccaaggtcaacagaacattccaggcagactttcctctgggccctgccacccacggagggacctacagatgcttcggctctttccgtgccctgccctgcgtgtggtcaaactcaagtgacccactgcttgtttctgtcacaggaaacccttcaagtagttggccttcacccacagaaccaagctccaaatctggtatctgcagacacctgcatgttctgattgggacctcagtggtcatcttcctcttcatcctcctcctcttctttctcctttatcgctggtgctccaacaaaaagaatgctgctgtaatggaccaagagcctgcgggggacagaacagtgaataggcaggactctgatgaacaagaccctcaggaggtgatgtacgcacagttggatcactgcgttttcatacagagaaaaatcagtcgcccttctcagaggcccaagacacccctaacagataccagcgtgtacacggaacttccaaatgctgagcccagatccaaagttgtctcctgcccacgagcaccacagtcaggtcttgagggggttttctagggagacaacagccctgtctcaaaaccaggttgccagatccaatgaaccagcagctggaatctgaaggcatcagtctgcatcttaggggatcgctcttcctcaca

SEQ ID NO: 146151 - DNA, 1834 bp, Homo sapiens
  Payload ID: 8971
  Gene Symbol: KIR3DL2
  Gene Name: killer cell immunoglobulin-like receptor, three domains, long cytoplasmic tail, 2
  ENST ID: ENST00000612733
  CDS Start-End: 34-1350
ggggcgcggcctcctgtctgcaccggcagcaccatgtcgctcactgtcgtcagcatggcgtgcgttgggttcttcttgctgcagggggcctggccactcatgggtggtcaggacaaacccttcctgtctgcccggcccagcactgtggtgcctcgaggaggacacgtggctcttcagtgtcactatcgtcgtgggtttaacaatttcatgctgtacaaagaagacagaagccacgttcccatcttccacggcagaatattccaggagagcttcatcatgggccctgtgaccccagcacatgcagggacctacagatgtcggggttcacgcccacactccctcactgggtggtcggcacccagcaaccccctggtgatcatggtcacaggaaaccacagaaaaccttccctcctggcccacccagggcccctgctgaaatcaggagagacagtcatcctgcaatgttggtcagatgtcatgtttgagcacttctttctgcacagagatgggatctctgaggacccctcacgcctcgttggacagatccatgatggggtctccaaggccaacttctccatcggtcccttgatgcctgtccttgcaggaacctacagatgttatggttctgttcctcactccccctatcagttgtcagctcccagtgaccccctggacatcgtgatcacaggtctatatgagaaaccttctctctcagcccagccgggccccacggttcaggcaggagagaacgtgaccttgtcctgtagctcctggagctcctatgacatctaccatctgtccagggaaggggaggcccatgaacgtaggctccgtgcagtgcccaaggtcaacagaacattccaggcagactttcctctgggccctgccacccacggagggacctacagatgcttcggctctttccgtgccctgccctgcgtgtggtcaaactcaagtgacccactgcttgtttctgtcacaggtatctgcagacacctgcatgttctgattgggacctcagtggtcatcttcctcttcatcctcctcctcttctttctcctttatcgctggtgctccaacaaaaagaatgctgctgtaatggaccaagagcctgcgggggacagaacagtgaataggcaggactctgatgaacaagaccctcaggaggtgacgtacgcacagttggatcactgcgttttcatacagagaaaaatcagtcgcccttctcagaggcccaagacacccctaacagataccagcgtgtacacggaacttccaaatgctgagcccagatccaaagttgtctcctgcccacgagcaccacagtcaggtcttgagggggttttctagggagacaacagccctgtctcaaaaccaggttgccagatccaatgaaccagcagctggaatctgaaggcatcagtctgcatcttaggggatcgctcttcctcacaccacgaatctgaacatgcctctctcttgcttacaaatgcctaaggtcgccactgcctgctgcagagaaaacacactcctttgcttagcccacaagtatctatttcacttgacccctgcccacctctccaacctaactggcttacttcctagtcctacttgaggctgcaatcacactgaggaactcacaattccaaacatacaagaggctccctcttaacacggcacttacacacttgctgttccaccttccctcatgctgttccacctcccctcagactatctttcagccttctgtcatcagtaaaatttataaattttttttataacttcagtgtagctctctcctcttcaaataaacatgtctgccctcatggtttcg

SEQ ID NO: 146152 - DNA, 1834 bp, Homo sapiens
  Payload ID: 8971
  Gene Symbol: KIR3DL2
  Gene Name: killer cell immunoglobulin-like receptor, three domains, long cytoplasmic tail, 2
  ENST ID: ENST00000613586
  CDS Start-End: 34-1350
ggggcgcggcctcctgtctgcaccggcagcaccatgtcgctcacggtcgtcagcatggcgtgcgttgggttcttcttgctgcagggggcctggccactcatgggtggtcaggacaaacccttcctgtctgcccggcccagcactgtggtgcctcgaggaggacacgtggctcttcagtgtcactatcgtcgtgggtttaacaatttcatgctgtacaaagaagacagaagccacgttcccatcttccacggcagaatattccaggagagcttcatcatgggccctgtgaccccagcacatgcagggacctacagatgtcggggttcacgcccacactccctcactgggtggtcggcacccagcaaccccctggtgatcatggtcacaggaaaccacagaaaaccttccctcctggcccacccagggcccctgctgaaatcaggagagacagtcatcctgcaatgttggtcagatgtcatgtttgagcacttctttctgcacagagatgggatctctgaggacccctcacgcctcgttggacagatccatgatggggtctccaaggccaacttctccatcggtcccttgatgcctgtccttgcaggaacctacagatgttatggttctgttcctcactccccctatcagttgtcagctcccagtgaccccctggacatcgtgatcacaggtctatatgagaaaccttctctctcagcccagccgggccccacggttcaggcaggagagaacgtgaccttgtcctgtagctcctggagctcctatgacatctaccatctgtccagggaaggggaggcccatgaacgtaggctccgtgcagtgcccaaggtcaacagaacattccaggcagactttcctctgggccctgccacccacggagggacctacagatgcttcggctctttccgtgccctgccctgcgtgtggtcaaactcaagtgacccactgcttgtttctgtcacaggtatctgcagacacctgcatgttctgattgggacctcagtggtcatcttcctcttcatcctcctcctcttctttctcctttatcgctggtgctccaacaaaaagaatgctgctgtaatggaccaagagcctgcgggggacagaacagtgaataggcaggactctgatgaacaagaccctcaggaggtgacgtacgcacagttggatcactgcgttttcatacagagaaaaatcagtcgcccttctcagaggcccaagacacccctaacagataccagcgtgtacacggaacttccaaatgctgagcccagatccaaagttgtctcctgcccacgagcaccacagtcaggtcttgagggggttttctagggagacaacagccctgtctcaaaaccaggttgccagatccaatgaaccagcagctggaatctgaaggcatcagtctgcatcttaggggatcgctcttcctcacaccacgaatctgaacatgcctctctcttgcttacaaatgcctaaggtcgccactgcctgctgcagagaaaacacactcctttgcttagcccacaagtatctatttcacttgacccctgcccacctctccaacctaactggcttacttcctagtcctacttgaggctgcaatcacactgaggaactcacaattccaaacatacaagaggctccctcttaacacggcacttacacacttgctgttccaccttccctcatgctgttccacctcccctcagactatctttcagccttctgtcatcagtaaaatttataaattttttttataacttcagtgtagctctctcctcttcaaataaacatgtctgccctcatggtttcg

SEQ ID NO: 146153 - DNA, 1874 bp, Homo sapiens
  Payload ID: 8971
  Gene Symbol: KIR3DL2
  Gene Name: killer cell immunoglobulin-like receptor, three domains, long cytoplasmic tail, 2
  ENST ID: ENST00000617398
  CDS Start-End: 31-1398
gcgcggcctcctgtctgcaccggcagcaccatgtcgctcactgtcgtcagcatggcgtgcgttgggttcttcttgctgcagggggcctggccactcatgggtggtcaggacaaacccttcctgtctgcccggcccagcactgtggtgcctcgaggaggacacgtggctcttcagtgtcactatcgtcgtgggtttaacaatttcatgctgtacaaagaagacagaagccacgttcccatcttccacggcagaatattccaggagagcttcatcatgggccctgtgaccccagcacatgcagggacctacagatgtcggggttcacgcccacactccctcactgggtggtcggcacccagcaaccccctggtgatcatggtcacaggaaaccacagaaaaccttccctcctggcccacccagggcccctgctgaaatcaggagagacagtcatcctgcaatgttggtcagatatcatgtttgagcacttctttctgcacagagaggggatctctgaggacccctcacgcctcgttggacagatccatgatggggtctccaaggccaacttctccatcggtcccttgatgcctgtccttgcaggaacctacagatgttatggttctgttcctcactccccctatcagttgtcagctcccagtgaccccctggacatcgtgatcacaggtctatatgagaaaccttctctctcagcccagccgggccccacggttcaggcaggagagaacgtgaccttgtcctgtagctcctggagctcctatgacatctaccatctgtccagggaaggggaggcccatgaacgtaggctccgtgcagtgcccaaggtcaacagaacattccaggcagactttcctctgggccctgccacccacggagggacctacagatgcttcggctctttccgtgccctgccctgcgtgtggtcaaactcaagtgacccactgcttgtttctgtcacaggaaacccttcaagtagttggccttcacccacagaaccaagctccaaatctggtatctgcagacacctgcatgttctgattgggacctcagtggtcatcttcctcttcatcctcctcctcttctttctcctttatcgctggtgctccaacaaaaagaatgctgctgtaatggaccaagagcctgcgggggacagaacagtgaataggcaggactctgatgaacaagaccctcaggaggtgacgtacgcacagttggatcactgcgttttcatacagagaaaaatcagtcgcccttctcagaggcccaagacacccctaacagataccagcgtgtacacggaacttccaaatgctgagcccagatccaaagttgtctcctgcccacgagcaccacagtcaggtcttgagggggttttctagggagacaacagccctgtctcaaaaccaggttgccagatccaatgaaccagcagctggaatctgaaggcatcagtctgcatcttaggggatcgctcttcctcacaccacgaatctgaacatgcctctctcttgcttacaaatgcctaaggtcgccactgcctgctgcagagaaaacacactcctttgcttagcccacaagtatctatttcacttgacccctgcccacctctccaacctaactggcttacttcctagtcctacttgaggctgcaatcacactgaggaactcacaattccaaacatacaagaggctccctcttaacacggcacttacacacttgctgttccaccttccctcatgctgttccacctcccctcagactatctttcagccttctgtcatcagtaaaatttataaattttttttataacttcagtgtagctctctcctcttcaaataaacatgtctgccctca

SEQ ID NO: 146154 - DNA, 1834 bp, Homo sapiens
  Payload ID: 8971
  Gene Symbol: KIR3DL2
  Gene Name: killer cell immunoglobulin-like receptor, three domains, long cytoplasmic tail, 2
  ENST ID: ENST00000615608
  CDS Start-End: 34-1350
ggggcgcggcctcctgtctgcaccggcagcaccatgtcgctcactgtcgtcagcatggcgtgcgttgggttcttcttgctgcagggggcctggccactcatgggtggtcaggacaaacccttcctgtctgcccggcccagcactgtggtgcctcgaggaggacacgtggctcttcagtgtcactatcgtcgtgggtttaacaatttcatgctgtacaaagaagacagaagccacgttcccatcttccacggcagaatattccaggagagcttcatcatgggccctgtgaccccagcacatgcagggacctacagatgtcggggttcacgcccacactccctcactgggtggtcgacacccagcaaccccctggtgatcatggtcacaggaaaccacagaaaaccttccctcctggcccacccagggcccctgctgaaatcaggagagacagtcatcctgcaatgttggtcagatgtcatgtttgagcacttctttctgcacagagaggggatctctgaggacccctcacgcctcgttggacagatccatgatggggtctccaaggccaacttctccatcggtcccttgatgcctgtccttgcaggaacctacagatgttatggttctgttcctcactccccctatcagttgtcagctcccagtgaccccctggacatcgtgatcacaggtctatatgagaaaccttctctctcagcccagccgggccccacggttcaggcaggagagaacgtgaccttgtcctgtagctcctggagctcctatgacatctaccatctgtccagggaaggggaggcccatgaacgtaggctccgtgcagtgcccaaggtcaacagaacattccaggcagactttcctctgggccctgccacccacggagggacctacagatgcttcggctctttccgtgccctgccctgcgtgtggtcaaactcaagtgacccactgcttgtttctgtcacaggtatctgcagacacctgcatgttctgattgggacctcagtggtcatcttcctcttcatcctcctcctcttctttctcctttatcgctggtgctccaacaaaaagaatgctgctgtaatggaccaagagcctgcgggggacagaacagtgaataggcaggactctgatgaacaagaccctcaggaggtgatgtacgcacagttggatcactgcgttttcatacagagaaaaatcagtcgcccttctcagaggcccaagacacccctaacagataccagcgtgtacacggaacttccaaatgctgagcccagatccaaagttgtctcctgcccacgagcaccacagtcaggtcttgagggggttttctagggagacaacagccctgtctcaaaaccaggttgccagatccaatgaaccagcagctggaatctgaaggcatcagtctgcatcttaggggatcgctcttcctcacaccacgaatctgaacatgcctctctcttgcttacaaatgcctaaggtcgccactgcctgctgcagagaaaacacactcctttgcttagcccacaagtatctatttcacttgacccctgcccacctctccaacctaactggcttacttcctagtcctacttgaggctgcaatcacactgaggaactcacaattccaaacatgcaagaggctccctcttaacacggcacttacacacttgctgttccaccttccctcatgctgttccacctcccctcagactatctttcagccttctgtcatcagtaaaatttataaattttttttataacttcagtgtagctctctcctcttcaaataaacatgtctgccctcatggtttcg

SEQ ID NO: 146155 - DNA, 1546 bp, Homo sapiens
  Payload ID: 8971
  Gene Symbol: KIR3DL2
  Gene Name: killer cell immunoglobulin-like receptor, three domains, long cytoplasmic tail, 2
  ENST ID: ENST00000622784
  CDS Start-End: 1-1317
atgtcgctcactgtcgtcagcatggcgtgcgttgggttcttcttgctgcagggggcctggccactcatgggtggtcaggacaaacccttcctgtctgcccggcccagcactgtggtgcctcgaggaggacatgtggctcttcagtgtcactatcgtcgtgggtttaacaatttcatgctgtacaaagaagacagaagccacgttcccatcttccacggcagaatattccaggagagcttcatcatgggccctgtgaccccagcacatgcagggacctacagatgtcggggttcacgcccacactccctcactgggtggtcggcacccagcaaccccctggtgatcatggtcacaggaaaccacagaaaaccttccctcctggcccacccagggcccctgctgaaatcaggagagacagtcatcctgcaatgttggtcagatgtcatgtttgagcatttctttctgcacagagaggggatctctgaggacccctcacgcctcgttggacagatccatgatggggtctccaaggccaacttctccatcggtcccttgatgcctgtccttgcaggaacctacagatgttatggttctgttcctcactccccctatcagttgtcagctcccagtgaccccctggacatcgtgatcacaggtctatatgagaaaccttctctctcagcccagccgggccccacggttcaggcaggagagaacgtgaccttgtcctgtagctcctggagctcctatgacatctaccatctgtccagggaaggggaggcccatgaacgtaggctccgtgcagtgcccaaggtcaacagaacattccaggcagactttcctctgggccctgccacccacggagggacctacagatgcttcggctctttccatgccctgccctgcgtgtggtcaaactcaagtgacccactgcttgtttctgtcacaggtatctgcagacacctgcatgttctgattgggacctcagtggtcatcttcctcttcatcctcctcctcttctttctcctttatcgctggtgctccaacaaaaagaatgctgctgtaatggaccaagagcctgcgggggacagaacagtgaataggcaggactctgatgaacaagaccctcaggaggtgacgtacgcacagttggatcactgcgttttcatacagagaaaaatcagtcgcccttctcagaggcccaagacacccctaacagataccagcgtgtacacggaacttccaaatgctgagcccagatccaaagttgtctcctgcccacgagcaccacagtcaggtcttgagggggttttctagggagacaacagccctgtctcaaaaccaggttgccagatccaatgaaccagcagctggaatctgaaggcatcagtctgcatcttaggggatcgctcttcctcacaccacgaatctgaacatgcctctctcttgcttacaaatgcctaaggtcgccactgcctgctgcagagaaaacacactcctttgcttagcccacaagtatctatttcacttgacccctgcccacctc

SEQ ID NO: 146156 - DNA, 1874 bp, Homo sapiens
  Payload ID: 8971
  Gene Symbol: KIR3DL2
  Gene Name: killer cell immunoglobulin-like receptor, three domains, long cytoplasmic tail, 2
  Uniprot ID: P43630
  ENST ID: ENST00000619683
  CDS Start-End: 31-1398
gcgcggcctcctgtctgcaccggcagcaccatgtcgctcactgtcgtcagcatggcgtgcgttgggttcttcttgctgcagggggcctggccactcatgggtggtcaggacaaacccttcctgtctgcccggcccagcactgtggtgcctcgaggaggacacgtggctcttcagtgtcactatcgtcgtgggtttaacaatttcatgctgtacaaagaagacagaagccacgttcccatcttccacggcagaatattccaggagagcttcatcatgggccctgtgaccccagcacatgcagggacctacagatgtcggggttcacgcccacactccctcactgggtggtcggcacccagcaaccccctggtgatcatggtcacaggaaaccacagaaaaccttccctcctggcccacccagggcccctgctgaaatcaggagagacagtcatcctgcaatgttggtcagatgtcatgtttgagcacttctttctgcacagagatgggatctctgaggacccctcacgcctcgttggacagatccatgatggggtctccaaggccaacttctccatcggtcccttgatgcctgtccttgcaggaacctacagatgttatggttctgttcctcactccccctatcagttgtcagctcccagtgaccccctggacatcgtgatcacaggtctatatgagaaaccttctctctcagcccagccgggccccacggttcaggcaggagagaacgtgaccttgtcctgtagctcctggagctcctatgacatctaccatctgtccagggaaggggaggcccatgaacgtaggctccgtgcagtgcccaaggtcaacagaacattccaggcagactttcctctgggccctgccacccacggagggacctacagatgcttcggctctttccgtgccctgccctgcgtgtggtcaaactcaagtgacccactgcttgtttctgtcacaggaaacccttcaagtagttggccttcacccacagaaccaagctccaaatctggtatctgcagacacctgcatgttctgattgggacctcagtggtcatcttcctcttcatcctcctcctcttctttctcctttatcgctggtgctccaacaaaaagaatgctgctgtaatggaccaagagcctgcgggggacagaacagtgaataggcaggactctgatgaacaagaccctcaggaggtgacgtacgcacagttggatcactgcgttttcatacagagaaaaatcagtcgcccttctcagaggcccaagacacccctaacagataccagcgtgtacacggaacttccaaatgctgagcccagatccaaagttgtctcctgcccacgagcaccacagtcaggtcttgagggggttttctagggagacaacagccctgtctcaaaaccaggttgccagatccaatgaaccagcagctggaatctgaaggcatcagtctgcatcttaggggatcgctcttcctcacaccacgaatctgaacatgcctctctcttgcttacaaatgcctaaggtcgccactgcctgctgcagagaaaacacactcctttgcttagcccacaagtatctatttcacttgacccctgcccacctctccaacctaactggcttacttcctagtcctacttgaggctgcaatcacactgaggaactcacaattccaaacatacaagaggctccctcttaacacggcacttacacacttgctgttccaccttccctcatgctgttccacctcccctcagactatctttcagccttctgtcatcagtaaaatttataaattttttttataacttcagtgtagctctctcctcttcaaataaacatgtctgccctca

SEQ ID NO: 146157 - DNA, 1874 bp, Homo sapiens
  Payload ID: 8971
  Gene Symbol: KIR3DL2
  Gene Name: killer cell immunoglobulin-like receptor, three domains, long cytoplasmic tail, 2
  ENST ID: ENST00000615308
  CDS Start-End: 31-1398
gcgcggcctcctgtctgcaccggcagcaccatgtcgctcactgtcgtcagcatggcgtgcgttgggttcttcttgctgcagggggcctggccactcatgggtggtcaggacaaacccttcctgtctgcccggcccagcactgtggtgcctcgaggaggacacgtggctcttcagtgtcactatcgtcgtgggtttaacaatttcatgctgtacaaagaagacagaagccacgttcccatcttccacggcagaatattccaggagagcttcatcatgggccctgtgaccccagcacatgcagggacctacagatgtcggggttcacgcccacactccctcactgggtggtcggcacccagcaaccccctggtgatcatggtcacaggaaaccacagaaaaccttccctcctggcccacccagggcccctgctgaaatcaggagagacagtcatcctgcaatgttggtcagatgtcatgtttgagcacttctttctgcacagagaggggatctctgaggacccctcacacctcgttggacagatccatgatggggtctccaaggccaacttctccatcggtcccttgatgcctgtccttgcaggaacctacagatgttatggttctgttcctcactccccctatcagttgtcagctcccagtgaccccctggacatcgtgatcacaggtctatatgagaaaccttctctctcagcccagccgggccccacggttcaggcaggagagaacgtgaccttgtcctgtagctcctggagctcctatgacatctaccatctgtccagggaaggggaggcccatgaacgtaggctccgtgcagtgcccaaggtcaacagaacattccaggcagactttcctctgggccctgccacccacggagggacctacagatgcttcggctctttccgtgccctgccctgcgtgtggtcaaactcaagtgacccactgcttgtttctgtcacaggaaacccttcaagtagttggccttcacccacagaaccaagctccaaatctggtatctgcagacacctgcatgttctgattgggacctcagtggtcatcttcctcttcatcctcctcctcttctttctcctttatcgctggtgctccaacaaaaagaatgctgctgtaatggaccaagagcctgcgggggacagaacagtgaataggcaggactctgatgaacaagaccctcaggaggtgacgtacgcacagttggatcactgcgttttcatacagagaaaaatcagtcgcccttctcagaggcccaagacacccctaacagataccagcgtgtacacggaacttccaaatgctgagcccagatccaaagttgtctcctgcccacgagcaccacagtcaggtcttgagggggttttctagggagacaacagccctgtctcaaaaccaggttgccagatccaatgaaccagcagctggaatctgaaggcatcagtctgcatcttaggggatcgctcttcctcacaccacgaatctgaacatgcctctctcttgcttacaaatgcctaaggtcgccactgcctgctgcagagaaaacacactcctttgcttagcccacaagtatctatttcacttgacccctgcccacctctccaacctaactggcttacttcctagtcctacttgaggctgcaatcacactgaggaactcacaattccaaacatgcaagaggctccctcttaacacggcacttacacacttgctgttccaccttccctcatgctgttccacctcccctcagactatctttcagccttctgtcatcagtaaaatttataaattttttttataacttcagtgtagctctctcctcttcaaataaacatgtctgccctca

SEQ ID NO: 146158 - DNA, 1834 bp, Homo sapiens; identical to SEQ ID NO: 146154
  Payload ID: 8971
  Gene Symbol: KIR3DL2
  Gene Name: killer cell immunoglobulin-like receptor, three domains, long cytoplasmic tail, 2
  ENST ID: ENST00000618475
  CDS Start-End: 34-1350

SEQ ID NO: 146159 - DNA, 1834 bp, Homo sapiens
  Payload ID: 8971
  Gene Symbol: KIR3DL2
  Gene Name: killer cell immunoglobulin-like receptor, three domains, long cytoplasmic tail, 2
  ENST ID: ENST00000615712
  CDS Start-End: 34-1350
ggggcgcggcctcctgtctgcaccggcagcaccatgtcgctcactgtcgtcagcatggcgtgcgttgggttcttcttgctgcagggggcctggccactcatgggtggtcaggacaaacccttcctgtctgcccggcccagcactgtggtgcctcgaggaggacacgtggctcttcagtgtcactatcgtcgtgggtttaacaatttcatgctgtacaaagaagacagaagccacgttcccatcttccacggcagaatattccaggagagcttcatcatgggccctgtgaccccagcacatgcagggacctacagatgtcggggttcacgcccacactccctcactgggtggtcggcacccagcaaccccctggtgatcatggtcacaggaaaccacagaaaaccttccctcctggcccacccagggcccctgctgaaatcaggagagacagtcatcctgcaatgttggtcagatgtcatgtttgagcacttctttctgcacagagaggggatctctgaggacccctcacgcctcgttggacagatccatgatggggtctccaaggccaacttctccatcggtcccttgatgcctgtccttgcaggaacctacagatgttatggttctgttcctcactccccctatcagttgtcagctcccagtgaccccctggacatcgtgatcacaggtctatatgagaaaccttctctctcagcccagccgggccccacggttcaggcaggagagaacgtgaccttgtcctgtagctcctggagctcctatgacatctaccatctgtccagggaaggggaggcccatgaacgtaggctccgtgcagtgcccaaggtcaacagaacattccaggcagactttcctctgggccctgccacccacggagggacctacagatgcttcggctctttccgtgccctgccctgcgtgtggtcaaactcaagtgacccactgcttgtttctgtcacaggtatctgcagacacctgcatgttctgattgggacctcagtggtcatcttcctcttcatcctcctcctcttctttctcctttatcgctggtgctccaacaaaaagaatgctgctgtaatggaccaagagcctgcgggggacagaacagtgaataggcaggactctgatgaacaagaccctcaggaggtgatgtacgcacagttggatcactgcgttttcatacagagaaaaatcagtcgcccttctcagaggcccaagacacccctaacagataccagcgtgtacacggaacttccaaatgctgagcccagatccaaagttgtctcctgcccacgagcaccacagtcaggtcttgagggggttttctagggagacaacagccctgtctcaaaaccaggttgccagatccaatgaaccagcagctggaatctgaaggcatcagtctgcatcttaggggatcgctcttcctcacaccacgaatctgaacatgcctctctcttgcttacaaatgcctaaggtcgccactgcctgctgcagagaaaacacactcctttgcttagcccacaagtatctatttcacttgacccctgcccacctctccaacctaactggcttacttcctagtcctacttgaggctgcaatcacactgaggaactcacaattccaaacatgcaagaggctccctcttaacacggcacttacacacttgctgttccaccttccctcatgctgttccacctcccctcagactatctttcagccttctgtcatcagtaaaatttataaattttttttataacttcagtgtagctctctcctcttcaaataaacatgtctgccctcatggtttcg

SEQ ID NO: 146160 - DNA, 1874 bp, Homo sapiens
  Payload ID: 8971
  Gene Symbol: KIR3DL2
  Gene Name: killer cell immunoglobulin-like receptor, three domains, long cytoplasmic tail, 2
  ENST ID: ENST00000615208
  CDS Start-End: 31-1398
gcgcggcctcctgtctgcaccggcagcaccatgtcgctcactgtcgtcagcatggcgtgcgttgggttcttcttgctgcagggggcctggccactcatgggtggtcaggacaaacccttcctgtctgcccggcccagcactgtggtgcctcgaggaggacacgtggctcttcagtgtcactatcgtcgtgggtttaacaatttcatgctgtacaaagaagacagaagccacgttcccatcttccacggcagaatattccaggagagcttcatcatgggccctgtgaccccagcacatgcagggacctacagatgtcggggttcacgcccacactccctcactgggtggtcgacacccagcaaccccctggtgatcatggtcacaggaaaccacagaaaaccttccctcctggcccacccagggcccctgctgaaatcaggagagacagtcatcctgcaatgttggtcagatgtcatgtttgagcacttctttctgcacagagaggggatctctgaggacccctcacgcctcgttggacagatccatgatggggtctccaaggccaacttctccatcggtcccttgatgcctgtccttgcaggaacctacagatgttatggttctgttcctcactccccctatcagttgtcagctcccagtgaccccctggacatcgtgatcacaggtctatatgagaaaccttctctctcagcccagccgggccccacggttcaggcaggagagaacgtgaccttgtcctgtagctcctggagctcctatgacatctaccatctgtccagggaaggggaggcccatgaacgtaggctccgtgcagtgcccaaggtcaacagaacattccaggcagactttcctctgggccctgccacccacggagggacctacagatgcttcggctctttccgtgacctgccctgcgtgtggtcaaactcaagtgacccactgcttgtttctgtcacaggaaacccttcaagtagttggccttcacccacagaaccaagctccaaatctggtatctgcagacacctgcatgttctgattgggacctcagtggtcatcttcctcttcatcctcctcctcttctttctcctttatcgctggtgctccaacaaaaagaatgctgctgtaatggaccaagagcctgcgggggacagaacagtgaataggcaggactctgatgaacaagaccctcaggaggtgatgtacgcacagttggatcactgcgttttcatacagagaaaaatcagtcgcccttctcagaggcccaagacacccctaacagataccagcgtgtacacggaacttccaaatgctgagcccagatccaaagttgtctcctgcccacgagcaccacagtcaggtcttgagggggttttctagggagacaacagccctgtctcaaaaccaggttgccagatccaatgaaccagcagctggaatctgaaggcatcagtctgcatcttaggggatcgctcttcctcacaccacgaatctgaacatgcctctctcttgcttacaaatgcctaaggtcgccactgcctgctgcagagaaaacacactcctttgcttagcccacaagtatctatttcacttgacccctgcccacctctccaacctaactggcttacttcctagtcctacttgaggctgcaatcacactgaggaactcacaattccaaacatgcaagaggctccctcttaacacggcacttacacacttgctgttccaccttccctcatgctgttccacctcccctcagactatctttcagccttctgtcatcagtaaaatttataaattttttttataacttcagtgtagctctctcctcttcaaataaacatgtctgccctca

SEQ ID NO: 146161 - DNA, 1874 bp, Homo sapiens; identical to SEQ ID NO: 146156
  Payload ID: 8971
  Gene Symbol: KIR3DL2
  Gene Name: killer cell immunoglobulin-like receptor, three domains, long cytoplasmic tail, 2
  Uniprot ID: P43630
  ENST ID: ENST00000614753
  CDS Start-End: 31-1398

SEQ ID NO: 146162 - DNA, 1546 bp, Homo sapiens
  Payload ID: 8971
  Gene Symbol: KIR3DL2
  Gene Name: killer cell immunoglobulin-like receptor, three domains, long cytoplasmic tail, 2
  ENST ID: ENST00000610507
  CDS Start-End: 1-1317
atgtcgctcacggtcgtcagcatggcgtgcgttgggttcttcttgctgcagggggcctggccactcatgggtggtcaggacaaacccttcctgtctgcccggcccagcactgtggtgcctcgaggaggacacgtggctcttcagtgtcactatcgtcgtgggtttaacaatttcatgctgtacaaagaagacagaagccacgttcccatcttccacggcagaatattccaggagagcttcatcatgggccctgtgaccccagcacatgcagggacctacagatgtcggggttcacgcccacactccctcactgggtggtcggcacccagcaaccccgtggtgatcatggtcacaggaaaccacagaaaaccttccctcctggcccacccagggcccctgctgaaatcaggagagacagtcatcctgcaatgttggtcagatgtcatgtttgagcacttctttctgcacagagaggggatctctgaggacccctcacacctcgttggacagatccatgatggggtctccaaggccaacttctccatcggtcccttgatgcctgtccttgcaggaacctacagatgttatggttctgttcctcactccccctatcagttgtcagctcccagtgaccccctggacatcgtgatcacaggtctatatgagaaaccttctctctcagcccagccgggccccacggttcaggcaggagagaacgtgaccttgtcctgtagctcctggagctcctatgacatctaccatctgtccagggaaggggaggcccatgaacgtaggctccgtgcagtgcccaaggtcaacagaacattccaggcagactttcctctgggccctgccacccacggagggacctacagatgcttcggctctttccgtgccctgccctgcgtgtggtcaaactcaagtgacccactgcttgtttctgtcacaggtatctgcagacacctgcatgttctgattgggacctcagtggtcatcttcctcttcatcctcctcctcttctttctcctttatcgctggtgctccaacaaaaagaatgctgctgtaatggaccaagagcctgcgggggacagaacagtgaataggcaggactctgatgaacaagaccctcaggaggtgacgtacgcacagttggatcactgcgttttcatacagagaaaaatcagtcgcccttctcagaggcccaagacacccctaacagataccagcgtgtacacggaacttccaaatgctgagcccagatccaaagttgtctcctgcccacgagcaccacagtcaggtcttgagggggttttctagggagacaacagccctgtctcaaaaccaggttgccagatccaatgaaccagcagctggaatctgaaggcatcagtctgcatcttaggggatcgctcttcctcacaccacgaatctgaacatgcctctctcttgcttacaaatgcctaaggtcgccactgcctgctgcagagaaaacacactcctttgcttagcccacaagtatctatttcacttgacccctgcccacctc

SEQ ID NO: 146163 - DNA, 1877 bp, Homo sapiens
  Payload ID: 8971
  Gene Symbol: KIR3DL2
  Gene Name: killer cell immunoglobulin-like receptor, three domains, long cytoplasmic tail, 2
  Uniprot ID: P43630
  ENST ID: ENST00000622024
  CDS Start-End: 34-1401
ggggcgcggcctcctgtctgcaccggcagcaccatgtcgctcacggtcgtcagcatggcgtgcgttgggttcttcttgctgcagggggcctggccactcatgggtggtcaggacaaacccttcctgtctgcccggcccagcactgtggtgcctcgaggaggacacgtggctcttcagtgtcactatcgtcgtgggtttaacaatttcatgctgtacaaagaagacagaagccacgttcccatcttccacggcagaatattccaggagagcttcatcatgggccctgtgaccccagcacatgcagggacctacagatgtcggggttcacgcccacactccctcactgggtggtcggcacccagcaaccccgtggtgatcatggtcacaggaaaccacagaaaaccttccctcctggcccacccagggcccctgctgaaatcaggagagacagtcatcctgcaatgttggtcagatgtcatgtttgagcacttctttctgcacagagaggggatctctgaggacccctcacacctcgttggacagatccatgatggggtctccaaggccaacttctccatcggtcccttgatgcctgtccttgcaggaacctacagatgttatggttctgttcctcactccccctatcagttgtcagctcccagtgaccccctggacatcgtgatcacaggtctatatgagaaaccttctctctcagcccagccgggccccacggttcaggcaggagagaacgtgaccttgtcctgtagctcctggagctcctatgacatctaccatctgtccagggaaggggaggcccatgaacgtaggctccgtgcagtgcccaaggtcaacagaacattccaggcagactttcctctgggccctgccacccacggagggacctacagatgcttcggctctttccgtgccctgccctgcgtgtggtcaaactcaagtgacccactgcttgtttctgtcacaggaaacccttcaagtagttggccttcacccacagaaccaagctccaaatctggtatctgcagacacctgcatgttctgattgggacctcagtggtcatcttcctcttcatcctcctcctcttctttctcctttatcgctggtgctccaacaaaaagaatgctgctgtaatggaccaagagcctgcgggggacagaacagtgaataggcaggactctgatgaacaagaccctcaggaggtgacgtacgcacagttggatcactgcgttttcatacagagaaaaatcagtcgcccttctcagaggcccaagacacccctaacagataccagcgtgtacacggaacttccaaatgctgagcccagatccaaagttgtctcctgcccacgagcaccacagtcaggtcttgagggggttttctagggagacaacagccctgtctcaaaaccaggttgccagatccaatgaaccagcagctggaatctgaaggcatcagtctgcatcttaggggatcgctcttcctcacaccacgaatctgaacatgcctctctcttgcttacaaatgcctaaggtcgccactgcctgctgcagagaaaacacactcctttgcttagcccacaagtatctatttcacttgacccctgcccacctctccaacctaactggcttacttcctagtcctacttgaggctgcaatcacactgaggaactcacaattccaaacatgcaagaggctccctcttaacacggcacttacacacttgctgttccaccttccctcatgctgttccacctcccctcagactatctttcagccttctgtcatcagtaaaatttataaattttttttataacttcagtgtagctctctcctcttcaaataaacatgtctgccctca

SEQ ID NO: 146164 - DNA, 1834 bp, Homo sapiens; identical to SEQ ID NO: 146154
  Payload ID: 8971
  Gene Symbol: KIR3DL2
  Gene Name: killer cell immunoglobulin-like receptor, three domains, long cytoplasmic tail, 2
  ENST ID: ENST00000612018
  CDS Start-End: 34-1350

SEQ ID NO: 146165 - DNA, 1834 bp, Homo sapiens; identical to SEQ ID NO: 146151
  Payload ID: 8971
  Gene Symbol: KIR3DL2
  Gene Name: killer cell immunoglobulin-like receptor, three domains, long cytoplasmic tail, 2
  ENST ID: ENST00000613029
  CDS Start-End: 34-1350

SEQ ID NO: 146166 - DNA, 1863 bp, Homo sapiens
  Payload ID: 8971
  Gene Symbol: KIR3DL2
  Gene Name: killer cell immunoglobulin-like receptor, three domains, long cytoplasmic tail, 2
  ENST ID: ENST00000620550
  CDS Start-End: 20-1387
tgtctgcaccggcagcaccatgtcgctcactgtcgtcagcatggcgtgcgttgggttcttcttgctgcagggggcctggccactcatgggtggtcaggacaaacccttcctgtctgcctggcccagcactgtggtgcctcgaggaggacacgtggctcttcagtgtcactatcgtcgtgggtttaacaatttcatgctgtacaaagaagacagaagccacgttcccatcttccacggcagaatattccaggagagcttcatcatgggccctgtgaccccagcacatgcagggacctacagatgtcggggttcacgcccacactccctcactgggtggtcggcacccagcaaccccctggtgatcatggtcacaggaaaccacagaaaaccttccctcctggcccacccagggcccctgctgaaatcaggagagacagtcatcctgcaatgttggtcagatgtcatgtttgagcacttctttctgcacagagaggggatctctgaggacccctcacgcctcgttggacagatccatgatggggtctccaaggccaacttctccatcggtcccttgatgcctgtccttgcaggaacctacagatgttatggttctgttcctcactccccctatcagttgtcagctcccagtgaccccctggacatcgtgatcacaggtctatatgagaaaccttctctctcagcccagccgggccccacggttcaggcaggagagaacgtgaccttgtcctgtagctcctggagctcctatgacatctaccatctgtccagggaaggggaggcccatgaacgtaggctccgtgcagtgcccaaggtcaacagaacattccaggcagactttcctctgggccctgccacccacggagggacctacagatgcttcggctctttccgtgccctgccctgcgtgtggtcaaactcaagtgacccactgcttgtttctgtcacaggaaacccttcaagtagttggccttcacccacagaaccaagctccaaatctggtatctgcagacacctgcatgttctgattgggacctcagtggtcatcttcctcttcatcctcctcctcttctttctcctttatcgctggtgctccaacaaaaagaatgctgctgtaatggaccaagagcctgcgggggacagaacagtgaataggcaggactctgatgaacaagaccctcaggaggtgacgtacgcacagttggatcactgcgttttcatacagagaaaaatcagtcgcccttctcagaggcccaagacacccctaacagataccagcgtgtacacggaacttccaaatgctgagcccagatccaaagttgtctcctgcccacgagcaccacagtcaggtcttgagggggttttctagggagacaacagccctgtctcaaaaccaggttgccagatccaatgaaccagcagctggaatctgaaggcatcagtctgcatcttaggggatcgctcttcctcacaccacgaatctgaacatgcctctctcttgcttacaaatgcctaaggtcgccactgcctgctgcagagaaaacacactcctttgcttagcccacaagtatctatttcacttgacccctgcccacctctccaacctaactggcttacttcctagtcctacttgaggctgcaatcacactgaggaactcacaattccaaacatacaagaggctccctcttaacacggcacttacacacttgctgttccaccttccctcatgctgttccacctcccctcagactatctttcagccttctgtcatcagtaaaatttataaattttttttataacttcagtgtagctctctcctcttcaaataaacatgtctgccctca

SEQ ID NO: 146167 - DNA, 1885 bp, Homo sapiens
  Payload ID: 8971
  Gene Symbol: KIR3DL2
  Gene Name: killer cell immunoglobulin-like receptor, three domains, long cytoplasmic tail, 2
  Uniprot ID: P43630
  ENST ID: ENST00000620817
  CDS Start-End: 34-1401
ggggcgcggcctcctgtctgcaccggcagcaccatgtcgctcactgtcgtcagcatggcgtgcgttgggttcttcttgctgcagggggcctggccactcatgggtggtcaggacaaacccttcctgtctgcccggcccagcactgtggtgcctcgaggaggacacgtggctcttcagtgtcactatcgtcgtgggtttaacaatttcatgctgtacaaagaagacagaagccacgttcccatcttccacggcagaatattccaggagagcttcatcatgggccctgtgaccccagcacatgcagggacctacagatgtcggggttcacgcccacactccctcactgggtggtcggcacccagcaaccccctggtgatcatggtcacaggaaaccacagaaaaccttccctcctggcccacccagggcccctgctgaaatcaggagagacagtcatcctgcaatgttggtcagatgtcatgtttgagcacttctttctgcacagagaggggatctctgaggacccctcacgcctcgttggacagatccatgatggggtctccaaggccaacttctccatcggtcccttgatgcctgtccttgcaggaacctacagatgttatggttctgttcctcactccccctatcagttgtcagctcccagtgaccccctggacatcgtgatcacaggtctatatgagaaaccttctctctcagcccagccgggccccacggttcaggcaggagagaacgtgaccttgtcctgtagctcctggagctcctatgacatctaccatctgtccagggaaggggaggcccatgaacgtaggctccgtgcagtgcccaaggtcaacagaacattccaggcagactttcctctgggccctgccacccacggagggacctacagatgcttcggctctttccgtgccctgccctgcgtgtggtcaaactcaagtgacccactgcttgtttctgtcacaggaaacccttcaagtagttggccttcacccacagaaccaagctccaaatctggtatctgcagacacctgcatgttctgattgggacctcagtggtcatcttcctcttcatcctcctcctcttctttctcctttatcgctggtgctccaacaaaaagaatgctgctgtaatggaccaagagcctgcgggggacagaacagtgaataggcaggactctgatgaacaagaccctcaggaggtgacgtacgcacagttggatcactgcgttttcatacagagaaaaatcagtcgcccttctcagaggcccaagacacccctaacagataccagcgtgtacacggaacttccaaatgctgagcccagatccaaagttgtctcctgcccacgagcaccacagtcaggtcttgagggggttttctagggagacaacagccctgtctcaaaaccaggttgccagatccaatgaaccagcagctggaatctgaaggcatcagtctgcatcttaggggatcgctcttcctcacaccacgaatctgaacatgcctctctcttgcttacaaatgcctaaggtcgccactgcctgctgcagagaaaacacactcctttgcttagcccacaagtatctatttcacttgacccctgcccacctctccaacctaactggcttacttcctagtcctacttgaggctgcaatcacactgaggaactcacaattccaaacatacaagaggctccctcttaacacggcacttacacacttgctgttccaccttccctcatgctgttccacctcccctcagactatctttcagccttctgtcatcagtaaaatttataaattttttttataacttcagtgtagctctctcctcttcaaataaacatgtctgccctcatggtttcg

SEQ ID NO: 146168 - DNA, 1834 bp, Homo sapiens; identical to SEQ ID NO: 146151
  Payload ID: 8971
  Gene Symbol: KIR3DL2
  Gene Name: killer cell immunoglobulin-like receptor, three domains, long cytoplasmic tail, 2
  ENST ID: ENST00000616626
  CDS Start-End: 34-1350

SEQ ID NO: 146169 - DNA, 1863 bp, Homo sapiens
  Payload ID: 8971
  Gene Symbol: KIR3DL2
  Gene Name: killer cell immunoglobulin-like receptor, three domains, long cytoplasmic tail, 2
  Uniprot ID: P43630
  ENST ID: ENST00000611608
  CDS Start-End: 20-1387
tgtctgcaccggcagcaccatgtcgctcactgtcgtcagcatggcgtgcgttgggttcttcttgctgcagggggcctggccactcatgggtggtcaggacaaacccttcctgtctgcccggcccagcactgtggtgcctcgaggaggacacgtggctcttcagtgtcactatcgtcgtgggtttaacaatttcatgctgtacaaagaagacagaagccacgttcccatcttccacggcagaatattccaggagagcttcatcatgggccctgtgaccccagcacatgcagggacctacagatgtcggggttcacgcccacactccctcactgggtggtcggcacccagcaaccccctggtgatcatggtcacaggaaaccacagaaaaccttccctcctggcccacccagggcccctgctgaaatcaggagagacagtcatcctgcaatgttggtcagatgtcatgtttgagcacttctttctgcacagagaggggatctctgaggacccctcacgcctcgttggacagatccatgatggggtctccaaggccaacttctccatcggtcccttgatgcctgtccttgcaggaacctacagatgttatggttctgttcctcactccccctatcagttgtcagctcccagtgaccccctggacatcgtgatcacaggtctatatgagaaaccttctctctcagcccagccgggccccacggttcaggcaggagagaacgtgaccttgtcctgtagctcctggagctcctatgacatctaccatctgtccagggaaggggaggcccatgaacgtaggctccgtgcagtgcccaaggtcaacagaacattccaggcagactttcctctgggccctgccacccacggagggacctacagatgcttcggctctttccgtgccctgccctgcgtgtggtcaaactcaagtgacccactgcttgtttctgtcacaggaaacccttcaagtagttggccttcacccacagaaccaagctccaaatctggtatctgcagacacctgcatgttctgattgggacctcagtggtcatcttcctcttcatcctcctcctcttctttctcctttatcgctggtgctccaacaaaaagaatgctgctgtaatggaccaagagcctgcgggggacagaacagtgaataggcaggactctgatgaacaagaccctcaggaggtgacgtacgcacagttggatcactgcgttttcatacagagaaaaatcagtcgcccttctcagaggcccaagacacccctaacagataccagcgtgtacacggaacttccaaatgctgagcccagatccaaagttgtctcctgcccacgagcaccacagtcaggtcttgagggggttttctagggagacaacagccctgtctcaaaaccaggttgccagatccaatgaaccagcagctggaatctgaaggcatcagtctgcatcttaggggatcgctcttcctcacaccacgaatctgaacatgcctctctcttgcttacaaatgcctaaggtcgccactgcctgctgcagagaaaacacactcctttgcttagcccacaagtatctatttcacttgacccctgcccacctctccaacctaactggcttacttcctagtcctacttgaggctgcaatcacactgaggaactcacaattccaaacatacaagaggctccctcttaacacggcacttacacacttgctgttccaccttccctcatgctgttccacctcccctcagactatctttcagccttctgtcatcagtaaaatttataaattttttttataacttcagtgtagctctctcctcttcaaataaacatgtctgccctca

SEQ ID NO: 146170 - DNA, 1834 bp, Homo sapiens; identical to SEQ ID NO: 146151
  Payload ID: 8971
  Gene Symbol: KIR3DL2
  Gene Name: killer cell immunoglobulin-like receptor, three domains, long cytoplasmic tail, 2
  ENST ID: ENST00000620280
  CDS Start-End: 34-1350

SEQ ID NO: 146171 - DNA, 1834 bp, Homo sapiens
  Payload ID: 8971
  Gene Symbol: KIR3DL2
  Gene Name: killer cell immunoglobulin-like receptor, three domains, long cytoplasmic tail, 2
  ENST ID: ENST00000611872
  CDS Start-End: 34-1350
ggggcgcggcctcctgtctgcaccggcagcaccatgtcgctcactgtcgtcagcatggcgtgcgttgggttcttcttgctgcagggggcctggccactcatgggtggtcaggacaaacccttcctgtctgcccggcccagcactgtggtgcctcgaggaggacacgtggctcttcagtgtcactatcgtcgtgggtttaacaatttcatgctgtacaaagaagacagaagccacgttcccatcttccacggcagaatattccaggagagcttcatcatgggccctgtgaccccagcacatgcagggacctacagatgtcggggttcacgcccacactccctcactgggtggtcgacacccagcaaccccctggtgatcatggtcacaggaaaccacagaaaaccttccctcctggcccacccagggcccctgctgaaatcaggagagacagtcatcctgcaatgttggtcagatgtcatgtttgagcacttctttctgcacagagaggggatctctgaggacccctcacgcctcgttggacagatccatgatggggtctccaaggccaacttctccatcggtcccttgatgcctgtccttgcaggaacctacagatgttatggttctgttcctcactccccctatcagttgtcagctcccagtgaccccctggacatcgtgatcacaggtctatatgagaaaccttctctctcagcccagccgggccccacggttcaggcaggagagaacgtgaccttgtcctgtagctcctggagctcctatgacatctaccatctgtccaggggaggggaggcccatgaacgtaggctccgtgcagtgcccaaggtcaacagaacattccaggcagactttcctctgggccctgccacccacggagggacctacagatgcttcggctctttccgtgccctgccctgcgtgtggtcaaactcaagtgacccactgcttgtttctgtcacaggtatctgcagacacctgcatgttctgattgggacctcagtggtcatcttcctcttcatcctcctcctcttctttctcctttatcgctggtgctccaacaaaaagaatgctgctgtaatggaccaagagcctgcgggggacagaacagtgaataggcaggactctgatgaacaagaccctcaggaggtgatgtacgcacagttggatcactgcgttttcatacagagaaaaatcagtcgcccttctcagaggcccaagacacccctaacagataccagcgtgtacacggaacttccaaatgctgagcccagatccaaagttgtctcctgcccacgagcaccacagtcaggtcttgagggggttttctagggagacaacagccctgtctcaaaaccaggttgccagatccaatgaaccagcagctggaatctgaaggcatcagtctgcatcttaggggatcgctcttcctcacaccacgaatctgaacatgcctctctcttgcttacaaatgcctaaggtcgccactgcctgctgcagagaaaacacactcctttgcttagcccacaagtatctatttcacttgacccctgcccacctctccaacctaactggcttacttcctagtcctacttgaggctgcaatcacactgaggaactcacaattccaaacatgcaagaggctccctcttaacacggcacttacacacttgctgttccaccttccctcatgctgttccacctcccctcagactatctttcagccttctgtcatcagtaaaatttataaattttttttataacttcagtgtagctctctcctcttcaaataaacatgtctgccctcatggtttcg

SEQ ID NO: 146172 - DNA, 1834 bp, Homo sapiens
  Payload ID: 8971
  Gene Symbol: KIR3DL2
  Gene Name: killer cell immunoglobulin-like receptor, three domains, long cytoplasmic tail, 2
  Uniprot ID: P43630
  ENST ID: ENST00000611859
  CDS Start-End: 34-1350
ggggcgcggcctcctgtctgcaccggcagcaccatgtcgctcacggtcgtcagcatggcgtgcgttgggttcttcttgctgcagggggcctggccactcatgggtggtcaggacaaacccttcctgtctgcccggcccagcactgtggtgcctcgaggaggacacgtggctcttcagtgtcactatcgtcgtgggtttaacaatttcatgctgtacaaagaagacagaagccacgttcccatcttccacggcagaatattccaggagagcttcatcatgggccctgtgaccccagcacatgcagggacctacagatgtcggggttcacgcccacactccctcactgggtggtcggcacccagcaaccccctggtgatcatggtcacaggaaaccacagaaaaccttccctcctggcccacccagggcccctgctgaaatcaggagagacagtcatcctgcaatgttggtcagatgtcatgtttgagcacttctttctgcacagagaggggatctctgaggacccctcacgcctcgttggacagatccatgatggggtctccaaggccaacttctccatcggtcccttgatgcctgtccttgcaggaacctacagatgttatggttctgttcctcactccccctatcagttgtcagctcccagtgaccccctggacatcgtgatcacaggtctatatgagaaaccttctctctcagcccagccgggccccacggttcaggcaggagagaacgtgaccttgtcctgtagctcctggagctcctatgacatctaccatctgtccagggaaggggaggcccatgaacgtaggctccgtgcagtgcccaaggtcaacagaacattccaggcagactttcctctgggccctgccacccacggagggacctacagatgcttcggctctttccgtgccctgccctgcgtgtggtcaaactcaagtgacccactgcttgtttctgtcacaggtatctgcagacacctgcatgttctgattgggacctcagtggtcatcttcctcttcatcctcctcctcttctttctcctttatcgctggtgctccaacaaaaagaatgctgctgtaatggaccaagagcctgcgggggacagaacagtgaataggcaggactctgatgaacaagaccctcaggaggtgacgtacgcacagttggatcactgcgttttcatacagagaaaaatcagtcgcccttctcagaggcccaagacacccctaacagataccagcgtgtacacggaacttccaaatgctgagcccagatccaaagttgtctcctgcccacgagcaccacagtcaggtcttgagggggttttctagggagacaacagccctgtctcaaaaccaggttgccagatccaatgaaccagcagctggaatctgaaggcatcagtctgcatcttaggggatcgctcttcctcacaccacgaatctgaacatgcctctctcttgcttacaaatgcctaaggtcgccactgcctgctgcagagaaaacacactcctttgcttagcccacaagtatctatttcacttgacccctgcccacctctccaacctaactggcttacttcctagtcctacttgaggctgcaatcacactgaggaactcacaattccaaacatacaagaggctccctcttaacacggcacttacacacttgctgttccaccttccctcatgctgttccacctcccctcagactatctttcagccttctgtcatcagtaaaatttataaattttttttataacttcagtgtagctctctcctcttcaaataaacatgtctgccctcatggtttcg

SEQ ID NO: 146173 - DNA, 1834 bp, Homo sapiens; identical to SEQ ID NO: 146154
  Payload ID: 8971
  Gene Symbol: KIR3DL2
  Gene Name: killer cell immunoglobulin-like receptor, three domains, long cytoplasmic tail, 2
  ENST ID: ENST00000622574
  CDS Start-End: 34-1350

SEQ ID NO: 146174 - DNA, 1834 bp, Homo sapiens
  Payload ID: 8971
  Gene Symbol: KIR3DL2
  Gene Name: killer cell immunoglobulin-like receptor, three domains, long cytoplasmic tail, 2
  ENST ID: ENST00000610914
  CDS Start-End: 34-1350
ggggcgcggcctcctgtctgcaccggcagcaccatgtcgctcactgtcgtcagcatggcgtgcgttgggttcttcttgctgcagggggcctggccactcatgggtggtcaggacaaacccttcctgtctgcccggcccagcactgtggtgcctcgaggaggacacgtggctcttcagtgtcactatcgtcgtgggtttaacaatttcatgctgtacaaagaagacagaagccacgttcccatcttccacggcagaatattccaggagagcttcatcatgggccctgtgaccccagcacatgcagggacctacagatgtcggggttcacgcccacactccctcactgggtggtcggcacccagcaaccccctggtgatcatggtcacaggaaaccacagaaaaccttccctcctggcccacccagggcccctgctgaaatcaggagagacagtcatcctgcaatgttggtcagatatcatgtttgagcacttctttctgcacagagaggggatctctgaggacccctcacgcctcgttggacagatccatgatggggtctccaaggccaacttctccatcggtcccttgatgcctgtccttgcaggaacctacagatgttatggttctgttcctcactccccctatcagttgtcagctcccagtgaccccctggacatcgtgatcacaggtctatatgagaaaccttctctctcagcccagccgggccccacggttcaggcaggagagaacgtgaccttgtcctgtagctcctggagctcctatgacatctaccatctgtccagggaaggggaggcccatgaacgtaggctccgtgcagtgcccaaggtcaacagaacattccaggcagactttcctctgggccctgccacccacggagggacctacagatgcttcggctctttccgtgccctgccctgcgtgtggtcaaactcaagtgacccactgcttgtttctgtcacaggtatctgcagacacctgcatgttctgattgggacctcagtggtcatcttcctcttcatcctcctcctcttctttctcctttatcgctggtgctccaacaaaaagaatgctgctgtaatggaccaagagcctgcgggggacagaacagtgaataggcaggactctgatgaacaagaccctcaggaggtgacgtacgcacagttggatcactgcgttttcatacagagaaaaatcagtcgcccttctcagaggcccaagacacccctaacagataccagcgtgtacacggaacttccaaatgctgagcccagatccaaagttgtctcctgcccacgagcaccacagtcaggtcttgagggggttttctagggagacaacagccctgtctcaaaaccaggttgccagatccaatgaaccagcagctggaatctgaaggcatcagtctgcatcttaggggatcgctcttcctcacaccacgaatctgaacatgcctctctcttgcttacaaatgcctaaggtcgccactgcctgctgcagagaaaacacactcctttgcttagcccacaagtatctatttcacttgacccctgcccacctctccaacctaactggcttacttcctagtcctacttgaggctgcaatcacactgaggaactcacaattccaaacatacaagaggctccctcttaacacggcacttacacacttgctgttccaccttccctcatgctgttccacctcccctcagactatctttcagccttctgtcatcagtaaaatttataaattttttttataacttcagtgtagctctctcctcttcaaataaacatgtctgccctcatggtttcg

SEQ ID NO: 146175 - DNA, 1662 bp, Homo sapiens
  Payload ID: 8971
  Gene Symbol: KIR3DL2
  Gene Name: killer cell immunoglobulin-like receptor, three domains, long cytoplasmic tail, 2
  ENST ID: ENST00000610587
  CDS Start-End: 34-1401
ggggcgcggcctcctgtctgcaccggcagcaccatgtcgctcactgtcgtcagcatggcgtgcgttgggttcttcttgctgcagggggcctggccactcatgggtggtcaggacaaacccttcctgtctgcccggcccagcactgtggtgcctcgaggaggacacgtggctcttcagtgtcactatcgtcgtgggtttaacaatttcatgctgtacaaagaagacagaagccacgttcccatcttccacggcagaatattccaggagagcttcatcatgggccctgtgaccccagcacatgcagggacctacagatgtcggggttcacgcccacactccctcactgggtggtcgacacccagcaaccccctggtgatcatggtcacaggaaaccacagaaaaccttccctcctggcccacccagggcccctgctgaaatcaggagagacagtcatcctgcaatgttggtcagatgtcatgtttgagcacttctttctgcacagagaggggatctctgaggacccctcacgcctcgttggacagatccatgatggggtctccaaggccaacttctccatcggtcccttgatgcctgtccttgcaggaacctacagatgttatggttctgttcctcactccccctatcagttgtcagctcccagtgaccccctggacatcgtgatcacaggtctatatgagaaaccttctctctcagcccagccgggccccacggttcaggcaggagagaacgtgaccttgtcctgtagctcctggagctcctatgacatctaccatctgtccagggaaggggaggcccatgaacgtaggctccgtgcagtgcccaaggtcaacagaacattccaggcagactttcctctgggccctgccacccacggagggacctacagatgcttcggctctttccgtgccctgccctgcgtgtggtcaaactcaagtgacccactgcttgtttctgtcacaggaaacccttcaagtagttggccttcacccacagaaccaagctccaaatctggtatctgcagacacctgcatgttctgattgggacctcagtggtcatcttcctcttcatcctcctcctcttctttctcctttatcgctggtgctccaacaaaaagaatgctgctgtaatggaccaagagcctgcgggggacagaacagtgaataggcaggactctgatgaacaagaccctcaggaggtgatgtacgcacagttggatcactgcgttttcatacagagaaaaatcagtcgcccttctcagaggcccaagacacccctaacagataccagcgtgtacacggaacttccaaatgctgagcccagatccaaagttgtctcctgcccacgagcaccacagtcaggtcttgagggggttttctagggagacaacagccctgtctcaaaaccaggttgccagatccaatgaaccagcagctggaatctgaaggcatcagtctgcatcttaggggatcgctcttcctcacaccacgaatctgaacatgcctctctcttgcttacaaatgcctaaggtcgccactgcctgctgcagagaaaacacactcctttgcttagcccacaagtatctatttcacttgacccctgcccacctctccaacctaactggcttacttcctagtcctac

SEQ ID NO: 146176 - DNA, 398 bp, Homo sapiens
  Payload ID: 8971
  Gene Symbol: KIR3DL2
  Gene Name: killer cell immunoglobulin-like receptor, three domains, long cytoplasmic tail, 2
  ENST ID: ENST00000617195
  CDS Start-End: 44-398
gagctgagctggggcgcggcctcctgtctgcaccggcagcaccatgtcgctcactgtcgtcagcatggcgtgcgttgggttcttcttgctgcagggggcctggccactcatgggtggtcaggacaaacccttcctgtctgcccggcccagcactgtggtgcctcgaggaggacacgtggctcttcagtgtcactatcgtcgtgggtttaacaatttcatgctgtacaaagaagacagaagccacgttcccatcttccacggcagaatattccaggagagcttcatcatgggccctgtgaccccagcacatgcagggacctacagatgtcggggttcacgcccacactccctcactgggtggtcgacacccagcaaccccctggtgatcatggtcacag

SEQ ID NO: 146177 - DNA, 666 bp, Homo sapiens
  Payload ID: 8971
  Gene Symbol: KIR3DL2
  Gene Name: killer cell immunoglobulin-like receptor, three domains, long cytoplasmic tail, 2
  ENST ID: ENST00000612483
  CDS Start-End: 1-666
atgtcgctcactgtcgtcagcatggcgtgcgttgggttcttcttgctgcagggggcctggccactcatgggaaaccacagaaaaccttccctcctggcccacccagggcccctgctgaaatcaggagagacagtcatcctgcaatgttggtcagatgtcatgtttgagcacttctttctgcacagagaggggatctctgaggacccctcacgcctcgttggacagatccatgatggggtctccaaggccaacttctccatcggtcccttgatgcctgtccttgcaggaacctacagatgttatggttctgttcctcactccccctatcagttgtcagctcccagtgaccccctggacatcgtgatcacaggtctatatgagaaaccttctctctcagcccagccgggccccacggttcaggcaggagagaacgtgaccttgtcctgtagctcctggagctcctatgacatctaccatctgtccagggaaggggaggcccatgaacgtaggctccgtgcagtgcccaaggtcaacagaacattccaggcagactttcctctgggccctgccacccacggagggacctacagatgcttcggctctttccgtgccctgccctgcgtgtggtcaaactcaagtgacccactgcttgtttctgtcacaggt

SEQ ID NO: 146178 - DNA, 1662 bp, Homo sapiens; identical to SEQ ID NO: 146175
  Payload ID: 8971
  Gene Symbol: KIR3DL2
  Gene Name: killer cell immunoglobulin-like receptor, three domains, long cytoplasmic tail, 2
  ENST ID: ENST00000613891
  CDS Start-End: 34-1401

SEQ ID NO: 146179 - DNA, 1877 bp, Homo sapiens
  Payload ID: 8971
  Gene Symbol: KIR3DL2
  Gene Name: killer cell immunoglobulin-like receptor, three domains, long cytoplasmic tail, 2
  Uniprot ID: P43630
  ENST ID: ENST00000617666
  CDS Start-End: 34-1401
ggggcgcggcctcctgtctgcaccggcagcaccatgtcgctcactgtcgtcagcatggcgtgcgttgggttcttcttgctgcagggggcctggccactcatgggtggtcaggacaaacccttcctgtctgcccggcccagcactgtggtgcctcgaggaggacacgtggctcttcagtgtcactatcgtcgtgggtttaacaatttcatgctgtacaaagaagacagaagccacgttcccatcttccacggcagaatattccaggagagcttcatcatgggccctgtgaccccagcacatgcagggacctacagatgtcggggttcacgcccacactccctcactgggtggtcggcacccagcaaccccctggtgatcatggtcacaggaaaccacagaaaaccttccctcctggcccacccagggcccctgctgaaatcaggagagacagtcatcctgcaatgttggtcagatgtcatgtttgagcacttctttctgcacagagatgggatctctgaggacccctcacgcctcgttggacagatccatgatggggtctccaaggccaacttctccatcggtcccttgatgcctgtccttgcaggaacctacagatgttatggttctgttcctcactccccctatcagttgtcagctcccagtgaccccctggacatcgtgatcacaggtctatatgagaaaccttctctctcagcccagccgggccccacggttcaggcaggagagaacgtgaccttgtcctgtagctcctggagctcctatgacatctaccatctgtccagggaaggggaggcccatgaacgtaggctccgtgcagtgcccaaggtcaacagaacattccaggcagactttcctctgggccctgccacccacggagggacctacagatgcttcggctctttccgtgccctgccctgcgtgtggtcaaactcaagtgacccactgcttgtttctgtcacaggaaacccttcaagtagttggccttcacccacagaaccaagctccaaatctggtatctgcagacacctgcatgttctgattgggacctcagtggtcatcttcctcttcatcctcctcctcttctttctcctttatcgctggtgctccaacaaaaagaatgctgctgtaatggaccaagagcctgcgggggacagaacagtgaataggcaggactctgatgaacaagaccctcaggaggtgacgtacgcacagttggatcactgcgttttcatacagagaaaaatcagtcgcccttctcagaggcccaagacacccctaacagataccagcgtgtacacggaacttccaaatgctgagcccagatccaaagttgtctcctgcccacgagcaccacagtcaggtcttgagggggttttctagggagacaacagccctgtctcaaaaccaggttgccagatccaatgaaccagcagctggaatctgaaggcatcagtctgcatcttaggggatcgctcttcctcacaccacgaatctgaacatgcctctctcttgcttacaaatgcctaaggtcgccactgcctgctgcagagaaaacacactcctttgcttagcccacaagtatctatttcacttgacccctgcccacctctccaacctaactggcttacttcctagtcctacttgaggctgcaatcacactgaggaactcacaattccaaacatacaagaggctccctcttaacacggcacttacacacttgctgttccaccttccctcatgctgttccacctcccctcagactatctttcagccttctgtcatcagtaaaatttataaattttttttataacttcagtgtagctctctcctcttcaaataaacatgtctgccctca

SEQ ID NO: 146180 - DNA, 1834 bp, Homo sapiens
  Payload ID: 8971
  Gene Symbol: KIR3DL2
  Gene Name: killer cell immunoglobulin-like receptor, three domains, long cytoplasmic tail, 2
  Uniprot ID: P43630
  ENST ID: ENST00000617481
  CDS Start-End: 34-1350
ggggcgcggcctcctgtctgcaccggcagcaccatgtcgctcactgtcgtcagcatggcgtgcgttgggttcttcttgctgcagggggcctggccactcatgggtggtcaggacaaacccttcctgtctgcccggcccagcactgtggtgcctcgaggaggacacgtggctcttcagtgtcactatcgtcgtgggtttaacaatttcatgctgtacaaagaagacagaagccacgttcccatcttccacggcagaatattccaggagagcttcatcatgggccctgtgaccccagcacatgcagggacctacagatgtcggggttcacgcccacactccctcactgggtggtcggcacccagcaaccccctggtgatcatggtcacaggaaaccacagaaaaccttccctcctggcccacccagggcccctgctgaaatcaggagagacagtcatcctgcaatgttggtcagatgtcatgtttgagcacttctttctgcacagagaggggatctctgaggacccctcacgcctcgttggacagatccatgatggggtctccaaggccaacttctccatcggtcccttgatgcctgtccttgcaggaacctacagatgttatggttctgttcctcactccccctatcagttgtcagctcccagtgaccccctggacatcgtgatcacaggtctatatgagaaaccttctctctcagcccagccgggccccacggttcaggcaggagagaacgtgaccttgtcctgtagctcctggagctcctatgacatctaccatctgtccagggaaggggaggcccatgaacgtaggctccgtgcagtgcccaaggtcaacagaacattccaggcagactttcctctgggccctgccacccacggagggacctacagatgcttcggctctttccgtgccctgccctgcgtgtggtcaaactcaagtgacccactgcttgtttctgtcacaggtatctgcagacacctgcatgttctgattgggacctcagtggtcatcttcctcttcatcctcctcctcttctttctcctttatcgctggtgctccaacaaaaagaatgctgctgtaatggaccaagagcctgcgggggacagaacagtgaataggcaggactctgatgaacaagaccctcaggaggtgacgtacgcacagttggatcactgcgttttcatacagagaaaaatcagtcgcccttctcagaggcccaagacacccctaacagataccagcgtgtacacggaacttccaaatgctgagcccagatccaaagttgtctcctgcccacgagcaccacagtcaggtcttgagggggttttctagggagacaacagccctgtctcaaaaccaggttgccagatccaatgaaccagcagctggaatctgaaggcatcagtctgcatcttaggggatcgctcttcctcacaccacgaatctgaacatgcctctctcttgcttacaaatgcctaaggtcgccactgcctgctgcagagaaaacacactcctttgcttagcccacaagtatctatttcacttgacccctgcccacctctccaacctaactggcttacttcctagtcctacttgaggctgcaatcacactgaggaactcacaattccaaacatacaagaggctccctcttaacacggcacttacacacttgctgttccaccttccctcatgctgttccacctcccctcagactatctttcagccttctgtcatcagtaaaatttataaattttttttataacttcagtgtagctctctcctcttcaaataaacatgtctgccctcatggtttcg

SEQ ID NO: 146181 - DNA, 1834 bp, Homo sapiens; identical to SEQ ID NO: 146151
  Payload ID: 8971
  Gene Symbol: KIR3DL2
  Gene Name: killer cell immunoglobulin-like receptor, three domains, long cytoplasmic tail, 2
  ENST ID: ENST00000616505
  CDS Start-End: 34-1350

SEQ ID NO: 146182 - DNA, 1877 bp, Homo sapiens
  Payload ID: 8971
  Gene Symbol: KIR3DL2
  Gene Name: killer cell immunoglobulin-like receptor, three domains, long cytoplasmic tail, 2
  Uniprot ID: P43630
  ENST ID: ENST00000617957
  CDS Start-End: 34-1401
ggggcgcggcctcctgtctgcaccggcagcaccatgtcgctcactgtcgtcagcatggcgtgcgttgggttcttcttgctgcagggggcctggccactcatgggtggtcaggacaaacccttcctgtctgcccggcccagcactgtggtgcctcgaggaggacacgtggctcttcagtgtcactatcgtcgtgggtttaacaatttcatgctgtacaaagaagacagaagccacgttcccatcttccacggcagaatattccaggagagcttcatcatgggccctgtgaccccagcacatgcagggacctacagatgtcggggttcacgcccacactccctcactgggtggtcggcacccagcaaccccctggtgatcatggtcacaggaaaccacagaaaaccttccctcctggcccacccagggcccctgctgaaatcaggagagacagtcatcctgcaatgttggtcagatgtcatgtttgagcacttctttctgcacagagaggggatctctgaggacccctcacgcctcgttggacagatccatgatggggtctccaaggccaacttctccatcggtcccttgatgcctgtccttgcaggaacctacagatgttatggttctgttcctcactccccctatcagttgtcagctcccagtgaccccctggacatcgtgatcacaggtctatatgagaaaccttctctctcagcccagccgggccccacggttcaggcaggagagaacgtgaccttgtcctgtagctcctggagctcctatgacatctaccatctgtccagggaaggggaggcccatgaacgtaggctccgtgcagtgcccaaggtcaacagaacattccaggcagactttcctctgggccctgccacccacggagggacctacagatgcttcggctctttccgtgccctgccctgcgtgtggtcaaactcaagtgacccactgcttgtttctgtcacaggaaacccttcaagtagttggccttcacccacagaaccaagctccaaatctggtatctgcagacacctgcatgttctgattgggacctcagtggtcatcttcctcttcatcctcctcctcttctttctcctttatcgctggtgctccaacaaaaagaatgctgctgtaatggaccaagagcctgcgggggacagaacagtgaataggcaggactctgatgaacaagaccctcaggaggtgacgtacgcacagttggatcactgcgttttcatacagagaaaaatcagtcgcccttctcagaggcccaagacacccctaacagataccagcgtgtacacggaacttccaaatgctgagcccagatccaaagttgtctcctgcccacgagcaccacagtcaggtcttgagggggttttctagggagacaacagccctgtctcaaaaccaggttgccagatccaatgaaccagcagctggaatctgaaggcatcagtctgcatcttaggggatcgctcttcctcacaccacgaatctgaacatgcctctctcttgcttacaaatgcctaaggtcgccactgcctgctgcagagaaaacacactcctttgcttagcccacaagtatctatttcacttgacccctgcccacctctccaacctaactggcttacttcctagtcctacttgaggctgcaatcacactgaggaactcacaattccaaacatacaagaggctccctcttaacacggcacttacacacttgctgttccaccttccctcatgctgttccacctcccctcagactatctttcagccttctgtcatcagtaaaatttataaattttttttataacttcagtgtagctctctcctcttcaaataaacatgtctgccctca

SEQ ID NO: 146183 - DNA, 1874 bp, Homo sapiens
  Payload ID: 8971
  Gene Symbol: KIR3DL2
  Gene Name: killer cell immunoglobulin-like receptor, three domains, long cytoplasmic tail, 2
  Uniprot ID: P43630
  ENST ID: ENST00000611628
  CDS Start-End: 31-1398
gcgcggcctcctgtctgcaccggcagcaccatgtcgctcacggtcgtcagcatggcgtgcgttgggttcttcttgctgcagggggcctggccactcatgggtggtcaggacaaacccttcctgtctgcccggcccagcactgtggtgcctcgaggaggacacgtggctcttcagtgtcactatcgtcgtgggtttaacaatttcatgctgtacaaagaagacagaagccacgttcccatcttccacggcagaatattccaggagagcttcatcatgggccctgtgaccccagcacatgcagggacctacagatgtcggggttcacgcccacactccctcactgggtggtcggcacccagcaaccccctggtgatcatggtcacaggaaaccacagaaaaccttccctcctggcccacccagggcccctgctgaaatcaggagagacagtcatcctgcaatgttggtcagatgtcatgtttgagcacttctttctgcacagagatgggatctctgaggacccctcacgcctcgttggacagatccatgatggggtctccaaggccaacttctccatcggtcccttgatgcctgtccttgcaggaacctacagatgttatggttctgttcctcactccccctatcagttgtcagctcccagtgaccccctggacatcgtgatcacaggtctatatgagaaaccttctctctcagcccagccgggccccacggttcaggcaggagagaacgtgaccttgtcctgtagctcctggagctcctatgacatctaccatctgtccagggaaggggaggcccatgaacgtaggctccgtgcagtgcccaaggtcaacagaacattccaggcagactttcctctgggccctgccacccacggagggacctacagatgcttcggctctttccgtgccctgccctgcgtgtggtcaaactcaagtgacccactgcttgtttctgtcacaggaaacccttcaagtagttggccttcacccacagaaccaagctccaaatctggtatctgcagacacctgcatgttctgattgggacctcagtggtcatcttcctcttcatcctcctcctcttctttctcctttatcgctggtgctccaacaaaaagaatgctgctgtaatggaccaagagcctgcgggggacagaacagtgaataggcaggactctgatgaacaagaccctcaggaggtgacgtacgcacagttggatcactgcgttttcatacagagaaaaatcagtcgcccttctcagaggcccaagacacccctaacagataccagcgtgtacacggaacttccaaatgctgagcccagatccaaagttgtctcctgcccacgagcaccacagtcaggtcttgagggggttttctagggagacaacagccctgtctcaaaaccaggttgccagatccaatgaaccagcagctggaatctgaaggcatcagtctgcatcttaggggatcgctcttcctcacaccacgaatctgaacatgcctctctcttgcttacaaatgcctaaggtcgccactgcctgctgcagagaaaacacactcctttgcttagcccacaagtatctatttcacttgacccctgcccacctctccaacctaactggcttacttcctagtcctacttgaggctgcaatcacactgaggaactcacaattccaaacatacaagaggctccctcttaacacggcacttacacacttgctgttccaccttccctcatgctgttccacctcccctcagactatctttcagccttctgtcatcagtaaaatttataaattttttttataacttcagtgtagctctctcctcttcaaataaacatgtctgccctca

SEQ ID NO: 146184 - DNA, 1834 bp, Homo sapiens
  Payload ID: 8971
  Gene Symbol: KIR3DL2
  Gene Name: killer cell immunoglobulin-like receptor, three domains, long cytoplasmic tail, 2
  ENST ID: ENST00000617684
  CDS Start-End: 34-1350
ggggcgcggcctcctgtctgcaccggcagcaccatgtcgctcactgtcgtcagcatggcgtgcgttgggttcttcttgctgcagggggcctggccactcatgggtggtcaggacaaacccttcctgtctgcccggcccagcactgtggtgcctcgaggaggacacgtggctcttcagtgtcactatcgtcgtgggtttaacaatttcatgctgtacaaagaagacagaagccacgttcccatcttccacggcagaatattccaggagagcttcatcatgggccctgtgaccccagcacatgcagggacctacagatgtcggggttcacgcccacactccctcactgggtggtcgacacccagcaaccccctggtgatcatggtcacaggaaaccacagaaaaccttccctcctggcccacccagggcccctgctgaaatcaggagagacagtcatcctgcaatgttggtcagatgtcatgtttgagcacttctttctgcacagagaggggatctctgaggacccctcacgcctcgttggacagatccatgatggggtctccaaggccaacttctccatcggtcccttgatgcctgtccttgcaggaacctacagatgttatggttctgttcctcactccccctatcagttgtcagctcccagtgaccccctggacatcgtgatcacaggtctatatgagaaaccttctctctcagcccagccgggccccacggttcaggcaggagagaacgtgaccttgtcctgtagctcctggagctcctatgacatctaccatctgtccagggaaggggaggcccatgaacgtaggctccgtgcagtgcccaaggtcaacagaacattccaggcagactttcctctgggccctgccacccacggagggacctacagatgcttcggctctttccgtgacctgccctgcgtgtggtcaaactcaagtgacccactgcttgtttctgtcacaggtatctgcagacacctgcatgttctgattgggacctcagtggtcatcttcctcttcatcctcctcctcttctttctcctttatcgctggtgctccaacaaaaagaatgctgctgtaatggaccaagagcctgcgggggacagaacagtgaataggcaggactctgatgaacaagaccctcaggaggtgatgtacgcacagttggatcactgcgttttcatacagagaaaaatcagtcgcccttctcagaggcccaagacacccctaacagataccagcgtgtacacggaacttccaaatgctgagcccagatccaaagttgtctcctgcccacgagcaccacagtcaggtcttgagggggttttctagggagacaacagccctgtctcaaaaccaggttgccagatccaatgaaccagcagctggaatctgaaggcatcagtctgcatcttaggggatcgctcttcctcacaccacgaatctgaacatgcctctctcttgcttacaaatgcctaaggtcgccactgcctgctgcagagaaaacacactcctttgcttagcccacaagtatctatttcacttgacccctgcccacctctccaacctaactggcttacttcctagtcctacttgaggctgcaatcacactgaggaactcacaattccaaacatgcaagaggctccctcttaacacggcacttacacacttgctgttccaccttccctcatgctgttccacctcccctcagactatctttcagccttctgtcatcagtaaaatttataaattttttttataacttcagtgtagctctctcctcttcaaataaacatgtctgccctcatggtttcg

SEQ ID NO: 146185 - DNA, 1834 bp, Homo sapiens; identical to SEQ ID NO: 146154
  Payload ID: 8971
  Gene Symbol: KIR3DL2
  Gene Name: killer cell immunoglobulin-like receptor, three domains, long cytoplasmic tail, 2
  ENST ID: ENST00000612166
  CDS Start-End: 34-1350

SEQ ID NO: 146186 - DNA, 1834 bp, Homo sapiens; identical to SEQ ID NO: 146180
  Payload ID: 8971
  Gene Symbol: KIR3DL2
  Gene Name: killer cell immunoglobulin-like receptor, three domains, long cytoplasmic tail, 2
  Uniprot ID: P43630
  ENST ID: ENST00000618273
  CDS Start-End: 34-1350

SEQ ID NO: 146187 - DNA, 1874 bp, Homo sapiens
  Payload ID: 8971
  Gene Symbol: KIR3DL2
  Gene Name: killer cell immunoglobulin-like receptor, three domains, long cytoplasmic tail, 2
  ENST ID: ENST00000621701
  CDS Start-End: 31-1398
gcgcggcctcctgtctgcaccggcagcaccatgtcgctcacggtcgtcagcatggcgtgcgttgggttcttcttgctgcagggggcctggccactcatgggtggtcaggacaaacccttcctgtctgcccggcccagcactgtggtgcctcgaggaggacacgtggctcttcagtgtcactatcgtcgtgggtttaacaatttcatgctgtacaaagaagacagaagccacgttcccatcttccacggcagaatattccaggagagcttcatcatgggccctgtgaccccagcacatgcagggacctacagatgtcggggttcacgcccacactccctcactgggtggtcggcacccagcaaccccctggtgatcatggtcacaggaaaccacagaaaaccttccctcctggcccacccagggcccctgctgaaatcaggagagacagtcatcctgcaatgttggtcagatgtcatgtttgagcatttctttctgcacagagaggggatctctgaggacccctcacgcctcgttggacagatccatgatggggtctccaaggccaacttctccatcggtcccttgatgcctgtccttgcaggaacctacagatgttatggttctgttcctcactccccctatcagttgtcagctcccagtgaccccctggacatcgtgatcacaggtctatatgagaaaccttctctctcagcccagccgggccccacggttcaggcaggagagaacgtgaccttgtcctgtagctcctggagctcctatgacatctaccatctgtccagggaaggggaggcccatgaacgtaggctccgtgcagtgcccaaggtcaacagaacattccaggcagactttcctctgggccctgccacccacggagggacctacagatgcttcggctctttccatgccctgccctgcgtgtggtcaaactcaagtgacccactgcttgtttctgtcacaggaaacccttcaagtagttggccttcacccacagaaccaagctccaaatctggtatctgcagacacctgcatgttctgattgggacctcagtggtcatcttcctcttcatcctcctcctcttctttctcctttatcgctggtgctccaacaaaaagaatgctgctgtaatggaccaagagcctgcgggggacagaacagtgaataggcaggactctgatgaacaagaccctcaggaggtgacgtacgcacagttggatcactgcgttttcatacagagaaaaatcagtcgcccttctcagaggcccaagacacccctaacagataccagcgtgtacacggaacttccaaatgctgagcccagatccaaagttgtctcctgcccacgagcaccacagtcaggtcttgagggggttttctagggagacaacagccctgtctcaaaaccaggttgccagatccaatgaaccagcagctggaatctgaaggcatcagtctgcatcttaggggatcgctcttcctcacaccacgaatctgaacatgcctctctcttgcttacaaatgcctaaggtcgccactgcctgctgcagagaaaacacactcctttgcttagcccacaagtatctatttcacttgacccctgcccacctctccaacctaactggcttacttcctagtcctacttgaggctgcaatcacactgaggaactcacaattccaaacatacaagaggctccctcttaacacggcacttacacacttgctgttccaccttccctcatgctgttccacctcccctcagactatctttcagccttctgtcatcagtaaaatttataaattttttttataacttcagtgtagctctctcctcttcaaataaacatgtctgccctca

SEQ ID NO: 146188 - DNA, 1662 bp, Homo sapiens
  Payload ID: 8971
  Gene Symbol: KIR3DL2
  Gene Name: killer cell immunoglobulin-like receptor, three domains, long cytoplasmic tail, 2
  Uniprot ID: P43630
  ENST ID: ENST00000617354
  CDS Start-End: 34-1401
ggggcgcggcctcctgtctgcaccggcagcaccatgtcgctcacggtcgtcagcatggcgtgcgttgggttcttcttgctgcagggggcctggccactcatgggtggtcaggacaaacccttcctgtctgcccggcccagcactgtggtgcctcgaggaggacacgtggctcttcagtgtcactatcgtcgtgggtttaacaatttcatgctgtacaaagaagacagaagccacgttcccatcttccacggcagaatattccaggagagcttcatcatgggccctgtgaccccagcacatgcagggacctacagatgtcggggttcacgcccacactccctcactgggtggtcggcacccagcaaccccctggtgatcatggtcacaggaaaccacagaaaaccttccctcctggcccacccagggcccctgctgaaatcaggagagacagtcatcctgcaatgttggtcagatgtcatgtttgagcacttctttctgcacagagaggggatctctgaggacccctcacgcctcgttggacagatccatgatggggtctccaaggccaacttctccatcggtcccttgatgcctgtccttgcaggaacctacagatgttatggttctgttcctcactccccctatcagttgtcagctcccagtgaccccctggacatcgtgatcacaggtctatatgagaaaccttctctctcagcccagccgggccccacggttcaggcaggagagaacgtgaccttgtcctgtagctcctggagctcctatgacatctaccatctgtccagggaaggggaggcccatgaacgtaggctccgtgcagtgcccaaggtcaacagaacattccaggcagactttcctctgggccctgccacccacggagggacctacagatgcttcggctctttccgtgccctgccctgcgtgtggtcaaactcaagtgacccactgcttgtttctgtcacaggaaacccttcaagtagttggccttcacccacagaaccaagctccaaatctggtatctgcagacacctgcatgttctgattgggacctcagtggtcatcttcctcttcatcctcctcctcttctttctcctttatcgctggtgctccaacaaaaagaatgctgctgtaatggaccaagagcctgcgggggacagaacagtgaataggcaggactctgatgaacaagaccctcaggaggtgacgtacgcacagttggatcactgcgttttcatacagagaaaaatcagtcgcccttctcagaggcccaagacacccctaacagataccagcgtgtacacggaacttccaaatgctgagcccagatccaaagttgtctcctgcccacgagcaccacagtcaggtcttgagggggttttctagggagacaacagccctgtctcaaaaccaggttgccagatccaatgaaccagcagctggaatctgaaggcatcagtctgcatcttaggggatcgctcttcctcacaccacgaatctgaacatgcctctctcttgcttacaaatgcctaaggtcgccactgcctgctgcagagaaaacacactcctttgcttagcccacaagtatctatttcacttgacccctgcccacctctccaacctaactggcttacttcctagtcctac

SEQ ID NO: 146189 - DNA, 1863 bp, Homo sapiens; identical to SEQ ID NO: 146146
  Payload ID: 8971
  Gene Symbol: KIR3DL2
  Gene Name: killer cell immunoglobulin-like receptor, three domains, long cytoplasmic tail, 2
  Uniprot ID: P43630
  ENST ID: ENST00000613610
  CDS Start-End: 20-1387

SEQ ID NO: 146190 - DNA, 1670 bp, Homo sapiens
  Payload ID: 8971
  Gene Symbol: KIR3DL2
  Gene Name: killer cell immunoglobulin-like receptor, three domains, long cytoplasmic tail, 2
  Uniprot ID: P43630
  ENST ID: ENST00000613612
  CDS Start-End: 13-1380
accggcagcaccatgtcgctcactgtcgtcagcatggcgtgcgttgggttcttcttgctgcagggggcctggccactcatgggtggtcaggacaaacccttcctgtctgcccggcccagcactgtggtgcctcgaggaggacacgtggctcttcagtgtcactatcgtcgtgggtttaacaatttcatgctgtacaaagaagacagaagccacgttcccatcttccacggcagaatattccaggagagcttcatcatgggccctgtgaccccagcacatgcagggacctacagatgtcggggttcacgcccacactccctcactgggtggtcggcacccagcaaccccctggtgatcatggtcacaggaaaccacagaaaaccttccctcctggcccacccagggcccctgctgaaatcaggagagacagtcatcctgcaatgttggtcagatgtcatgtttgagcacttctttctgcacagagatgggatctctgaggacccctcacgcctcgttggacagatccatgatggggtctccaaggccaacttctccatcggtcccttgatgcctgtccttgcaggaacctacagatgttatggttctgttcctcactccccctatcagttgtcagctcccagtgaccccctggacatcgtgatcacaggtctatatgagaaaccttctctctcagcccagccgggccccacggttcaggcaggagagaacgtgaccttgtcctgtagctcctggagctcctatgacatctaccatctgtccagggaaggggaggcccatgaacgtaggctccgtgcagtgcccaaggtcaacagaacattccaggcagactttcctctgggccctgccacccacggagggacctacagatgcttcggctctttccgtgccctgccctgcgtgtggtcaaactcaagtgacccactgcttgtttctgtcacaggaaacccttcaagtagttggccttcacccacagaaccaagctccaaatctggtatctgcagacacctgcatgttctgattgggacctcagtggtcatcttcctcttcatcctcctcctcttctttctcctttatcgctggtgctccaacaaaaagaatgctgctgtaatggaccaagagcctgcgggggacagaacagtgaataggcaggactctgatgaacaagaccctcaggaggtgacgtacgcacagttggatcactgcgttttcatacagagaaaaatcagtcgcccttctcagaggcccaagacacccctaacagataccagcgtgtacacggaacttccaaatgctgagcccagatccaaagttgtctcctgcccacgagcaccacagtcaggtcttgagggggttttctagggagacaacagccctgtctcaaaaccaggttgccagatccaatgaaccagcagctggaatctgaaggcatcagtctgcatcttaggggatcgctcttcctcacaccacgaatctgaacatgcctctctcttgcttacaaatgcctaaggtcgccactgcctgctgcagagaaaacacactcctttgcttagcccacaagtatctatttcacttgacccctgcccacctctccaacctaactggcttacttcctagtcctacttgaggctgcaatcacactgaggaactca

SEQ ID NO: 146191 - DNA, 1834 bp, Homo sapiens; identical to SEQ ID NO: 146172
  Payload ID: 8971
  Gene Symbol: KIR3DL2
  Gene Name: killer cell immunoglobulin-like receptor, three domains, long cytoplasmic tail, 2
  Uniprot ID: P43630
  ENST ID: ENST00000612138
  CDS Start-End: 34-1350

SEQ ID NO: 146192 - DNA, 1546 bp, Homo sapiens
  Payload ID: 8971
  Gene Symbol: KIR3DL2
  Gene Name: killer cell immunoglobulin-like receptor, three domains, long cytoplasmic tail, 2
  Uniprot ID: P43630
  ENST ID: ENST00000622579
  CDS Start-End: 1-1317
atgtcgctcactgtcgtcagcatggcgtgcgttgggttcttcttgctgcagggggcctggccactcatgggtggtcaggacaaacccttcctgtctgcccggcccagcactgtggtgcctcgaggaggacacgtggctcttcagtgtcactatcgtcgtgggtttaacaatttcatgctgtacaaagaagacagaagccacgttcccatcttccacggcagaatattccaggagagcttcatcatgggccctgtgaccccagcacatgcagggacctacagatgtcggggttcacgcccacactccctcactgggtggtcggcacccagcaaccccctggtgatcatggtcacaggaaaccacagaaaaccttccctcctggcccacccagggcccctgctgaaatcaggagagacagtcatcctgcaatgttggtcagatgtcatgtttgagcacttctttctgcacagagaggggatctctgaggacccctcacgcctcgttggacagatccatgatggggtctccaaggccaacttctccatcggtcccttgatgcctgtccttgcaggaacctacagatgttatggttctgttcctcactccccctatcagttgtcagctcccagtgaccccctggacatcgtgatcacaggtctatatgagaaaccttctctctcagcccagccgggccccacggttcaggcaggagagaacgtgaccttgtcctgtagctcctggagctcctatgacatctaccatctgtccagggaaggggaggcccatgaacgtaggctccgtgcagtgcccaaggtcaacagaacattccaggcagactttcctctgggccctgccacccacggagggacctacagatgcttcggctctttccgtgccctgccctgcgtgtggtcaaactcaagtgacccactgcttgtttctgtcacaggtatctgcagacacctgcatgttctgattgggacctcagtggtcatcttcctcttcatcctcctcctcttctttctcctttatcgctggtgctccaacaaaaagaatgctgctgtaatggaccaagagcctgcgggggacagaacagtgaataggcaggactctgatgaacaagaccctcaggaggtgacgtacgcacagttggatcactgcgttttcatacagagaaaaatcagtcgcccttctcagaggcccaagacacccctaacagataccagcgtgtacacggaacttccaaatgctgagcccagatccaaagttgtctcctgcccacgagcaccacagtcaggtcttgagggggttttctagggagacaacagccctgtctcaaaaccaggttgccagatccaatgaaccagcagctggaatctgaaggcatcagtctgcatcttaggggatcgctcttcctcacaccacgaatctgaacatgcctctctcttgcttacaaatgcctaaggtcgccactgcctgctgcagagaaaacacactcctttgcttagcccacaagtatctatttcacttgacccctgcccacctc

SEQ ID NO: 146193 - DNA, 1033 bp, Homo sapiens
  Payload ID: 8971
  Gene Symbol: KIR3DL2
  Gene Name: killer cell immunoglobulin-like receptor, three domains, long cytoplasmic tail, 2
  ENST ID: ENST00000620501
  CDS Start-End: 34-1033
ggggcgcggcctcctgtctgcaccggcagcaccatgtcgctcactgtcgtcagcatggcgtgcgttgggttcttcttgctgcagggggcctggccactcatgggtggtcaggacaaacccttcctgtctgcccggcccagcactgtggtgcctcgaggaggacacgtggctcttcagtgtcactatcgtcgtgggtttaacaatttcatgctgtacaaagaagacagaagccacgttcccatcttccacggcagaatattccaggagagcttcatcatgggccctgtgaccccagcacatgcagggacctacagatgtcggggttcacgcccacactccctcactgggtggtcgacacccagcaaccccctggtgatcatggtcacaggaaaccacagaaaaccttccctcctggcccacccagggcccctgctgaaatcaggagagacagtcatcctgcaatgttggtcagatgtcatgtttgagcacttctttctgcacagagaggggatctctgaggacccctcacgcctcgttggacagatccatgatggggtctccaaggccaacttctccatcggtcccttgatgcctgtccttgcaggaacctacagatgttatggttctgttcctcactccccctatcagttgtcagctcccagtgaccccctggacatcgtgatcacaggtctatatgagaaaccttctctctcagcccagccgggccccacggttcaggcaggagagaacgtgaccttgtcctgtagctcctggagctcctatgacatctaccatctgtccagggaaggggaggcccatgaacgtaggctccgtgcagtgcccaaggtcaacagaacattccaggcagactttcctctgggccctgccacccacggagggacctacagatgcttcggctctttccgtgccctgccctgcgtgtggtcaaactcaagtgacccactgcttgtttctgtcacaggaaacccttcaagtagttggccttcacccacagaaccaagctccaaatctg

SEQ ID NO: 146194 - DNA, 1834 bp, Homo sapiens
  Payload ID: 8971
  Gene Symbol: KIR3DL2
  Gene Name: killer cell immunoglobulin-like receptor, three domains, long cytoplasmic tail, 2
  ENST ID: ENST00000613109
  CDS Start-End: 34-1350
ggggcgcggcctcctgtctgcaccggcagcaccatgtcgctcactgtcgtcagcatggcgtgcgttgggttcttcttgctgcagggggcctggccactcatgggtggtcaggacaaacccttcctgtctgcccggcccagcactgtggtgcctcgaggaggacacgtggctcttcagtgtcactatcgtcgtgggtttaacaatttcatgctgtacaaagaagacagaagccacgttcccatcttccacggcagaatattccaggagagcttcatcatgggccctgtgaccccagcacatgcagggacctacagatgtcggggttcacgcccacactccctcactgggtggtcggcacccagcaaccccctggtgatcatggtcacaggaaaccacagaaaaccttccctcctggcccacccagggcccctgctgaaatcaggagagacagtcatcctgcaatgttggtcagatgtcatgtttgagcacttctttctgcacagagaggggatctctgaggacccctcacacctcgttggacagatccatgatggggtctccaaggccaacttctccatcggtcccttgatgcctgtccttgcaggaacctacagatgttatggttctgttcctcactccccctatcagttgtcagctcccagtgaccccctggacatcgtgatcacaggtctatatgagaaaccttctctctcagcccagccgggccccacggttcaggcaggagagaacgtgaccttgtcctgtagctcctggagctcctatgacatctaccatctgtccagggaaggggaggcccatgaacgtaggctccgtgcagtgcccaaggtcaacagaacattccaggcagactttcctctgggccctgccacccacggagggacctacagatgcttcggctctttccgtgccctgccctgcgtgtggtcaaactcaagtgacccactgcttgtttctgtcacaggtatctgcagacacctgcatgttctgattgggacctcagtggtcatcttcctcttcatcctcctcctcttctttctcctttatcgctggtgctccaacaaaaagaatgctgctgtaatggaccaagagcctgcgggggacagaacagtgaataggcaggactctgatgaacaagaccctcaggaggtgacgtacgcacagttggatcactgcgttttcatacagagaaaaatcagtcgcccttctcagaggcccaagacacccctaacagataccagcgtgtacacggaacttccaaatgctgagcccagatccaaagttgtctcctgcccacgagcaccacagtcaggtcttgagggggttttctagggagacaacagccctgtctcaaaaccaggttgccagatccaatgaaccagcagctggaatctgaaggcatcagtctgcatcttaggggatcgctcttcctcacaccacgaatctgaacatgcctctctcttgcttacaaatgcctaaggtcgccactgcctgctgcagagaaaacacactcctttgcttagcccacaagtatctatttcacttgacccctgcccacctctccaacctaactggcttacttcctagtcctacttgaggctgcaatcacactgaggaactcacaattccaaacatgcaagaggctccctcttaacacggcacttacacacttgctgttccaccttccctcatgctgttccacctcccctcagactatctttcagccttctgtcatcagtaaaatttataaattttttttataacttcagtgtagctctctcctcttcaaataaacatgtctgccctcatggtttcg

SEQ ID NO: 146195 - DNA, 1874 bp, Homo sapiens
  Payload ID: 8971
  Gene Symbol: KIR3DL2
  Gene Name: killer cell immunoglobulin-like receptor, three domains, long cytoplasmic tail, 2
  ENST ID: ENST00000620485
  CDS Start-End: 31-1398
gcgcggcctcctgtctgcaccggcagcaccatgtcgctcactgtcgtcagcatggcgtgcgttgggttcttcttgctgcagggggcctggccactcatgggtggtcaggacaaacccttcctgtctgcccggcccagcactgtggtgcctcgaggaggacacgtggctcttcagtgtcactatcgtcgtgggtttaacaatttcatgctgtacaaagaagacagaagccacgttcccatcttccacggcagaatattccaggagagcttcatcatgggccctgtgaccccagcacatgcagggacctacagatgtcggggttcacgcccacactccctcactgggtggtcgacacccagcaaccccctggtgatcatggtcacaggaaaccacagaaaaccttccctcctggcccacccagggcccctgctgaaatcaggagagacagtcatcctgcaatgttggtcagatgtcatgtttgagcacttctttctgcacagagaggggatctctgaggacccctcacgcctcgttggacagatccatgatggggtctccaaggccaacttctccatcggtcccttgatgcctgtccttgcaggaacctacagatgttatggttctgttcctcactccccctatcagttgtcagctcccagtgaccccctggacatcgtgatcacaggtctatatgagaaaccttctctctcagcccagccgggccccacggttcaggcaggagagaacgtgaccttgtcctgtagctcctggagctcctatgacatctaccatctgtccagggaaggggaggcccatgaacgtaggctccgtgcagtgcccaaggtcaacagaacattccaggcagactttcctctgggccctgccacccacggagggacctacagatgcttcggctctttccgtgccctgccctgcgtgtggtcaaactcaagtgacccactgcttgtttctgtcacaggaaacccttcaagtagttggccttcacccacagaaccaagctccaaatctggtatctgcagacacctgcatgttctgattgggacctcagtggtcatcttcctcttcatcctcctcctcttctttctcctttatcgctggtgctccaacaaaaagaatgctgctgtaatggaccaagagcctgcgggggacagaacagtgaataggcaggactctgatgaacaagaccctcaggaggtgatgtacgcacagttggatcactgcgttttcatacagagaaaaatcagtcgcccttctcagaggcccaagacacccctaacagataccagcgtgtacacggaacttccaaatgctgagcccagatccaaagttgtctcctgcccacgagcaccacagtcaggtcttgagggggttttctagggagacaacagccctgtctcaaaaccaggttgccagatccaatgaaccagcagctggaatctgaaggcatcagtctgcatcttaggggatcgctcttcctcacaccacgaatctgaacatgcctctctcttgcttacaaatgcctaaggtcgccactgcctgctgcagagaaaacacactcctttgcttagcccacaagtatctatttcacttgacccctgcccacctctccaacctaactggcttacttcctagtcctacttgaggctgcaatcacactgaggaactcacaattccaaacatgcaagaggctccctcttaacacggcacttacacacttgctgttccaccttccctcatgctgttccacctcccctcagactatctttcagccttctgtcatcagtaaaatttataaattttttttataacttcagtgtagctctctcctcttcaaataaacatgtctgccctca

SEQ ID NO: 146196 - DNA, 1546 bp, Homo sapiens
  Payload ID: 8971
  Gene Symbol: KIR3DL2
  Gene Name: killer cell immunoglobulin-like receptor, three domains, long cytoplasmic tail, 2
  ENST ID: ENST00000616961
  CDS Start-End: 1-1317
atgtcgctcactgtcgtcagcatggcgtgcgttgggttcttcttgctgcagggggcctggccactcatgggtggtcaggacaaacccttcctgtctgcccggcccagcactgtggtgcctcaaggaggacacgtggctcttcagtgtcactatcgtcgtgggtttaacaatttcatgctgtacaaagaagacagaagccacgttcccatcttccacggcagaatattccaggagagcttcatcatgggccctgtgaccccagcacatgcagggacctacagatgtcggggttcacgcccacactccctcactgggtggtcggcacccagcaaccccctggtgatcatggtcacaggaaaccacagaaaaccttccctcctggcccacccagggaccctgctgaaatcaggagagacagtcatcctgcaatgttggtcagatgtcatgtttgagcacttctttctgcacagagaggggatctctgaggacccctcacgcctcgttggacagatccatgatggggtctccaaggccaacttctccatcggtcccttgatgcctgtccttgcaggaacctacagatgttatggttctgttcctcactccccctatcagttgtcagctcccagtgaccccctggacatcgtgatcacaggtctatatgagaaaccttctctctcagcccagccgggccccacggttcaggcaggagagaacgtgaccttgtcctgtagctcctggagctcctatgacatctaccatctgtccagggaaggggaggcccatgaacgtaggctccgtgcagtgcccaaggtcaacagaacattccaggcagactttcctctgggccctgccacccacggagggacctacagatgcttcggctctttccgtgccctgccctgcgtgtggtcaaactcaagtgacccactgcttgtttctgtcacaggtatctgcagacacctgcatgttctgattgggacctcagtggtcatcttcctcttcatcctcctcctcttctttctcctttatcgctggtgctccaacaaaaagaatgctgctgtaatggaccaagagcctgcgggggacagaacagtgaataggcaggactctgatgaacaagaccctcaggaggtgacgtacgcacagttggatcactgcgttttcatacagagaaaaatcagtcgcccttctcagaggcccaagacacccccaacagataccagcgtgtacacggaacttccaaatgctgagcccagatccaaagttgtctcctgcccacgagcaccacagtcaggtcttgagggggttttctagggagacaacagccctgtctcaaaaccaggttgccagctcccatgaaccagcagctggaatctgaaggcgtcagtcttcatcttagggcattgctcttcctcacaccactaatctgaacatgcctctctcttgcttacaaatgtctaaggtccccactgcctgctggagagaaaacacactcctttgcttagcccacaattctccatttcacttgacccctgcccacctc

SEQ ID NO: 146197 - DNA, 1864 bp, Homo sapiens
  Payload ID: 8971
  Gene Symbol: KIR3DL2
  Gene Name: killer cell immunoglobulin-like receptor, three domains, long cytoplasmic tail, 2
  ENST ID: ENST00000610296
  CDS Start-End: 13-1380
accggcagcaccatgtcgctcactgtcgtcagcatggcgtgcgttgggttcttcttgctgcagggggcctggccactcatgggtggtcaggacaaacccttcctgtctgcccggcccagcactgtggtgcctcgaggaggacacgtggctcttcagtgtcactatcgtcgtgggtttaacaatttcatgctgtacaaagaagacagaagccacgttcccatcttccacggcagaatattccaggagagcttcatcatgggccctgtgaccccagcacatgcagggacctacagatgtcggggttcacgcccacactccctcactgggtggtcgacacccagcaaccccctggtgatcatggtcacaggaaaccacagaaaaccttccctcctggcccacccagggcccctgctgaaatcaggagagacagtcatcctgcaatgttggtcagatgtcatgtttgagcacttctttctgcacagagaggggatctctgaggacccctcacgcctcgttggacagatccatgatggggtctccaaggccaacttctccatcggtcccttgatgcctgtccttgcaggaacctacagatgttatggttctgttcctcactccccctatcagttgtcagctcccagtgaccccctggacatcgtgatcacaggtctatatgagaaaccttctctctcagcccagccgggccccacggttcaggcaggagagaacgtgaccttgtcctgtagctcctggagctcctatgacatctaccatctgtccagggaaggggaggcccatgaacgtaggctccgtgcagtgcccaaggtcaacagaacattccaggcagactttcctctgggccctgccacccacggagggacctacagatgcttcggctctttccgtgccctgccctgcgtgtggtcaaactcaagtgacccactgcttgtttctgtcacaggaaacccttcaagtagttggccttcacccacagaaccaagctccaaatctggtatctgcagacacctgcatgttctgattgggacctcagtggtcatcttcctcttcatcctcctcctcttctttctcctttatcgctggtgctccaacaaaaagaatgctgctgtaatggaccaagagcctgcgggggacagaacagtgaataggcaggactctgatgaacaagaccctcaggaggtgatgtacgcacagttggatcactgcgttttcatacagagaaaaatcagtcgcccttctcagaggcccaagacacccctaacagataccagcgtgtacacggaacttccaaatgctgagcccagatccaaagttgtctcctgcccacgagcaccacagtcaggtcttgagggggttttctagggagacaacagccctgtctcaaaaccaggttgccagatccaatgaaccagcagctggaatctgaaggcatcagtctgcatcttaggggatcgctcttcctcacaccacgaatctgaacatgcctctctcttgcttacaaatgcctaaggtcgccactgcctgctgcagagaaaacacactcctttgcttagcccacaagtatctatttcacttgacccctgcccacctctccaacctaactggcttacttcctagtcctacttgaggctgcaatcacactgaggaactcacaattccaaacatgcaagaggctccctcttaacacggcacttacacacttgctgttccaccttccctcatgctgttccacctcccctcagactatctttcagccttctgtcatcagtaaaatttataaattttttttataacttcagtgtagctctctcctcttcaaataaacatgtctgccctcatggtttcg

SEQ ID NO: 146198 - DNA, 1874 bp, Homo sapiens
  Payload ID: 8971
  Gene Symbol: KIR3DL2
  Gene Name: killer cell immunoglobulin-like receptor, three domains, long cytoplasmic tail, 2
  ENST ID: ENST00000615147
  CDS Start-End: 31-1398
gcgcggcctcctgtctgcaccggcagcaccatgtcgctcactgtcgtcagcatggcgtgcgttgggttcttcttgctgcagggggcctggccactcatgggtggtcaggacaaacccttcctgtctgcccggcccagcactgtggtgcctcaaggaggacacgtggctcttcagtgtcactatcgtcgtgggtttaacaatttcatgctgtacaaagaagacagaagccacgttcccatcttccacggcagaatattccaggagagcttcatcatgggccctgtgaccccagcacatgcagggacctacagatgtcggggttcacgcccacactccctcactgggtggtcggcacccagcaaccccctggtgatcatggtcacaggaaaccacagaaaaccttccctcctggcccacccagggaccctgctgaaatcaggagagacagtcatcctgcaatgttggtcagatgtcatgtttgagcacttctttctgcacagagaggggatctctgaggacccctcacgcctcgttggacagatccatgatggggtctccaaggccaacttctccatcggtcccttgatgcctgtccttgcaggaacctacagatgttatggttctgttcctcactccccctatcagttgtcagctcccagtgaccccctggacatcgtgatcacaggtctatatgagaaaccttctctctcagcccagccgggccccacggttcaggcaggagagaacgtgaccttgtcctgtagctcctggagctcctatgacatctaccatctgtccagggaaggggaggcccatgaacgtaggctccgtgcagtgcccaaggtcaacagaacattccaggcagactttcctctgggccctgccacccacggagggacctacagatgcttcggctctttccgtgccctgccctgcgtgtggtcaaactcaagtgacccactgcttgtttctgtcacaggaaacccttcaagtagttggccttcacccacagaaccaagctccaaatctggtatctgcagacacctgcatgttctgattgggacctcagtggtcatcttcctcttcatcctcctcctcttctttctcctttatcgctggtgctccaacaaaaagaatgctgctgtaatggaccaagagcctgcgggggacagaacagtgaataggcaggactctgatgaacaagaccctcaggaggtgacgtacgcacagttggatcactgcgttttcatacagagaaaaatcagtcgcccttctcagaggcccaagacacccccaacagataccagcgtgtacacggaacttccaaatgctgagcccagatccaaagttgtctcctgcccacgagcaccacagtcaggtcttgagggggttttctagggagacaacagccctgtctcaaaaccaggttgccagctcccatgaaccagcagctggaatctgaaggcgtcagtcttcatcttagggcattgctcttcctcacaccactaatctgaacatgcctctctcttgcttacaaatgtctaaggtccccactgcctgctggagagaaaacacactcctttgcttagcccacaattctccatttcacttgacccctgcccacctctccaacctaactggcttacttcctagtcctacttgaggctgcaatcacactgaggaactcacaattccaaacatgcaagaggctccctcttaacacggcacttacacacttgctgttccaccttccctcatgctgttccacctcccctcagactatctttcagccttctgccatcagtaaaatttataaattttttttataactttagtgtagctctctcctcttcaaataaacatgtctcccctca

SEQ ID NO: 146199 - DNA, 1063 bp, Homo sapiens
  Payload ID: 8971
  Gene Symbol: KIR3DL2
  Gene Name: killer cell immunoglobulin-like receptor, three domains, long cytoplasmic tail, 2
  ENST ID: ENST00000612634
  CDS Start-End: 64-1063
ataacatcctgtgcgctgctgagctgagctggggcgcggcctcctgtctgcaccggcagcaccatgtcgctcacggtcgtcagcatggcgtgcgttgggttcttcttgctgcagggggcctggccactcatgggtggtcaggacaaacccttcctgtctgcccggcccagcactgtggtgcctcgaggaggacacgtggctcttcagtgtcactatcgtcgtgggtttaacaatttcatgctgtacaaagaagacagaagccacgttcccatcttccacggcagaatattccaggagagcttcatcatgggccctgtgaccccagcacatgcagggacctacagatgtcggggttcacgcccacactccctcactgggtggtcggcacccagcaaccccctggtgatcatggtcacaggaaaccacagaaaaccttccctcctggcccacccagggcccctgctgaaatcaggagagacagtcatcctgcaatgttggtcagatgtcatgtttgagcacttctttctgcacagagaggggatctctgaggacccctcacgcctcgttggacagatccatgatggggtctccaaggccaacttctccatcggtcccttgatgcctgtccttgcaggaacctacagatgttatggttctgttcctcactccccctatcagttgtcagctcccagtgaccccctggacatcgtgatcacaggtctatatgagaaaccttctctctcagcccagccgggccccacggttcaggcaggagagaacgtgaccttgtcctgtagctcctggagctcctatgacatctaccatctgtccagggaaggggaggcccatgaacgtaggctccgtgcagtgcccaaggtcaacagaacattccaggcagactttcctctgggccctgccacccacggagggacctacagatgcttcggctctttccgtgccctgccctgcgtgtggtcaaactcaagtgacccactgcttgtttctgtcacaggaaacccttcaagtagttggccttcacccacagaaccaagctccaaatctg

SEQ ID NO: 146200 - DNA, 1834 bp, Homo sapiens; identical to SEQ ID NO: 146151
  Payload ID: 8971
  Gene Symbol: KIR3DL2
  Gene Name: killer cell immunoglobulin-like receptor, three domains, long cytoplasmic tail, 2
  ENST ID: ENST00000619026
  CDS Start-End: 34-1350

SEQ ID NO: 146201 - DNA, 1834 bp, Homo sapiens
  Payload ID: 8971
  Gene Symbol: KIR3DL2
  Gene Name: killer cell immunoglobulin-like receptor, three domains, long cytoplasmic tail, 2
  ENST ID: ENST00000615318
  CDS Start-End: 34-1350
ggggcgcggcctcctgtctgcaccggcagcaccatgtcgctcacggtcgtcagcatggcgtgcgttgggttcttcttgctgcagggggcctggccactcatgggtggtcaggacaaacccttcctgtctgcccggcccagcactgtggtgcctcgaggaggacacgtggctcttcagtgtcactatcgtcgtgggtttaacaatttcatgctgtacaaagaagacagaagccacgttcccatcttccacggcagaatattccaggagagcttcatcatgggccctgtgaccccagcacatgcagggacctacagatgtcggggttcacgcccacactccctcactgggtggtcggcacccagcaaccccctggtgatcatggtcacaggaaaccacagaaaaccttccctcctggcccacccagggcccctgctgaaatcaggagagacagtcatcctgcaatgttggtcagatgtcatgtttgagcatttctttctgcacagagaggggatctctgaggacccctcacgcctcgttggacagatccatgatggggtctccaaggccaacttctccatcggtcccttgatgcctgtccttgcaggaacctacagatgttatggttctgttcctcactccccctatcagttgtcagctcccagtgaccccctggacatcgtgatcacaggtctatatgagaaaccttctctctcagcccagccgggccccacggttcaggcaggagagaacgtgaccttgtcctgtagctcctggagctcctatgacatctaccatctgtccagggaaggggaggcccatgaacgtaggctccgtgcagtgcccaaggtcaacagaacattccaggcagactttcctctgggccctgccacccacggagggacctacagatgcttcggctctttccatgccctgccctgcgtgtggtcaaactcaagtgacccactgcttgtttctgtcacaggtatctgcagacacctgcatgttctgattgggacctcagtggtcatcttcctcttcatcctcctcctcttctttctcctttatcgctggtgctccaacaaaaagaatgctgctgtaatggaccaagagcctgcgggggacagaacagtgaataggcaggactctgatgaacaagaccctcaggaggtgacgtacgcacagttggatcactgcgttttcatacagagaaaaatcagtcgcccttctcagaggcccaagacacccctaacagataccagcgtgtacacggaacttccaaatgctgagcccagatccaaagttgtctcctgcccacgagcaccacagtcaggtcttgagggggttttctagggagacaacagccctgtctcaaaaccaggttgccagatccaatgaaccagcagctggaatctgaaggcatcagtctgcatcttaggggatcgctcttcctcacaccacgaatctgaacatgcctctctcttgcttacaaatgcctaaggtcgccactgcctgctgcagagaaaacacactcctttgcttagcccacaagtatctatttcacttgacccctgcccacctctccaacctaactggcttacttcctagtcctacttgaggctgcaatcacactgaggaactcacaattccaaacatacaagaggctccctcttaacacggcacttacacacttgctgttccaccttccctcatgctgttccacctcccctcagactatctttcagccttctgtcatcagtaaaatttataaattttttttataacttcagtgtagctctctcctcttcaaataaacatgtctgccctcatggtttcg

SEQ ID NO: 146202 - DNA, 1863 bp, Homo sapiens
  Payload ID: 8971
  Gene Symbol: KIR3DL2
  Gene Name: killer cell immunoglobulin-like receptor, three domains, long cytoplasmic tail, 2
  ENST ID: ENST00000618616
  CDS Start-End: 20-1387
tgtctgcaccggcagcaccatgtcgctcactgtcgtcagcatggcgtgcgttgggttcttcttgctgcagggggcctggccactcatgggtggtcaggacaaacccttcctgtctgcccggcccagcactgtggtgcctcgaggaggacacgtggctcttcagtgtcactatcgtcgtgggtttaacaatttcatgctgtacaaagaagacagaagccacgttcccatcttccacggcagaatattccaggagagcttcatcatgggccctgtgaccccagcacatgcagggacctacagatgtcggggttcacgcccacactccctcactgggtggtcggcacccagcaaccccctggtgatcatggtcacaggaaaccacagaaaaccttccctcctggcccacccagggcccctgctgaaatcaggagagacagtcatcctgcaatgttggtcagatgtcatgtttgagcacttctttctgcacagagaggggatctctgaggacccctcacgcctcgttggacagatccatgatggggtctccaaggccaacttctccatcggtcccttgatgcctgtccttgcaggaacctacagatgttatggttctgttcctcactccccctatcagttgtcagctcccagtgaccccctggacatcgtgatcacaggtctatatgagaaaccttctctctcagcccagccgggccccacggttcaggcaggagagaacgtgaccttgtcctgtagctcctggagctcctatgacatctaccatctgtccagggaaggggaggcccatgaacgtaggctccgtgcagtgcccaaggtcaacagaacattccaggcagactttcctctgggccctgccacccacggagggacctacagatgcttcggctctttccgtgccctgccctgcgtgtggtcaaactcaagtgacccactgcttgtttctgtcacaggaaacccttcaagtagttggccttcacccacagaaccaagctccaaatctggtatctgcagacacctgcatgttctgattgggacctcagtggtcatcttcctcttcatcctcctcctcttctttctcctttatcgctggtgctccaacaaaaagaatgctgctgtaatggaccaagagcctgcgggggacagaacagtgaataggcaggactctgatgaacaagaccctcaggaggtgatgtacgcacagttggatcactgcgttttcatacagagaaaaatcagtcgcccttctcagaggcccaagacacccctaacagataccagcgtgtacacggaacttccaaatgctgagcccagatccaaagttgtctcctgcccacgagcaccacagtcaggtcttgagggggttttctagggagacaacagccctgtctcaaaaccaggttgccagatccaatgaaccagcagctggaatctgaaggcatcagtctgcatcttaggggatcgctcttcctcacaccacgaatctgaacatgcctctctcttgcttacaaatgcctaaggtcgccactgcctgctgcagagaaaacacactcctttgcttagcccacaagtatctatttcacttgacccctgcccacctctccaacctaactggcttacttcctagtcctacttgaggctgcaatcacactgaggaactcacaattccaaacatgcaagaggctccctcttaacacggcacttacacacttgctgttccaccttccctcatgctgttccacctcccctcagactatctttcagccttctgtcatcagtaaaatttataaattttttttataacttcagtgtagctctctcctcttcaaataaacatgtctgccctca

SEQ ID NO: 146203 - DNA, 1877 bp, Homo sapiens
  Payload ID: 8971
  Gene Symbol: KIR3DL2
  Gene Name: killer cell immunoglobulin-like receptor, three domains, long cytoplasmic tail, 2
  ENST ID: ENST00000616438
  CDS Start-End: 34-1401
ggggcgcggcctcctgtctgcaccggcagcaccatgtcgctcactgtcgtcagcatggcgtgcgttgggttcttcttgctgcagggggcctggccactcatgggtggtcaggacaaacccttcctgtctgcccggcccagcactgtggtgcctcgaggaggacatgtggctcttcagtgtcactatcgtcgtgggtttaacaatttcatgctgtacaaagaagacagaagccacgttcccatcttccacggcagaatattccaggagagcttcatcatgggccctgtgaccccagcacatgcagggacctacagatgtcggggttcacgcccacactccctcactgggtggtcggcacccagcaaccccctggtgatcatggtcacaggaaaccacagaaaaccttccctcctggcccacccagggcccctgctgaaatcaggagagacagtcatcctgcaatgttggtcagatgtcatgtttgagcatttctttctgcacagagaggggatctctgaggacccctcacgcctcgttggacagatccatgatggggtctccaaggccaacttctccatcggtcccttgatgcctgtccttgcaggaacctacagatgttatggttctgttcctcactccccctatcagttgtcagctcccagtgaccccctggacatcgtgatcacaggtctatatgagaaaccttctctctcagcccagccgggccccacggttcaggcaggagagaacgtgaccttgtcctgtagctcctggagctcctatgacatctaccatctgtccagggaaggggaggcccatgaacgtaggctccgtgcagtgcccaaggtcaacagaacattccaggcagactttcctctgggccctgccacccacggagggacctacagatgcttcggctctttccatgccctgccctgcgtgtggtcaaactcaagtgacccactgcttgtttctgtcacaggaaacccttcaagtagttggccttcacccacagaaccaagctccaaatctggtatctgcagacacctgcatgttctgattgggacctcagtggtcatcttcctcttcatcctcctcctcttctttctcctttatcgctggtgctccaacaaaaagaatgctgctgtaatggaccaagagcctgcgggggacagaacagtgaataggcaggactctgatgaacaagaccctcaggaggtgacgtacgcacagttggatcactgcgttttcatacagagaaaaatcagtcgcccttctcagaggcccaagacacccctaacagataccagcgtgtacacggaacttccaaatgctgagcccagatccaaagttgtctcctgcccacgagcaccacagtcaggtcttgagggggttttctagggagacaacagccctgtctcaaaaccaggttgccagatccaatgaaccagcagctggaatctgaaggcatcagtctgcatcttaggggatcgctcttcctcacaccacgaatctgaacatgcctctctcttgcttacaaatgcctaaggtcgccactgcctgctgcagagaaaacacactcctttgcttagcccacaagtatctatttcacttgacccctgcccacctctccaacctaactggcttacttcctagtcctacttgaggctgcaatcacactgaggaactcacaattccaaacatacaagaggctccctcttaacacggcacttacacacttgctgttccaccttccctcatgctgttccacctcccctcagactatctttcagccttctgtcatcagtaaaatttataaattttttttataacttcagtgtagctctctcctcttcaaataaacatgtctgccctca

SEQ ID NO: 146204 - DNA, 1691 bp, Homo sapiens
  Payload ID: 8972
  Gene Symbol: KIR3DL3
  Gene Name: killer cell immunoglobulin-like receptor, three domains, long cytoplasmic tail, 3
  ENST ID: ENST00000291860
  CDS Start-End: 19-1251
gtctgcaccggcagcaccatgtcgctcatggtcgtcagcatggcgtgtgttgggttcttcttgctggaggggccctggccacatgtgggtggtcaggacaagcccttcctctctgcctggcccggcactgtggtgtctgaaggacaacatgtgactcttcagtgtcgctctcgtcttgggtttaatgaattcagtctgtccaaagaagacgggatgcctgtccctgagctctacaacagaatattccggaacagctttctcatgggccctgtgaccccagcacatgcagggacctacagatgttgcagttcacacccacactcccccactgggtggtcggcacccagcaaccctgtggtgatcatggtcacaggagtccacagaaaaccttccctcctggcccacccaggtcccctggtgaaatcaggagagacggtcatcctgcaatgttggtcagatgtcaggtttgagcgcttccttctgcacagagaggggatcactgaggaccccttgcgcctcgttggacagctccacgatgcgggttcccaggtcaactattccatgggtcccatgacacctgcccttgcagggacctacagatgctttggttctgtcactcacttaccctatgagttgtcggctcccagtgaccctctggacatcgtggtcgtaggtctatatgggaaaccttctctctcagcccagccgggccccacggttcaggcaggagagaatgtgaccttgtcctgcagctcccggagcttgtttgacatttaccatctatccagggaggcggaggccggtgaacttaggctcactgcagtgctgagggtcaatggaacattccaggccaacttccctctgggccctgtgacccacggagggaactacagatgcttcggctctttccgtgccctgccccatgcgtggtcagacccgagtgacccactgcccgtttctgtcacaggtaactccagaaacctgcacgttctgattgggacctcagtggtcatcatcccctttgctatcctcctcttctttctccttcatcgctggtgtgccaacaaaaagaatgctgttgtaatggaccaagagcctgcagggaacagaacagtgaacagggaggactctgatgaacaagaccctcaggaggtgacatacgcacagttgaatcactgcgttttcacacagagaaaaatcactcgcccttctcagaggcccaagacacccccaacagataccagcgtgtaacacggaacttccaaatgctgagcgcagatccaaagttgtcttctgtccactagcaccacagtcaggccttgatgggatcttctagggagacaatagccctgtctcaaaaccgggttgccagctcccatgtaccagcagctggactctgaaggcgtgagtctgcatcttagggcatcgctcttcctcacaccacgaatctgaacatgcctctctcttgcttacaaatgtctaaggtccccactgcctgctggagagaaaacacacttgcttagcccacaattctccatttcacttgacccctgcccacctctccaacctaactggcttacttcctagtctacttgaggctgcgatcacactgaggaactcacaattccaaacatataagaggctccctcttaacacggcacttagatacgtgctattccacctttcctcag

SEQ ID NO: 146205 - DNA, 1691 bp, Homo sapiens
  Payload ID: 8972
  Gene Symbol: KIR3DL3
  Gene Name: killer cell immunoglobulin-like receptor, three domains, long cytoplasmic tail, 3
  ENST ID: ENST00000615880
  CDS Start-End: 19-1251
gtctgcaccggcagcaccatgtcgctcatggtcgtcagcatggcgtgtgttgggttcttcttgctggaggggccctggccacatgtgggtggtcaggacaagcccttcctctctgcctggcccggcactgtggtgtctgaaggacaacatgtgactcttcagtgtcgctctcgtcttgggtttaacgaattcagtctgtccaaagaagacgggatgcctgtccctgagctctacaacagaatattccggaacagctttctcatgggccctgtgaccccagcacatgcagggacctacagatgttgcagttcacacccacactcccccactgggtggtcggcacccagcaaccctgtggtgatcatggtcacaggagtccacagaaaaccttccctcctggcccacccaggtcccctggtgaaatcgggagagacggtcatcctgcaatgttggtcagatgtcaggtttgagcgcttccttctgcacagagaggggatcactgaggaccccttgcgcctcattggacagctccacgatgcgggttcccaggtcaactattccatgggtcccatgacacctgcccttgcagggacctacagatgctttggttctgtcactcacttaccctatgagttgtcggctcccagtgaccctctggacatcgtggtcgtaggtctatatgggaaaccttctctctcagcccagccgggccccacggttcaggcaggagagaatgtgaccttgtcctgcagctcccggagcttgtttgacatttaccatctatccagggaggcagaggccggtgaacttaggctcactgcggtgctgagggtcaatggaacattccaggccaacttccctctgggccctgtgacccacggagggaactacagatgcttcggctctttccgtgccctgccccacgcgtggtcagacccgagtgacccactgcccgtttctgtcacaggtaactccagacacctgcacgttctgattgggacctcagtggtcatcatcccctttgctatcctcctcttctttctccttcatcgctggtgtgccaacaaaaagaatgctgttgtaatggaccaagagcctgcagggaacagaacagtgaacagggaggactctgatgaacaagaccctcaggaggtgacatacgcacagttgaatcactgcgttttcacacagagaaaaatcactcgcccttctcagaggcccaagacacccccaacagataccagcgtgtaacacggaacttccaaatgctgagcgcagatccaaagttgtcttctgtccactagcaccacagtcaggccttgatgggatcttctagggagacaatagccctgtctcaaaaccgggttgccagctcccatgtaccagcagctggactctgaaggcgtgagtctgcatcttagggcatcgctcttcctcacaccacgaatctgaacatgcctctctcttgcttacaaatgtctaaggtccccactgcctgctggagagaaaacacacttgcttagcccacaattctccatttcacttgacccctgcccacctctccaacctaactggcttacttcctagtctacttgaggctgcgatcacactgaggaactcacaattccaaacatataagaggctccctcttaacacggcacttagatacgtgctattccacctttcctcag

SEQ ID NO: 146206 - DNA, 1694 bp, Homo sapiens
  Payload ID: 8972
  Gene Symbol: KIR3DL3
  Gene Name: killer cell immunoglobulin-like receptor, three domains, long cytoplasmic tail, 3
  ENST ID: ENST00000611367
  CDS Start-End: 19-1251
gtctgcaccggcagcaccatgtcgctcatggtcgtcagcatggcgtgtgttgggttcttcttgctggaggggccctggccacatgtgggtggtcaggacaagcccttcctctctgcctggcccggcactgtggtgtctgaaggacaacatgtgactcttcagtgtcgctctcgtcttgggtttaacgaattcagtctgtccaaagaagacgggatgcctgtccctgagctctacaacagaatattccggaacagctttctcatgggccctgtgaccccagcacatgcagggacctacagatgttgcagttcacacccacactcccccactgggtggtcggcacccagcaaccctgtggtgatcatggtcacaggagtccacagaaaaccttccctcctggcccacccaggtcccctggtgaaatcgggagagacggtcatcctgcaatgttggtcagatgtcaggtttgagcgcttccttctgcacagagaggggatcactgaggaccccttgcgcctcattggacagctccacgatgcgggttcccaggtcaactattccatgggtcccatgacacctgcccttgcagggacctacagatgctttggttctgtcactcacttaccctatgagttgtcggctcccagtgaccctctggacatcgtggtcgtaggtctatatgggaaaccttctctctcagcccagccgggccccacggttcaggcaggagagaatgtgaccttgtcctgcagctcccggagcttgtttgacatttaccatctatccagggaggcagaggccggtgaacttaggctcactgcggtgctgagggtcaatggaacattccaggccaacttccctctgggccctgtgacccacggagggaactacagatgcttcggctctttccgtgccctgccccacgcgtggtcagacccgagtgacccactgcccgtttctgtcacaggtaactccagatacctgcacgctctgattgggacctcagtggtcatcatcccctttgctatcctcctcttctttctccttcatcgctggtgtgccaacaaaaagaatgctgttgtaatggaccaagagcctgcagggaacagaacagtgaacagggaggactctgatgaacaagaccctcaggaggtgacatacgcacagttgaatcactgcgttttcacacagagaaaaatcactcgcccttctcagaggcccaagacacccccaacagataccagcgtgtaacacggaacttccaaatgctgagcgcagatccaaagttgtcttctgtccaccagcaccacagtcaggccttgatgggatcttctagggagacaatagccctgtctcaaaaccgggttgccagctcccatgtaccagcagctggaatctgaaggcgtgagtctgcatcttagggcatcgctcttcctcacaccacgaatctgaacatgcctctctcttgcttacaaatgtctaaggtccccactgcctgctggagagaaaacacactcctttgcttagcccacaattctccatttcacttgacccctgcccacctctccaacctaactggcttacttcctagtctacttgaggctgcgatcacactgaggaactcacaattccaaacatataagaggctccctcttaacacggcacttagatacatgctattccacctttcctca

SEQ ID NO: 146207 - DNA, 1694 bp, Homo sapiens; identical to SEQ ID NO: 146206
  Payload ID: 8972
  Gene Symbol: KIR3DL3
  Gene Name: killer cell immunoglobulin-like receptor, three domains, long cytoplasmic tail, 3
  ENST ID: ENST00000620258
  CDS Start-End: 19-1251

SEQ ID NO: 146208 - DNA, 1314 bp, Homo sapiens
  Payload ID: 8972
  Gene Symbol: KIR3DL3
  Gene Name: killer cell immunoglobulin-like receptor, three domains, long cytoplasmic tail, 3
  Uniprot ID: Q8N743
  ENST ID: ENST00000614568
  CDS Start-End: 51-1283
tgctgctgaactgagctggggcgcagccgcctgtctgcaccggcagcaccatgtcgctcatggtcgtcagcatggcgtgtgttgggttcttcttgctggaggggccctggccacatgtgggtggtcaggacaagcccttcctctctgcctggcccggcactgtggtgtctgaaggacaacatgtgactcttcagtgtcgctctcgtcttgggtttaacgaattcagtctgtccaaagaagacgggatgcctgtccctgagctctacaacagaatattccggaacagctttctcatgggccctgtgaccccagcacatgcagggacctacagatgttgcagttcacacccacactcccccactgggtggtcggcacccagcaaccctgtggtgatcatggtcacaggagtccacagaaaaccttccctcctggcccacccaggtcccctggtgaaatcgggagagacggtcatcctgcaatgttggtcagatgtcaggtttgagcgcttccttctgcacagagaggggatcactgaggaccccttgcgcctcgttggacagctccacgatgcgggttcccaggtcaactattccatgggtcccatgacacctgcccttgcagggacctacagatgctttggttctgtcactcacttaccctatgagttgtcggctcccagtgaccctctggacatcgtggtcgtaggtctatatgggaaaccttctctctcagcccagccgggccccacggttcaggcaggagagaatgtgaccttgtcctgcagctcccggagcttgtttgacatttaccatctatccagggaggcagaggccggtgaacttaggctcactgcggtgctgagggtcaatggaacattccaggccaacttccctctgggccctgtgacccacggagggaactacagatgcttcggctctttccgtgccctgccccacgcgtggtcagacccgagtgacccactgcccgtttctgtcacaggtaactccagacacctgcacgttctgattgggacctcagtggtcatcatcccctttgctatcctcctcttctttctccttcatcgctggtgtgccaacaaaaagaatgctgttgtaatggaccaagagcctgcagggaacagaacagtgaacagggaggactctgatgaacaagaccctcaggaggtgacatacgcacagttgaatcactgcgttttcacacagagaaaaatcactcgcccttctcagaggcccaagacacccccaacagataccagcgtgtaacacggaacttccaaatgctgagcgcagatcc

SEQ ID NO: 146209 - DNA, 1314 bp, Homo sapiens
  Payload ID: 8972
  Gene Symbol: KIR3DL3
  Gene Name: killer cell immunoglobulin-like receptor, three domains, long cytoplasmic tail, 3
  ENST ID: ENST00000620803
  CDS Start-End: 51-1283
tgctgctgaactgagctggggcgcagccgcctgtctgcaccggcagcaccatgtcgctcatggtcgtcagcatggcgtgtgttgggttcttcttgctggaggggccctggccacatgtgggtggtcaggacaagcccttcctctctgcctggcccggcactgtggtgtctgaaggacaacatgtgactcttcagtgtcgctctcgtcttgggtttaatgaattcagtctgtccaaagaagacgggatgcctgtccctgagctctacaacagaatattccggaacagctttctcatgggccctgtgaccccagcacatgcagggacctacagatgttgcagttcacacccacactcccccactgggtggtcggcacccagcaaccctgtggtgatcatggtcacaggagtccacagaaaaccttccctcctggcccacccaggtcccctggtgaaatcaggagagacggtcatcctgcaatgttggtcagatgtcaggtttgagcacttccttctgcacagagaggggatcactgaggaccccttgcgcctcgttggacagctccacgatgcgggttcccaggtcaactattccatgggtcccatgacacctgcccttgcagggacctacagatgctttggttctgtcactcacttaccctatgagttgtcggctcccagtgaccctctggacatcgtggtcgtaggtctatatgggaaaccttctctctcagcccagccgggccccacggttcaggcaggagagaatgtgaccttgtcctgcagctcccggagcttgtttgacatttaccatctatccagggaggcggaggccggtgaacttaggctcactgcagtgctgagggtcaatggaacattccaggccaacttccctctgggccctgtgacccacggagggaactacagatgcttcggctctttccgtgccctgccccatgcgtggtcagacccgagtgacccactgcccgtttctgtcacaggtaactccagaaacctgcacgttctgattgggacctcagtggtcatcatcccctttgctatcctcctcttctttctccttcatcgctggtgtgccaacaaaaagaatgctgttgtaatggaccaagagcctgcagggaacagaacagtgaacagggaggactctgatgaacaagaccctcaggaggtgacatacgcacagttgaatcactgcgttttcacacagagaaaaatcactcgcccttctcagaggcccaagacacccccaacagataccagcgtgtaacacggaacttccaaatgctgagcgcagatcc

SEQ ID NO: 146210 - DNA, 1691 bp, Homo sapiens
  Payload ID: 8972
  Gene Symbol: KIR3DL3
  Gene Name: killer cell immunoglobulin-like receptor, three domains, long cytoplasmic tail, 3
  ENST ID: ENST00000615690
  CDS Start-End: 19-1251
gtctgcaccggcagcaccatgtcgctcatggtcgtcagcatggcgtgtgttgggttcttcttgctggaggggccctggccacatgtgggtggtcaggacaagcccttcctctctgcctggcccggcactgtggtgtctgaaggacaacatgtgactcttcagtgtcgctctcgtcttgggtttaacgaattcagtctgtccaaagaagacgggatgcctgtccctgagctctacaacagaatattccggaacagctttctcatgggccctgtgaccccagcacatgcagggacctacagatgttgcagttcacacccacactcccccactgggtggtcggcacccagcaaccctgtggtgatcatggtcacaggagtccacagaaaaccttccctcctggcccacccaggtcccctggtgaaatcgggagagacggtcatcctgcaatgttggtcagatgtcaggtttgagcgcttccttctgcacagagaggggatcactgaggaccccttgcgcctcattggacagctccacgatgcgggttcccaggtcaactattccatgggtcccatgacacctgcccttgcagggacctacagatgctttggttctgtcactcacttaccctatgagttgtcggctcccagtgaccctctggacatcgtggtcgtaggtctatatgggaaaccttctctctcagcccagccgggccccacggttcaggcaggagagaatgtgaccttgtcctgcagctcccggagcttgtttgacatttaccatctatccagggaggcagaggccggtgaacttaggctcactgcggtgctgagggtcaatggaacattccaggccaacttccctctgggccctgtgacccacggagggaactacagatgcttcggctctttccgtgccctgccccacgcgtggtcagacccgagtgacccactgcccgtttctgtcacaggtaactccagaaacctgcacgttctgattgggacctcagtggtcatcatcccctttgctatcctcctcttctttctccttcatcgctggtgtgccaacaaaaagaatgctgttgtaatggaccaggagcctgcagggaacagaacagtgaacagggaggactctgatgaacaagaccctcaggaggtgacatacgcacagttgaatcactgcgttttcacacagagaaaaatcactcgcccttctcagaggcccaagacacccccaacagataccagcgtgtaacacggaacttccaaatgctgagcgcagatccaaagttgtcttctgtccactagcaccacagtcaggccttgatgggatcttctagggagacaatagccctgtctcaaaaccgggttgccagctcccatgtaccagcagctggactctgaaggcgtgagtctgcatcttagggcatcgctcttcctcacaccacgaatctgaacatgcctctctcttgcttacaaatgtctaaggtccccactgcctgctggagagaaaacacacttgcttagcccacaattctccatttcacttgacccctgcccacctctccaacctaactggcttacttcctagtctacttgaggctgcgatcacactgaggaactcacaattccaaacatataagaggctccctcttaacacggcacttagatacgtgctattccacctttcctcag

SEQ ID NO: 146211 - DNA, 1823 bp, Homo sapiens
  Payload ID: 8972
  Gene Symbol: KIR3DL3
  Gene Name: killer cell immunoglobulin-like receptor, three domains, long cytoplasmic tail, 3
  ENST ID: ENST00000617919
  CDS Start-End: 31-1263
gcgcagccgcctgtctgcaccggcagcaccatgtcgctcatggtcgtcagcatggcgtgtgttgggttcttcttgctggaggggccctggccacatgtgggtggtcaggacaagcccttcctctctgcctggcccggcactgtggtgtctgaaggacaacatgtgactcttcagtgtcgctctcgtcttgggtttaatgaattcagtctgtccaaagaagacgggatgcctgtccctgagctctacaacagaatattccggaacagctttctcatgggccctgtgaccccagcacatgcagggacctacagatgttgcagttcacacccacactcccccactgggtggtcggcacccagcaaccctgtggtgatcatggtcacaggagtccacagaaaaccttccctcctggcccacccaggtcccctggtgaaatcaggagagacggtcatcctgcaatgttggtcagatgtcaggtttgagcgcttccttctgcacagagaggggatcactgaggaccccttgcgcctcgttggacagctccacgatgcgggttcccaggtcaactattccatgggtcccatgacacctgcccttgcagggacctacagatgctttggttctgtcactcacttaccctatgagttgtcggctcccagtgaccctctggacatcgtggtcgtaggtctatatgggaaaccttctctctcagcccagccgggccccacggttcaggcaggagagaatgtgaccttgtcctgcagctcccggagcttgtttgacatttaccatctatccagggaggcggaggccggtgaacttaggctcactgcagtgctgagggtcaatggaacattccaggccaacttccctctgggccctgtgacccacggagggaactacagatgcttcggctctttccgtgccctgccccatgcgtggtcagacccgagtgacccactgcccgtttctgtcacaggtaactccagatacctgcacgctctgattgggacctcagtggtcatcatcccctttgctatcctcctcttctttctccttcatcgctggtgtgccaacaaaaagaatgctgttgtaatggaccaagagcctgcagggaacagaacagtgaacagggaggactctgatgaacaagaccctcaggaggtgacatacgcacagttgaatcactgcgttttcacacagagaaaaatcactcgcccttctcagaggcccaagacacccccaacagataccagcgtgtaacacggaacttccaaatgctgagcgcagatccaaagttgtcttctgtccaccagcaccacagtcaggccttgatgggatcttctagggagacaatagccctgtctcaaaaccgggttgccagctcccatgtaccagcagctggaatctgaaggcgtgagtctgcatcttagggcatcgctcttcctcacaccacgaatctgaacatgcctctctcttgcttacaaatgtctaaggtccccactgcctgctggagagaaaacacactcctttgcttagcccacaattctccatttcacttgacccctgcccacctctccaacctaactggcttacttcctagtctacttgaggctgcgatcacactgaggaactcacaattccaaacatataagaggctccctcttaacacggcacttagatacatgctattccacctttcctcatgttgttccacctttcctcagagtatctttcagccttctgtcagcagtaaaacttataaattttttttataatttcaatgtagttttctattcttcaagtaaacatgtctgccctca

SEQ ID NO: 146212 - DNA, 1314 bp, Homo sapiens
  Payload ID: 8972
  Gene Symbol: KIR3DL3
  Gene Name: killer cell immunoglobulin-like receptor, three domains, long cytoplasmic tail, 3
  ENST ID: ENST00000613666
  CDS Start-End: 51-1283
tgctgctgaactgagctggggcgcagccgcctgtctgcaccggcagcaccatgtcgctcatggtcgtcagcatggcgtgtgttgggttcttcttgctggaggggccctggccacatgtgggtggtcaggacaagcccttcctctctgcctggcccggcactgtggtgtctgaaggacaacatgtgactcttcagtgtcgctctcgtcttgggtttaacgaattcagtctgtccaaagaagacgggatgcctgtccctgagctctacaacagaatattccggaacagctttctcatgggccctgtgaccccagcacatgcagggacctacagatgttgcagttcacacccacactcccccactgggtggtcggcacccagcaaccctgtggtgatcatggtcacaggagtccacagaaaaccttccctcctggcccacccaggtcccctggtgaaatcgggagagacggtcatcctgcaatgttggtcagatgtcaggtttgagcgcttccttctgcacagagaggggatcactgaggaccccttgcgcctcattggacagctccacgatgcgggttcccaggtcaactattccatgggtcccatgacacctgcccttgcagggacctacagatgctttggttctgtcactcacttaccctatgagttgtcggctcccagtgaccctctggacatcgtggtcgtaggtctatatgggaaaccttctctctcagcccagccgggccccacggttcaggcaggagagaatgtgaccttgtcctgcagctcccggagcttgtttgacatttaccatctatccagggaggcagaggccggtgaacttaggctcactgcggtgctgagggtcaatggaacattccaggccaacttccctctgggccctgtgacccacggagggaactacagatgcttcggctctttccgtgccctgccccacgcgtggtcagacccgagtgacccactgcccgtttctgtcacaggtaactccagacacctgcacgttctgattgggacctcagtggtcatcatcccctttgctatcctcctcttctttctccttcatcgctggtgtgccaacaaaaagaatgctgttgtaatggaccaagagcctgcagggaacagaacagtgaacagggaggactctgatgaacaagaccctcaggaggtgacatacgcacagttgaatcactgcgttttcacacagagaaaaatcactcgcccttctcagaggcccaagacacccccaacagataccagcgtgtaacacggaacttccaaatgctgagcgcagatcc

SEQ ID NO: 146213 - DNA, 1233 bp, Homo sapiens
  Payload ID: 8972
  Gene Symbol: KIR3DL3
  Gene Name: killer cell immunoglobulin-like receptor, three domains, long cytoplasmic tail, 3
  ENST ID: ENST00000614210
  CDS Start-End: 1-1233
atgtcgctcatggtcgtcagcatggcgtgtgttgggttcttcttgctggaggggccctggccacatgtgggtggtcaggacaagcccttcctctctgcctggcccggcactgtggtgtctgaaggacaacatgtgactcttcagtgtcgctctcgtcttgggtttaaagaattcagtctgtccaaagaagacgggatgcctgtccctgagctctacaacagaatattccggaacagctttctcatgggccctgtgaccccagcacatgcagggacctacagatgttgcagttcacacccacactcccccactgggtggtcggcacccagcaaccctgtggtgatcatggtcacaggagtccacagaaaaccttccctcctggcccacccaggtcccctggtgaaatcgggagagacggtcatcctgcaatgttggtcagatgtcagttttgagcgcttccttctgcacagagaggggatcactgaggaccccttgcgcctcgttggacagctccacgatgcgggttcccaggtcaactattccatgggtcccatgacacctgcccttgcagggacctacagatgctttggttctgtcactcacttaccctatgagttgtcagctcccagtgaccctctggacatcgtggtcgtaggtctatatgggaaaccttctctctcagcccagccgggccccacggttcaggcaggagagaatgtgaccttgtcctgcagctcccggagcttgtttgacatttaccatctatccagggaggcagaggccggtgaacttaggctcactgcggtgctgagggtcaatggaacattccaggccaacttccctctgggccctgtgacccacggagggacctacagatgcttcggctctttccgtgccctgccccacgcgtggtcagacccgagtgacccactgcccgtttctgtcacaggtaactccagaaacctgcacgttctgattgggacctcagtggtcatcatcccctttgctatcctcctcttctttctccttcatcgctggtgtgccaacaaaaagaatgctgttgtaatggaccaagagcctgcagggaacagaacagtgaacagggaggactctgatgaacaagaccctcaggaggtgacatacgcacagttgaatcactgcgttttcacacagagaaaaatcactcgcccttctcagaggcccaagacacccccaacagataccagcgtgtaa

SEQ ID NO: 146214 - DNA, 1314 bp, Homo sapiens
  Payload ID: 8972
  Gene Symbol: KIR3DL3
  Gene Name: killer cell immunoglobulin-like receptor, three domains, long cytoplasmic tail, 3
  ENST ID: ENST00000614190
  CDS Start-End: 51-1283
tgctgctgaactgagctggggcgcagccgcctgtctgcaccggcagcaccatgtcgctcatggtcgtcagcatggcgtgtgttgggttcttcttgctggaggggccctggccacatgtgggtggtcaggacaagcccttcctctctgcctggcccggcactgtggtgtctgaaggacaacatgtgactcttcagtgtcgctctcatcttgggtttaacgaattcagtctgtccaaagaagacgggatgcctgtccctgagctctacaacagaatattccggaacagctttctcatgggccctgtgaccccagcacatgcagggacctacagatgttgcagttcacacccacactcccccactgggtggtcggcacccagcaaccctgtggtgatcatggtcacaggagtccacagaaaaccttccctcctggcccacccaggtcccctggtgaaatcgggagagacggtcatcctgcaatgttggtcagatgtcaggtttgagcgcttccttctgcacagagaggggatcactgaggaccccttgcgcctcgttggacagctccacgatgcgggttcccaggtcaactattccatgggtcccatgacacctgcccttgcagggacctacagatgctttggttctgtcactcacttaccctatgagttgtcggctcccagtgaccctctggacatcgtggtcgtaggtctatatgggaaaccttctctctcagcccagccgggccccacggttcaggcaggagagaatgtgaccttgtcctgcagctcccggagcttgtttgacatttaccatctatccagggaggcagaggccggtgaacttaggctcactgcggtgctgagggtcaatggaacattccaggccaacttccctctgggccctgtgacccacggagggaactacagatgcttcggctctttccgtgccctgccccacgcgtggtcagacccgagtgacccactgcccgtttctgtcacaggtaactccagatacctgcacgctctgattgggacctcagtggtcatcatcccctttgctatcctcctcttctttctccttcatcgctggtgtgccaacaaaaagaatgctgttgtaatggaccaagagcctgcagggaacagaacagtgaacagggaggactctgatgaacaagaccctcaggaggtgacatacgcacagttgaatcactgcgttttcacacagagaaaaatcactcgcccttctcagaggcccaagacacccccaacagataccagcgtgtaacacggaacttccaaatgctgagcgcagatcc

SEQ ID NO: 146215 - DNA, 1314 bp, Homo sapiens; identical to SEQ ID NO: 146212
  Payload ID: 8972
  Gene Symbol: KIR3DL3
  Gene Name: killer cell immunoglobulin-like receptor, three domains, long cytoplasmic tail, 3
  ENST ID: ENST00000618394
  CDS Start-End: 51-1283

SEQ ID NO: 146216 - DNA, 1691 bp, Homo sapiens
  Payload ID: 8972
  Gene Symbol: KIR3DL3
  Gene Name: killer cell immunoglobulin-like receptor, three domains, long cytoplasmic tail, 3
  ENST ID: ENST00000618993
  CDS Start-End: 19-1251
gtctgcaccggcagcaccatgtcgctcatggtcgtcagcatggcgtgtgttgggttcttcttgctggaggggccctggccacatgtgggtggtcaggacaagcccttcctctctgcctggcccggcactgtggtgtctgaaggacaacatgtgactcttcagtgtcgctctcgtcttgggtttaatgaattcagtctgtccaaagaagacgggatgcctgtccctgagctctacaacagaatattctggaacagctttctcatgggccctgtgaccccagcacatgcagggacctacagatgttgcagttcacacccacactcccccactgggtggtcggcacccagcaaccctgtggtgatcatggtcacaggagtccacagaaaaccttccctcctggcccacccaggtcccctggtgaaatcgggagagacggtcatcctgcaatgttggtcagatgtcaggtttgagcgcttccttctgcacagagaggggatcactgaggaccccttgcgcctcattggacagctccacgatgcgggttcccaggtcaactattccatgggtcccatgacacctgcccttgcagggacctacagatgctttggttctgtcactcacttaccctatgagttgtcggctcccagtgaccctctggacatcgtggtcgtaggtctatatgggaaaccttctctctcagcccagccgggccccacggttcaggcaggagagaatgtgaccttgtcctgcagctcccggagcttgtttgacatttaccatctatccagggaggcagaggccggtgaacttaggctcactgcggtgctgagggtcaatggaacattccaggccaacttccctctgggccctgtgacccacggagggaactacagatgcttcggctctttccgtgccctgccccacgcgtggtcagacccgagtgacccactgcccgtttctgtcacaggtaactccagacacctgcacgttctgattgggacctcagtggtcatcatcccctttgctatcctcctcttctttctccttcatcgctggtgtgccaacaaaaagaatgctgttgtaatggaccaagagcctgcagggaacagaacagtgaacagggaggactctgatgaacaagaccctcaggaggtgacatacgcacagttgaatcactgcgttttcacacagagaaaaatcactcgcccttctcagaggcccaagacacccccaacagataccagcgtgtaacacggaacttccaaatgctgagcgcagatccaaagttgtcttctgtccactagcaccacagtcaggccttgatgggatcttctagggagacaatagccctgtctcaaaaccgggttgccagctcccatgtaccagcagctggactctgaaggcgtgagtctgcatcttagggcatcgctcttcctcacaccacgaatctgaacatgcctctctcttgcttacaaatgtctaaggtccccactgcctgctggagagaaaacacacttgcttagcccacaattctccatttcacttgacccctgcccacctctccaacctaactggcttacttcctagtctacttgaggctgcgatcacactgaggaactcacaattccaaacatataagaggctccctcttaacacggcacttagatacgtgctattccacctttcctcag

SEQ ID NO: 146217 - DNA, 1694 bp, Homo sapiens; identical to SEQ ID NO: 146206
  Payload ID: 8972
  Gene Symbol: KIR3DL3
  Gene Name: killer cell immunoglobulin-like receptor, three domains, long cytoplasmic tail, 3
  ENST ID: ENST00000611573
  CDS Start-End: 19-1251

SEQ ID NO: 146218 - DNA, 1691 bp, Homo sapiens; identical to SEQ ID NO: 146205
  Payload ID: 8972
  Gene Symbol: KIR3DL3
  Gene Name: killer cell immunoglobulin-like receptor, three domains, long cytoplasmic tail, 3
  ENST ID: ENST00000612251
  CDS Start-End: 19-1251

SEQ ID NO: 146219 - DNA, 1238 bp, Homo sapiens
  Payload ID: 8972
  Gene Symbol: KIR3DL3
  Gene Name: killer cell immunoglobulin-like receptor, three domains, long cytoplasmic tail, 3
  ENST ID: ENST00000617100
  CDS Start-End: 6-1238
gcaccatgtcgctcatggtcgtcagcatggcgtgtgttgggttcttcttgctggaggggccctggccacatgtgggtggtcaggacaagcccttcctctctgcctggcccggcactgtggtgtctgaaggacaacatgtgactcttcagtgtcgctctcgtcttgggtttaacgaattcagtctgtccaaagaagacgggatgcctgtccctgagctctacaacagaatattccggaacagctttctcatgggccctgtgaccccagcacatgcagggacctacagatgttgcagttcacacccacactcccccactgggtggtcggcacccagcaaccctgtggtgatcatggtcacaggagtccacagaaaaccttccctcctggcccacccaggtcccctggtgaaatcgggagagacggtcatcctgcaatgttggtcagatgtcaggtttgagcgcttccttctgcacagagaggggatcactgaggaccccttgcgcctcattggacagctccacgatgcgggttcccaggtcaactattccatgggtcccatgacacctgcccttgcagggacctacagatgctttggttctgtcactcacttaccctatgagttgtcggctcccagtgaccctctggacatcgtggtcgtaggtctatatgggaaaccttctctctcagcccagccgggccccacggttcaggcaggagagaatgtgaccttgtcctgcagctcccggagcttgtttgacatttaccatctatccagggaggcagaggccggtgaacttaggctcactgcggtgctgagggtcaatggaacattccaggccaacttccctctgggccctgtgacccacggagggaactacagatgcttcggctctttccgtgccctgccccacgcgtggtcagacccgagtgacccactgcccgtttctgtcacaggtaactccagatacctgcacgctctgattgggacctcagtggtcatcatcccctttgctatcctcctcttctttctccttcatcgctggtgtgccaacaaaaagaatgctgttgtaatggaccaagagcctgcagggaacagaacagtgaacagggaggactctgatgaacaagaccctcaggaggtgacatacgcacagttgaatcactgcgttttcacacagagaaaaatcactcgcccttctcagaggcccaagacacccccaacagataccagcgtgtaa

SEQ ID NO: 146220 - DNA, 1691 bp, Homo sapiens
  Payload ID: 8972
  Gene Symbol: KIR3DL3
  Gene Name: killer cell immunoglobulin-like receptor, three domains, long cytoplasmic tail, 3
  ENST ID: ENST00000620235
  CDS Start-End: 19-1251
gtctgcaccggcagcaccatgtcgctcatggtcgtcagcatggcgtgtgttgggttcttcttgctggaggggccctggccacatgtgggtggtcaggacaagcccttcctctctgcctggcccggcactgtggtgtctgaaggacaacatgtgactcttcagtgtcgctctcgtcttgggtttaaagaattcagtctgtccaaagaagacgggatgcctgtccctgagctctacaacagaatattccggaacagctttctcatgggccctgtgaccccagcacatgcagggacctacagatgttgcagttcacacccacactcccccactgggtggtcggcacccagcaaccctgtggtgatcatggtcacaggagtccacagaaaaccttccctcctggcccacccaggtcccctggtgaaatcgggagagacggtcatcctgcaatgttggtcagatgtcagttttgagcgcttccttctgcacagagaggggatcactgaggaccccttgcgcctcgttggacagctccacgatgcgggttcccaggtcaactattccatgggtcccatgacacctgcccttgcagggacctacagatgctttggttctgtcactcacttaccctatgagttgtcagctcccagtgaccctctggacatcgtggtcgtaggtctatatgggaaaccttctctctcagcccagccgggccccacggttcaggcaggagagaatgtgaccttgtcctgcagctcccggagcttgtttgacatttaccatctatccagggaggcagaggccggtgaacttaggctcactgcggtgctgagggtcaatggaacattccaggccaacttccctctgggccctgtgacccacggagggacctacagatgcttcggctctttccgtgccctgccccacgcgtggtcagacccgagtgacccactgcccgtttctgtcacaggtaactccagaaacctgcacgttctgattgggacctcagtggtcatcatcccctttgctatcctcctcttctttctccttcatcgctggtgtgccaacaaaaagaatgctgttgtaatggaccaagagcctgcagggaacagaacagtgaacagggaggactctgatgaacaagaccctcaggaggtgacatacgcacagttgaatcactgcgttttcacacagagaaaaatcactcgcccttctcagaggcccaagacacccccaacagataccagcgtgtaacacggaacttccaaatgctgagcgcagatccaaagttgtcttctgtccactagcaccacagtcaggccttgatgggatcttctagggagacaatagccctgtctcaaaaccgggttgccagctcccatgtaccagcagctggactctgaaggcgtgagtctgcatcttagggcatcgctcttcctcacaccacgaatctgaacatgcctctctcttgcttacaaatgtctaaggtccccactgcctgctggagagaaaacacacttgcttagcccacaattctccatttcacttgacccctgcccacctctccaacctaactggcttacttcctagtctacttgaggctgcgatcacactgaggaactcacaattccaaacatataagaggctccctcttaacacggcacttagatacgtgctattccacctttcctcag

SEQ ID NO: 146221 - DNA, 1815 bp, Homo sapiens
  Payload ID: 8972
  Gene Symbol: KIR3DL3
  Gene Name: killer cell immunoglobulin-like receptor, three domains, long cytoplasmic tail, 3
  ENST ID: ENST00000618713
  CDS Start-End: 19-1251
gtctgcaccggcagcaccatgtcgctcatggtcgtcagcatggcgtgtgttgggttcttcttgctggaggggccctggccacatgtgggtggtcaggacaagcccttcctctctgcctggcccggcactgtggtgtctgaaggacaacatgtgactcttcagtgtcgctctcatcttgggtttaacgaattcagtctgtccaaagaagacgggatgcctgtccctgagctctacaacagaatattccggaacagctttctcatgggccctgtgaccccagcacatgcagggacctacagatgttgcagttcacacccacactcccccactgggtggtcggcacccagcaaccctgtggtgatcatggtcacaggagtccacagaaaaccttccctcctggcccacccaggtcccctggtgaaatcgggagagacggtcatcctgcaatgttggtcagatgtcaggtttgagcgcttccttctgcacagagaggggatcactgaggaccccttgcgcctcgttggacagctccacgatgcgggttcccaggtcaactattccatgggtcccatgacacctgcccttgcagggacctacagatgctttggttctgtcactcacttaccctatgagttgtcggctcccagtgaccctctggacatcgtggtcgtaggtctatatgggaaaccttctctctcagcccagccgggccccacggttcaggcaggagagaatgtgaccttgtcctgcagctcccggagcttgtttgacatttaccatctatccagggaggcagaggccggtgaacttaggctcactgcggtgctgagggtcaatggaacattccaggccaacttccctctgggccctgtgacccacggagggaactacagatgcttcggctctttccgtgccctgccccacgcgtggtcagacccgagtgacccactgcccgtttctgtcacaggtaactccagatacctgcacgctctgattgggacctcagtggtcatcatcccctttgctatcctcctcttctttctccttcatcgctggtgtgccaacaaaaagaatgctgttgtaatggaccaagagcctgcagggaacagaacagtgaacagggaggactctgatgaacaagaccctcaggaggtgacatacgcacagttgaatcactgcgttttcacacagagaaaaatcactcgcccttctcagaggcccaagacacccccaacagataccagcgtgtaacacggaacttccaaatgctgagcgcagatccaaagttgtcttctgtccaccagcaccacagtcaggccttgatgggatcttctagggagacaatagccctgtctcaaaaccgggttgccagctcccatgtaccagcagctggaatctgaaggcgtgagtctgcatcttagggcatcgctcttcctcacaccacgaatctgaacatgcctctctcttgcttacaaatgtctaaggtccccactgcctgctggagagaaaacacactcctttgcttagcccacaattctccatttcacttgacccctgcccacctctccaacctaactggcttacttcctagtctacttgaggctgcgatcacactgaggaactcacaattccaaacatataagaggctccctcttaacacggcacttagatacatgctattccacctttcctcatgttgttccacctttcctcagagtatctttcagccttctgtcagcagtaaaacttataaattttttttataatttcaatgtagttttctattcttcaagtaaacatgtctgccctcatggt

SEQ ID NO: 146222 - DNA, 1314 bp, Homo sapiens
  Payload ID: 8972
  Gene Symbol: KIR3DL3
  Gene Name: killer cell immunoglobulin-like receptor, three domains, long cytoplasmic tail, 3
  ENST ID: ENST00000610861
  CDS Start-End: 51-1283
tgctgctgaactgagctggggcgcagccgcctgtctgcaccggcagcaccatgtcgctcatggtcgtcagcatggcgtgtgttgggttcttcttgctggaggggccctggccacatgtgggtggtcaggacaagcccttcctctctgcctggcccggcactgtggtgtctgaaggacaacatgtgactcttcagtgtcgctctcatcttgggtttaacgaattcagtctgtccaaagaagacgggatgcctgtccctgagctctacaacagaatattccggaacagctttctcatgggccctgtgaccccagcacatgcagggacctacagatgttgcagttcacacccacactcccccactgggtggtcggcacccagcaaccctgtggtgatcatggtcacaggagtccacagaaaaccttccctcctggcccacccaggtcccctggtgaaatcgggagagacggtcatcctgcaatgttggtcagatgtcaggtttgagcgcttccttctgcacagagaggggatcactgaggaccccttgcgcctcgttggacagctccacgatgcgggttcccaggtcaactattccatgggtcccatgacacctgcccttgcagggacctacagatgctttggttctgtcactcacttaccctatgagttgtcggctcccagtgaccctctggacatcgtggtcgtaggtctatatgggaaaccttctctctcagcccagccgggccccacggttcaggcaggagagaatgtgaccttgtcctgcagctcccggagcttgtttgacatttaccatctatccagggaggcagaggccggtgaacttaggctcactgcggtgctgagggtcaatggaacattccaggccaacttccctctgggccctgtgacccacggagggaactacagatgcttcggctctttccgtgccctgccccacgcgtggtcagacccgagtgacccactgcccgtttctgtcacaggtaactccagacacctgcatgttctgattgggacctcagtggtcatcatcccctttgctatcctcctcttctttctccttcatcgctggtgtgccaacaaaaagaatgctgttgtaatggaccaagagcctgcagggaacagaacagtgaacagggaggactctgatgaacaagaccctcaggaggtgacatacgcacagttgaatcactgcgttttcacacagagaaaaatcactcgcccttctcagaggcccaagacacccccaacagataccagcgtgtaacacggaacttccaaatgctgagcgcagatcc

SEQ ID NO: 146223 - DNA, 1694 bp, Homo sapiens
  Payload ID: 8972
  Gene Symbol: KIR3DL3
  Gene Name: killer cell immunoglobulin-like receptor, three domains, long cytoplasmic tail, 3
  ENST ID: ENST00000612502
  CDS Start-End: 19-1251
gtctgcaccggcagcaccatgtcgctcatggtcgtcagcatggcgtgtgttgggttcttcttgctggaggggccctggccacatgtaggtggtcaggacaagcccttcctctctgcctggcccggcactgtggtgtctgaaggacaacatgtgactcttcagtgtcgctctcgtcttgggtttaacgaattcagtctgtccaaagaagacgggatgcctgtccctgagctctacaacagaatattccggaacagctttctcatgggccctgtgaccccagcacatgcagggacctacagatgttgcagttcacacccacactcccccactgggtggtcggcacccagcaaccctgtggtgatcatggtcacaggagtccacagaaaaccttccctcctggcccacccaggtcccctggtgaaatcgggagagacggtcatcctgcaatgttggtcagatgtcagttttgagcgcttccttctgcacagagaggggatcactgaggaccccttgcgcctcgttggacagctccacgatgcgggttcccaggtcaactattccatgggtcccatgacacctgcccttgcagggacctacagatgctttggttctgtcactcacttaccctatgagttgtcggctcccagtgaccctctggacatcgtggtcgtaggtctatatgggaaaccttctctctcagcccagccgggccccacggttcaggcaggagagaatgtgaccttgtcctgcagctcccggagcttgtttgacatttaccatctatccagggaggcagaggccggtgaacttaggctcactgcggtgctgagggtcaatggaacattccaggccaacttccctctgggccctgtgacccacggagggacctacagatgcttcggctctttccgtgccctgccccacgcgtggtcagacccgagtgacccactgcccgtttctgtcacaggtaactccagatacctgcacgctctgattgggacctcagtggtcatcatcccctttgctatcctcctcttctttctccttcatcgctggtgtgccaacaaaaagaatgctgttgtaatggaccaagagcctgcagggaacagaacagtgaacagggaggactctgatgaacaagaccctcaggaggtgacatacgcacagttgaatcactgcgttttcacacagagaaaaatcactcgcccttctcagaggcccaagacacccccaacagataccagcgtgtaacacggaacttccaaatgctgagcgcagatccaaagttgtcttctgtccaccagcaccacagtcaggccttgatgggatcttctagggagacaatagccctgtctcaaaaccgggttgccagctcccatgtaccagcagctggaatctgaaggcgtgagtctgcatcttagggcatcgctcttcctcacaccacgaatctgaacatgcctctctcttgcttacaaatgtctaaggtccccactgcctgctggagagaaaacacactcctttgcttagcccacaattctccatttcacttgacccctgcccacctctccaacctaactggcttacttcctagtctacttgaggctgcgatcacactgaggaactcacaattccaaacatataagaggctccctcttaacacggcacttagatacatgctattccacctttcctca

SEQ ID NO: 146224 - DNA, 1691 bp, Homo sapiens
  Payload ID: 8972
  Gene Symbol: KIR3DL3
  Gene Name: killer cell immunoglobulin-like receptor, three domains, long cytoplasmic tail, 3
  ENST ID: ENST00000622043
  CDS Start-End: 19-1251
gtctgcaccggcagcaccatgtcgctcatggtcgtcagcatggcgtgtgttgggttcttcttgctggaggggccctggccacatgtgggtggtcaggacaagcccttcctctctgcctggcccggcactgtggtgtctgaaggacaacatgtgactcttcagtgtcgctctcgtcttgggtttaacgaattcagtctgtccaaagaagacgggatgcctgtccctgagctctacaacagaatattccggaacagctttctcatgggccctgtgaccccagcacatgcagggacctacagatgttgcagttcacacccacactcccccactgggtggtcggcacccagcaaccctgtggtgatcatggtcacaggagtccacagaaaaccttccctcctggcccacccaggtcccctggtgaaatcgggagagacggtcatcctgcaatgttggtcagatgtcaggtttgagcgcttccttctgcacagagaggggatcactgaggaccccttgcgcctcattggacagctccacgatgcgggttcccaggtcaactattccatgggtcccatgacacctgcccttgcagggacctacagatgctttggttctgtcactcacttaccctatgagttgtcggctcccagtgaccctctggacatcgtggtcgtaggtctatatgggaaaccttctctctcagcccagccgggccccacggttcaggcaggagagaatgtgaccttgtcctgcagctcccggagcttgtttgacatttaccatctatccagggaggcagaggccggtgaacttaggctcactgcggtgctgagggtcaatggaacattccaggccaacttccctctgggccctgtgacccacggagggaactacagatgcttcggctctttccgtgccctgccccacgcgtggtcagacccgagtgacccactgcccgtttctgtcacaggtaactccagaaacctgcacgttctgattgggacctcagtggtcatcatcccctttgctatcctcctcttctttctccttcatcgctggtgtgccaacaaaaagaatgctgttgtaatggaccaagagcctgcagggaacagaacagtgaacagggaggactctgatgaacaagaccctcaggaggtgacatacgcacagttgaatcactgcgttttcacacagagaaaaatcactcgcccttctcagaggcccaagacacccccaacagataccagcgtgtaacacggaacttccaaatgctgagcgcagatccaaagttgtcttctgtccactagcaccacagtcaggccttgatgggatcttctagggagacaatagccctgtctcaaaaccgggttgccagctcccatgtaccagcagctggactctgaaggcgtgagtctgcatcttagggcatcgctcttcctcacaccacgaatctgaacatgcctctctcttgcttacaaatgtctaaggtccccactgcctgctggagagaaaacacacttgcttagcccacaattctccatttcacttgacccctgcccacctctccaacctaactggcttacttcctagtctacttgaggctgcgatcacactgaggaactcacaattccaaacatataagaggctccctcttaacacggcacttagatacgtgctattccacctttcctcag

SEQ ID NO: 146225 - DNA, 1314 bp, Homo sapiens; identical to SEQ ID NO: 146212
  Payload ID: 8972
  Gene Symbol: KIR3DL3
  Gene Name: killer cell immunoglobulin-like receptor, three domains, long cytoplasmic tail, 3
  ENST ID: ENST00000619074
  CDS Start-End: 51-1283

SEQ ID NO: 146226 - DNA, 1691 bp, Homo sapiens; identical to SEQ ID NO: 146205
  Payload ID: 8972
  Gene Symbol: KIR3DL3
  Gene Name: killer cell immunoglobulin-like receptor, three domains, long cytoplasmic tail, 3
  ENST ID: ENST00000610869
  CDS Start-End: 19-1251

SEQ ID NO: 146227 - DNA, 1833 bp, Homo sapiens
  Payload ID: 8972
  Gene Symbol: KIR3DL3
  Gene Name: killer cell immunoglobulin-like receptor, three domains, long cytoplasmic tail, 3
  ENST ID: ENST00000610437
  CDS Start-End: 20-1297
tgtctgcaccggcagcaccatgtcgctcatggtcgtcagcatggcgtgtgttgggttcttcttgctggaggggccctggccacatgtgggtggtcaggacaagcccttcctctctgcctggcccggcactgtggtgtctgaaggacaacatgtgactcttcagtgtcgctctcgtcttgggtttaaagaattcagtctgtccaaagaagacgggatgcctgtccctgagctctacaacagaatattccggaacagctttctcatgggccctgtgaccccagcacatgcagggacctacagatgttgcagttcacacccacactcccccactgggtggtcggcacccagcaaccctgtggtgatcatggtcacaggagtccacagaaaaccttccctcctggcccacccaggtcccctggtgaaatcgggagagacggtcatcctgcaatgttggtcagatgtcaggtttgagcgcttccttctgcacagagaggggatcactgaggaccccttgcgcctcgttggacagctccacgatgcgggttcccaggtcaactattccatgggtcccatgacacctgcccttgcagggacctacagatgctttggttctgtcactcacttaccctatgagttgtcggctcccagtgaccctctggacatcgtggtcgtaggtctatatgggaaaccttctctctcagcccagccgggccccacggttcaggcaggagagaatgtgaccttgtcctgcagctcccggagcttgtttgacatttaccatctatccagggaggcagaggccggtgaacttaggctcactgcggtgctgagggtcaatggaacattccaggccaacttccctctgggccctgtgacccacggagggacctacagatgcttcggctctttccgtgccctgccccacgcgtggtcagacccgagtgacccactgcccgtttctgtcacaggaactgctatgattagcttcttattggtgtcttgtcttcctccaggtaactccagacacctgcacgttctgattgggacctcagtggtcatcatcccctttgctatcctcctcttctttctccttcatcgctggtgtgccaacaaaaagaatgctgttgtaatggaccaagagcctgcagggaacagaacagtgaacagggaggactctgatgaacaagaccctcaggaggtgacatacgcacagttgaatcactgcgttttcacacagagaaaaatcactcgcccttctcagaggcccaagacacccccaacagataccagcgtgtaacacggaacttccaaatgctgagcgcagatccaaagttgtcttctgtccactagcaccacagtcaggccttgatgggatcttctagggagacaatagccctgtctcaaaaccgggttgccagctcccatgtaccagcagctggactctgaaggcgtgagtctgcatcttagggcatcgctcttcctcacaccacgaatctgaacatgcctctctcttgcttacaaatgtctaaggtccccactgcctgctggagagaaaacacacttgcttagcccacaattctccatttcacttgacccctgcccacctctccaacctaactggcttacttcctagtctacttgaggctgcgatcacactgaggaactcacaattccaaacatataagaggctccctcttaacacggcacttagatacgtgctattccacctttcctcagagtatctttcagccttctgtcagcagtaaaacttataaattttttttataatttcaatgtagttttctcttcttcaagtaaacatgtctgccctca

SEQ ID NO: 146228 - DNA, 1494 bp, Homo sapiens
  Payload ID: 8972
  Gene Symbol: KIR3DL3
  Gene Name: killer cell immunoglobulin-like receptor, three domains, long cytoplasmic tail, 3
  ENST ID: ENST00000612757
  CDS Start-End: 26-1390
gccgcctgtctgcaccggcagcaccatgtcgctcatggtcgtcagcatggcgtgtgttgggttcttcttgctggaggggccctggccacatgtgggtggtcaggacaagcccttcctctctgcctggcccggcactgtggtgtctgaaggacaacatgtgactcttcagtgtcgctctcgtcttgggtttaacgaattcagtctgtccaaagaagacgggatgcctgtccctgagctctacaacagaatattccggaacagctttctcatgggccctgtgaccccagcacatgcagggacctacagatgttgcagttcacacccacactcccccactgggtggtcggcacccagcaaccctgtggtgatcatggtcacaggagtccacagaaaaccttccctcctggcccacccaggtcccctggtgaaatcgggagagacggtcatcctgcaatgttggtcagatgtcaggtttgagcgcttccttctgcacagagaggggatcactgaggaccccttgcgcctcattggacagctccacgatgcgggttcccaggtcaactattccatgggtcccatgacacctgcccttgcagggacctacagatgctttggttctgtcactcacttaccctatgagttgtcggctcccagtgaccctctggacatcgtggtcgtaggtctatatgagaaaccttctctctcagcccagccgggccccacggttttggcaggagagagcgtgaccttgtcctgcagctcccggagctcctatgacatgtaccatctatccagggagggggaggcccatgaacgtaggttctctgcagggcccaaggtcaacggaacattccaggccgactttcctctgggccctgccacccacggaggaacctacagatgcttcggctctttccgtgactctccctatgagtggtcaaactcgagtgacccactgcttgtttctgtcacaggaaacccttcaaatagttggccttcacccactgaaccaagctccaaaaccggtaaccccagacacctgcatgttctgattgggacctcagtggtcaaaatccctttcaccatcctcctcttctttctccttcatcgctggtgctccaacaaaaaaaatgctgctgtaatggaccaagagcctgcagggaacagaacagtgaacagcgaggactctgatgaacaagaccctcaggaggtgacatacacacagttgaatcactgcgttttcacacagagaaaaatcactcgcccttctcagaggcccaagacacccccaacagatatcatcgtgtacacggaacttccaaatgctgagtccagatccaaagttgtctcctgcccagcaccacagtcaggccttgagggcgtcttctagggagacaacagccctgtctcaaaaccgggttgccagctcccatgtaccagcagctggaatctgaaggcatgagtctgcatcttagggcatcgctcttcctcaca

SEQ ID NO: 146229 - DNA, 1314 bp, Homo sapiens
  Payload ID: 8972
  Gene Symbol: KIR3DL3
  Gene Name: killer cell immunoglobulin-like receptor, three domains, long cytoplasmic tail, 3
  ENST ID: ENST00000614181
  CDS Start-End: 51-1283
tgctgctgaactgagctggggcgcagccgcctgtctgcaccggcagcaccatgtcgctcatggtcgtcagcatggcgtgtgttgggttcttcttgctggaggggccctggccacatgtgggtggtcaggacaagcccttcctctctgcctggcccggcactgtggtgtctgaaggacaacatgtgactcttcagtgtcgctctcgtcttgggtttaatgaattcagtctgtccaaagaagacgggatgcctgtccctgagctctacaacagaatattccggaacagctttctcatgggccctgtgaccccagcacatgcagggacctacagatgttgcagttcacacccacactcccccactgggtggtcggcacccagcaaccctgtggtgatcatggtcacaggagtccacagaaaaccttccctcctggcccacccaggtcccctggtgaaatcaggagagacggtcatcctgcaatgttggtcagatgtcaggtttgagcgcttccttctgcacagagaggggatcactgaggaccccttgcgcctcgttggacagctccacgatgcgggttcccaggtcaactattccatgggtcccatgacacctgcccttgcagggacctacagatgctttggttctgtcactcacttaccctatgagttgtcggctcccagtgaccctctggacatcgtggtcgtaggtctatatgggaaaccttctctctcagcccagccgggccccacggttcaggcaggagagaatgtgaccttgtcctgcagctcccggagcttgtttgacatttaccatctatccagggaggcggaggccggtgaacttaggctcactgcagtgctgagggtcaatggaacattccaggccaacttccctctgggccctgtgacccacggagggaactacagatgcttcggctctttccgtgccctgccccatgcgtggtcagacccgagtgacccactgcccgtttctgtcacaggtaactccagatacctgcacgctctgattgggacctcagtggtcatcatcccctttgctatcctcctcttctttctccttcatcgctggtgtgccaacaaaaagaatgctgttgtaatggaccaagagcctgcagggaacagaacagtgaacagggaggactctgatgaacaagaccctcaggaggtgacatacgcacagttgaatcactgcgttttcacacagagaaaaatcactcgcccttctcagaggcccaagacacccccaacagataccagcgtgtaacacggaacttccaaatgctgagcgcagatcc

SEQ ID NO: 146230 - DNA, 1691 bp, Homo sapiens
  Payload ID: 8972
  Gene Symbol: KIR3DL3
  Gene Name: killer cell immunoglobulin-like receptor, three domains, long cytoplasmic tail, 3
  Uniprot ID: Q8N743
  ENST ID: ENST00000613010
  CDS Start-End: 19-1251
gtctgcaccggcagcaccatgtcgctcatggtcgtcagcatggcgtgtgttgggttcttcttgctggaggggccctggccacatgtgggtggtcaggacaagcccttcctctctgcctggcccggcactgtggtgtctgaaggacaacatgtgactcttcagtgtcgctctcgtcttgggtttaatgaattcagtctgtccaaagaagacgggatgcctgtccctgagctctacaacagaatattccggaacagctttctcatgggccctgtgaccccagcacatgcagggacctacagatgttgcagttcacacccacactcccccactgggtggtcggcacccagcaaccctgtggtgatcatggtcacaggagtccacagaaaaccttccctcctggcccacccaggtcccctggtgaaatcgggagagacggtcatcctgcaatgttggtcagatgtcaggtttgagcgcttccttctgcacagagaggggatcactgaggaccccttgcgcctcgttggacagctccacgatgcgggttcccaggtcaactattccatgggtcccatgacacctgcccttgcagggacctacagatgctttggttctgtcactcacttaccctatgagttgtcggctcccagtgaccctctggacatcgtggtcgtaggtctatatgggaaaccttctctctcagcccagccgggccccacggttcaggcaggagagaatgtgaccttgtcctgcagctcccggagcttgtttgacatttaccatctatccagggaggcggaggccggtgaacttaggctcactgcagtgctgagggtcaatggaacattccaggccaacttccctctgggccctgtgacccacggagggaactacagatgcttcggctctttccgtgccctgccccatgcgtggtcagacccgagtgacccactgcccgtttctgtcacaggtaactccagacacctgcacgttctgattgggacctcagtggtcatcatcccctttgctatcctcctcttctttctccttcatcgctggtgtgccaacaaaaagaatgctgttgtaatggaccaagagcctgcagggaacagaacagtgaacagggaggactctgatgaacaagaccctcaggaggtgacatacgcacagttgaatcactgcgttttcacacagagaaaaatcactcgcccttctcagaggcccaagacacccccaacagataccagcgtgtaacacggaacttccaaatgctgagcgcagatccaaagttgtcttctgtccactagcaccacagtcaggccttgatgggatcttctagggagacaatagccctgtctcaaaaccgggttgccagctcccatgtaccagcagctggactctgaaggcgtgagtctgcatcttagggcatcgctcttcctcacaccacgaatctgaacatgcctctctcttgcttacaaatgtctaaggtccccactgcctgctggagagaaaacacacttgcttagcccacaattctccatttcacttgacccctgcccacctctccaacctaactggcttacttcctagtctacttgaggctgcgatcacactgaggaactcacaattccaaacatataagaggctccctcttaacacggcacttagatacgtgctattccacctttcctcag

SEQ ID NO: 146231 - DNA, 1726 bp, Homo sapiens
  Payload ID: 8972
  Gene Symbol: KIR3DL3
  Gene Name: killer cell immunoglobulin-like receptor, three domains, long cytoplasmic tail, 3
  ENST ID: ENST00000613313
  CDS Start-End: 51-1283
tgctgctgaactgagctggggcgcagccgcctgtctgcaccggcagcaccatgtcgctcatggtcgtcagcatggcgtgtgttgggttcttcttgctggaggggccctggccacatgtgggtggtcaggacaagcccttcctctctgcctggcccggcactgtggtgtctgaaggacaacatgtgactcttcagtgtcgctctcgtcttgggtttaatgaattcagtctgtccaaagaagacgggatgcctgtccctgagctctacaacagaatattccggaacagctttctcatgggccctgtgaccccagcacatgcagggacctacagatgttgcagttcacacccacactcccccactgggtggtcggcacccagcaaccctgtggtgatcatggtcacaggagtccacagaaaaccttccctcctggcccacccaggtcccctggtgaaatcaggagagacggtcatcctgcaatgttggtcagatgtcaggtttgagcgcttccttctgcacagagaggggatcactgaggaccccttgcgcctcgttggacagctccacgatgcgggttcccaggtcaactattccatgggtcccatgacacctgcccttgcagggacctacagatgctttggttctgtcactcacttaccctatgagttgtcggctcccagtgaccctctggacatcgtggtcgtaggtctatatgggaaaccttctctctcagcccagccgggccccacggttcaggcaggagagaatgtgaccttgtcctgcagctcccggagcttgtttgacatttaccatctatccagggaggcggaggccggtgaacttaggctcactgcagtgctgagggtcaatggaacattccaggccaacttccctctgggccctgtgacccacggagggaactacagatgcttcggctctttccgtgccctgccccatgcgtggtcagacccgagtgacccactgcccgtttctgtcacaggtaactccagatacctgcacgctctgattgggacctcagtggtcatcatcccctttgctatcctcctcttctttctccttcatcgctggtgtgccaacaaaaagaatgctgttgtaatggaccaagagcctgcagggaacagaacagtgaacagggaggactctgatgaacaagaccctcaggaggtgacatacgcacagttgaatcactgcgttttcacacagagaaaaatcactcgcccttctcagaggcccaagacacccccaacagataccagcgtgtaacacggaacttccaaatgctgagcgcagatccaaagttgtcttctgtccaccagcaccacagtcaggccttgatgggatcttctagggagacaatagccctgtctcaaaaccgggttgccagctcccatgtaccagcagctggaatctgaaggcgtgagtctgcatcttagggcatcgctcttcctcacaccacgaatctgaacatgcctctctcttgcttacaaatgtctaaggtccccactgcctgctggagagaaaacacactcctttgcttagcccacaattctccatttcacttgacccctgcccacctctccaacctaactggcttacttcctagtctacttgaggctgcgatcacactgaggaactcacaattccaaacatataagaggctccctcttaacacggcacttagatacatgctattccacctttcctca

SEQ ID NO: 146232 - DNA, 1314 bp, Homo sapiens
  Payload ID: 8972
  Gene Symbol: KIR3DL3
  Gene Name: killer cell immunoglobulin-like receptor, three domains, long cytoplasmic tail, 3
  ENST ID: ENST00000611663
  CDS Start-End: 51-1283
tgctgctgaactgagctggggcgcagccgcctgtctgcaccggcagcaccatgtcgctcatggtcgtcagcatggcgtgtgttgggttcttcttgctggaggggccctggccacatgtgggtggtcaggacaagcccttcctctctgcctggcccggcactgtggtgtctgaaggacaacatgtgactcttcagtgtcgctctcgtcttgggtttaatgaattcagtctgtccaaagaagacgggatgcctgtccctgagctctacaacagaatattctggaacagctttctcatgggccctgtgaccccagcacatgcagggacctacagatgttgcagttcacacccacactcccccactgggtggtcggcacccagcaaccctgtggtgatcatggtcacaggagtccacagaaaaccttccctcctggcccacccaggtcccctggtgaaatcgggagagacggtcatcctgcaatgttggtcagatgtcaggtttgagcgcttccttctgcacagagaggggatcactgaggaccccttgcgcctcattggacagctccacgatgcgggttcccaggtcaactattccatgggtcccatgacacctgcccttgcagggacctacagatgctttggttctgtcactcacttaccctatgagttgtcggctcccagtgaccctctggacatcgtggtcgtaggtctatatgggaaaccttctctctcagcccagccgggccccacggttcaggcaggagagaatgtgaccttgtcctgcagctcccggagcttgtttgacatttaccatctatccagggaggcagaggccggtgaacttaggctcactgcggtgctgagggtcaatggaacattccaggccaacttccctctgggccctgtgacccacggagggaactacagatgcttcggctctttccgtgccctgccccacgcgtggtcagacccgagtgacccactgcccgtttctgtcacaggtaactccagaaacctgcacgttctgattgggacctcagtggtcatcatcccctttgctatcctcctcttctttctccttcatcgctggtgtgccaacaaaaagaatgctgttgtaatggaccaagagcctgcagggaacagaacagtgaacagggaggactctgatgaacaagaccctcaggaggtgacatacgcacagttgaatcactgcgttttcacacagagaaaaatcactcgcccttctcagaggcccaagacacccccaacagataccagcgtgtaacacggaacttccaaatgctgagcgcagatcc

SEQ ID NO: 146233 - DNA, 1694 bp, Homo sapiens; identical to SEQ ID NO: 146206
  Payload ID: 8972
  Gene Symbol: KIR3DL3
  Gene Name: killer cell immunoglobulin-like receptor, three domains, long cytoplasmic tail, 3
  ENST ID: ENST00000613587
  CDS Start-End: 19-1251

SEQ ID NO: 146234 - DNA, 1691 bp, Homo sapiens
  Payload ID: 8972
  Gene Symbol: KIR3DL3
  Gene Name: killer cell immunoglobulin-like receptor, three domains, long cytoplasmic tail, 3
  ENST ID: ENST00000620851
  CDS Start-End: 19-1251
gtctgcaccggcagcaccatgtcgctcatggtcgtcagcatggcgtgtgttgggttcttcttgctggaggggccctggccacatgtgggtggtcaggacaagcccttcctctctgcctggcccggcactgtggtgtctgaaggacaacatgtgactcttcagtgtcgctctcgtcttgggtttaaagaattcagtctgtccaaagaagacgggatgcctgtccctgagctctacaacagaatattccggaacagctttctcatgggccctgtgaccccagcacatgcagggacctacagatgttgcagttcacacccacactcccccactgggtggtcggcacccagcaaccctgtggtgatcatggtcacaggagtccacagaaaaccttccctcctggcccacccaggtcccctggtgaaatcgggagagacggtcatcctgcaatgttggtcagatgtcaggtttgagcgcttccttctgcacagagaggggatcactgaggaccccttgcgcctcgttggacagctccacgatgcgggttcccaggtcaactattccatgggtcccatgacacctgcccttgcagggacctacagatgctttggttctgtcactcacttaccctatgagttgtcggctcccagtgaccctctggacatcgtggtcgtaggtctatatgggaaaccttctctctcagcccagccgggccccacggttcaggcaggagagaatgtgaccttgtcctgcagctcccggagcttgtttgacatttaccatctatccagggaggcagaggccggtgaacttaggctcactgcggtgctgagggtcaatggaacattccaggccaacttccctctgggccctgtgacccacggagggacctacagatgcttcggctctttccgtgccctgccccacgcgtggtcagacccgagtgacccactgcccgtttctgtcacaggtaactccagacacctgcacgttctgattgggacctcagtggtcatcatcccctttgctatcctcctcttctttctccttcatcgctggtgtgccaacaaaaagaatgctgttgtaatggaccaagagcctgcagggaacagaacagtgaacagggaggactctgatgaacaagaccctcaggaggtgacatacgcacagttgaatcactgcgttttcacacagagaaaaatcactcgcccttctcagaggcccaagacacccccaacagataccagcgtgtaacacggaacttccaaatgctgagcgcagatccaaagttgtcttctgtccactagcaccacagtcaggccttgatgggatcttctagggagacaatagccctgtctcaaaaccgggttgccagctcccatgtaccagcagctggactctgaaggcgtgagtctgcatcttagggcatcgctcttcctcacaccacgaatctgaacatgcctctctcttgcttacaaatgtctaaggtccccactgcctgctggagagaaaacacacttgcttagcccacaattctccatttcacttgacccctgcccacctctccaacctaactggcttacttcctagtctacttgaggctgcgatcacactgaggaactcacaattccaaacatataagaggctccctcttaacacggcacttagatacgtgctattccacctttcctcag

SEQ ID NO: 146235 - DNA, 1691 bp, Homo sapiens
  Payload ID: 8972
  Gene Symbol: KIR3DL3
  Gene Name: killer cell immunoglobulin-like receptor, three domains, long cytoplasmic tail, 3
  ENST ID: ENST00000618920
  CDS Start-End: 19-1251
gtctgcaccggcagcaccatgtcgctcatggtcgtcagcatggcgtgtgttgggttcttcttgctggaggggccctggccacatgtgggtggtcaggacaagcccttcctctctgcctggcccggcactgtggtgtctgaaggacaacatgtgactcttcagtgtcgctctcatcttgggtttaacgaattcagtctgtccaaagaagacgggatgcctgtccctgagctctacaacagaatattccggaacagctttctcatgggccctgtgaccccagcacatgcagggacctacagatgttgcagttcacacccacactcccccactgggtggtcggcacccagcaaccctgtggtgatcatggtcacaggagtccacagaaaaccttccctcctggcccacccaggtcccctggtgaaatcgggagagacggtcatcctgcaatgttggtcagatgtcaggtttgagcgcttccttctgcacagagaggggatcactgaggaccccttgcgcctcgttggacagctccacgatgcgggttcccaggtcaactattccatgggtcccatgacacctgcccttgcagggacctacagatgctttggttctgtcactcacttaccctatgagttgtcggctcccagtgaccctctggacatcgtggtcgtaggtctatatgggaaaccttctctctcagcccagccgggccccacggttcaggcaggagagaatgtgaccttgtcctgcagctcccggagcttgtttgacatttaccatctatccagggaggcagaggccggtgaacttaggctcactgcggtgctgagggtcaatggaacattccaggccaacttccctctgggccctgtgacccacggagggaactacagatgcttcggctctttccgtgccctgccccacgcgtggtcagacccgagtgacccactgcccgtttctgtcacaggtaactccagacacctgcacgttctgattgggacctcagtggtcatcatcccctttgctatcctcctcttctttctccttcatcgctggtgtgccaacaaaaagaatgctgttgtaatggaccaagagcctgcagggaacagaacagtgaacagggaggactctgatgaacaagaccctcaggaggtgacatacgcacagttgaatcactgcgttttcacacagagaaaaatcactcgcccttctcagaggcccaagacacccccaacagataccagcgtgtaacacggaacttccaaatgctgagcgcagatccaaagttgtcttctgtccactagcaccacagtcaggccttgatgggatcttctagggagacaatagccctgtctcaaaaccgggttgccagctcccatgtaccagcagctggactctgaaggcgtgagtctgcatcttagggcatcgctcttcctcacaccacgaatctgaacatgcctctctcttgcttacaaatgtctaaggtccccactgcctgctggagagaaaacacacttgcttagcccacaattctccatttcacttgacccctgcccacctctccaacctaactggcttacttcctagtctacttgaggctgcgatcacactgaggaactcacaattccaaacatataagaggctccctcttaacacggcacttagatacgtgctattccacctttcctcag

SEQ ID NO: 146236 - DNA, 1691 bp, Homo sapiens; identical to SEQ ID NO: 146204
  Payload ID: 8972
  Gene Symbol: KIR3DL3
  Gene Name: killer cell immunoglobulin-like receptor, three domains, long cytoplasmic tail, 3
  ENST ID: ENST00000614255
  CDS Start-End: 19-1251

SEQ ID NO: 146237 - DNA, 1604 bp, Homo sapiens
  Payload ID: 8972
  Gene Symbol: KIR3DL3
  Gene Name: killer cell immunoglobulin-like receptor, three domains, long cytoplasmic tail, 3
  ENST ID: ENST00000617584
  CDS Start-End: 1-1164
ggtggtcaggacaagcccttcctctctgcctggcccggcactgtggtgtctgaaggacaacatgtgactcttcagtgtcgctctcgtcttgggtttaatgaattcagtctgtccaaagaagacgggatgcctgtccctgagctctacaacagaatattccggaacagctttctcatgggccctgtgaccccagcacatgcagggacctacagatgttgcagttcacacccacactcccccactgggtggtcggcacccagcaaccctgtggtgatcatggtcacaggagtccacagaaaaccttccctcctggcccacccaggtcccctggtgaaatcaggagagacggtcatcctgcaatgttggtcagatgtcaggtttgagcgcttccttctgcacagagaggggatcactgaggaccccttgcgcctcgttggacagctccacgatgcgggttcccaggtcaactattccatgggtcccatgacacctgcccttgcagggacctacagatgctttggttctgtcactcacttaccctatgagttgtcggctcccagtgaccctctggacatcgtggtcgtaggtctatatgggaaaccttctctctcagcccagccggaccccacggttcaggcaggagagaatgtgaccttgtcctgcagctctcggagcttgtttgacatttaccatctatccagggaggcagaggccggtgaacttaggctcactgcagtgctgagggtcaatggaacattccaggccaacttccctctgggccctgtgacccacggagggaactacagatgcttcggctctttccgtgccctgccccacgcgtggtcagacccgagtgacccactgcccgtttctgtcacaggtaactccagacacctgcacgttctgattgggacctcagtggtcatcatcccctttgctatcctcctcttctttctccttcatcgctggtgtgccaacaaaaagaatgctgttgtaatggaccaagagcctgcagggaacagaacagtgaacagggaggactctgatgaacaagaccctcaggaggtgacatacgcacagttgaatcactgcgttttcacacagagaaaaatcactcgcccttctcagaggcccaagacacccccaacagataccagcgtgtaacacggaacttccaaatgctgagcgcagatccaaagttgtcttctgtccactagcaccacagtcaggccttgatgggatcttctagggagacaatagccctgtctcaaaaccgggttgccagctcccatgtaccagcagctggactctgaaggcgtgagtctgcatcttagggcatcgctcttcctcacaccacgaatctgaacatgcctctctcttgcttacaaatgtctaaggtccccactgcctgctggagagaaaacacacttgcttagcccacaattctccatttcacttgacccctgcccacctctccaacctaactggcttacttcctagtctacttgaggctgcgatcacactgaggaactcacaattccaaacatataagaggctccctcttaacacggcacttagatacgtgctattccacctttcctcag

SEQ ID NO: 146238 - DNA, 1294 bp, Homo sapiens
  Payload ID: 8973
  Gene Symbol: KIR3DP1
  Gene Name: killer cell immunoglobulin-like receptor, three domains, pseudogene 1
  ENST ID: ENST00000614885
  CDS Start-End: 2-988
catgtcgctcatggtcgtcagcatggcgtgtgttgggttcttcttgctgcagggggcctggccacatgagggtggtcaggacaagcccttcctctctgcctggcccagccctgtggtgtctgaaggagaacatgtggctcttcagtgtcgctctcgtcttgggtttaacgaattcagtctgtccaaagaagacgggatgcctgtccctgagctctacaacagagtattccgaaacaccgttttcataggccctgtgaccccagcacatgcagggacctacagatgtcggggttcacacccacacttcctcactgggtggtcagcacccagcaaccccctggtgatcatggtcacaggagtccacagaaaaccttccctcctggcccacccaggtcccctggtgaaatcagaagagacagtcatcctgcaatgttggtcagatgtcatgtttgagcacttccttctgcacagagaggggaagtttaatgacactttgcgcctcactggagagctccatgatggggtctccaaggccaacttctccatcggtcgcatgacgcaagaccttgcagggacctacagatgctacggttctgttcctcattccccctatcagttgtcagctcccagtgaccctctggacatcgtgattacaggtctatgtgggaaaccttctctctcagcccagccgcgccccatggttaaggcaggagagagcgtgaccttgtcctgcagctcccggagctcctatgacatctaccatctatcaagggacggggaggctcatgaacttaggttccctgcagtgcccaaggtcaatggaaccttccaggccaactttcctctgggccctgccacccacggagggacctacagatgcttcggctctttccgtgactctccctacgagtggtcagaccttagtgacccactgcttgtttctgtcacagattctatgaaggagaaaggaaaagatgtgatactgtaattttgctccatttgtctaaaatgagtaggctgcaactcctcttgaagtgataccttttctagctcttgttggaggtgtctcaggactcattacttcggggaacctgcaactgtgtcagtctggggaaactgcaaatattcttgtcttacatttgtctccagccaattgtgatggactccagtgacctgcaattgctgttattgcaggtaaaatgtacctgagtcaggccacagttctcctggactatgagcccctggccatgttcctgaggcaattctgttcatctaaatataataataataacac

SEQ ID NO: 146239 - DNA, 1294 bp, Homo sapiens; identical to SEQ ID NO: 139185
  Payload ID: 8973
  Gene Symbol: KIR3DP1
  Gene Name: killer cell immunoglobulin-like receptor, three domains, pseudogene 1
  ENST ID: ENST00000621881
  CDS Start-End: 2-988

SEQ ID NO: 146240 - DNA, 978 bp, Homo sapiens
  Payload ID: 8974
  Gene Symbol: KIR3DS1
  Gene Name: killer cell immunoglobulin-like receptor, three domains, short cytoplasmic tail, 1
  ENST ID: ENST00000611309
  CDS Start-End: 12-839
ccggcagcaccatgttgctcatggtcgtcagcatggcgtgtgttggaaaccacagaaaaccttccctcctggcccacccaggtcccctggtgaaatcaggagagagagtcatcctgcaatgttggtcagatatcatgtttgagcacttctttctgcacaaagagtggatctctaaggacccctcacgcctcgttggacagatccatgatggggtctccaaggccaatttctccatcggttccatgatgcgtgcccttgcagggacctacagatgctacggttctgttactcacaccccctatcagttgtcagctcccagtgatcccctggacatcgtggtcacaggtctatatgagaaaccttctctctcagcccagccgggccccaaggttcaggcaggagagagcgtgaccttgtcctgtagctcccggagctcctatgacatgtaccatctatccagggaggggggagcccatgaacgtaggctccctgcagtgcgcaaggtcaacagaacattccaggcagatttccctctgggccctgccacccacggagggacctacagatgcttcggctctttccgtcactctccctacgagtggtcagacccgagtgacccactgcttgtttctgtcacaggaaacccttcaagtagttggccttcacccacagaaccaagctccaaatctggtaacctcagacacctgcacattctgattgggacctcagtggtcaaaatccctttcaccatcctcctcttctttctccttcatcgctggtgctccaacaaaaaaaaatgctgctgtaatggaccaagagcctgcagggaacagaagtgaacagcgaggattctgatgaacaagaccatcaggaggtgtcatacgcataattggaacactgtgttttcacacagagaaaaatcactcgcccttctcagaggcccaagacacccccaacagataccagcatgtacataga

SEQ ID NO: 146241 - DNA, 1740 bp, Homo sapiens
  Payload ID: 8974
  Gene Symbol: KIR3DS1
  Gene Name: killer cell immunoglobulin-like receptor, three domains, short cytoplasmic tail, 1
  Uniprot ID: Q14943
  ENST ID: ENST00000616075
  CDS Start-End: 12-1175
ccggcagcaccatgtcgctcatggtcgtcagcatggcgtgtgttgggttgttcttggtccagagggccggtccacacatgggtggtcaggacaagcccttcctgtctgcctggcccagcgctgtggtgcctcgcggaggacacgtgactcttcggtgtcactatcgtcataggtttaacaatttcatgctatacaaagaagacagaatccacgttcccatcttccatggcagaatattccaggagggcttcaacatgagccctgtgaccacagcacatgcagggaactacacatgtcggggttcacacccacactcccccactgggtggtcggcacccagcaaccccatggtgatcatggtcacaggaaaccacagaaaaccttccctcctggcccacccaggtcccctggtgaaatcaggagagagagtcatcctgcaatgttggtcagatatcatgtttgagcacttctttctgcacaaagagtggatctctaaggacccctcacgcctcgttggacagatccatgatggggtctccaaggccaatttctccatcggttccatgatgcgtgcccttgcagggacctacagatgctacggttctgttactcacaccccctatcagttgtcagctcccagtgatcccctggacatcgtggtcacaggtctatatgagaaaccttctctctcagcccagccgggccccaaggttcaggcaggagagagcgtgaccttgtcctgtagctcccggagctcctatgacatgtaccatctatccagggaggggggagcccatgaacgtaggctccctgcagtgcgcaaggtcaacagaacattccaggcagatttccctctgggccctgccacccacggagggacctacagatgcttcggctctttccgtcactctccctacgagtggtcagacccgagtgacccactgcttgtttctgtcacaggaaacccttcaagtagttggccttcacccacagaaccaagctccaaatctggtaacctcagacacctgcacattctgattgggacctcagtggtcaaaatccctttcaccatcctcctcttctttctccttcatcgctggtgctccaacaaaaaaaatgctgctgtaatggaccaagagcctgcagggaacagaagtgaacagcgaggattctgatgaacaagaccatcaggaggtgtcatacgcataattggaacactgtgttttcacacagagaaaaatcactcgcccttctcagaggcccaagacacccccaacagataccagcatgtacatagaacttccaaatgctgagcccagatccaaagttgtcttctgtccacgagcaccacagtcaggccttgaggggatcttctagggagacaacagccctgtctcaaaactgggttgccagctcccatgtaccagcagctggaatctgaaggcatcagtcttcatcttagggcatcgctcttcctcacaccacaaatctgaatgtgcctctcacttgcttacaaatgtctaaggtccccactgcctgctggagaaaaaacacactcctttgcttagcccacagttctccatttcacttgacccctgcccacctctccaacctaactggcttacttcctagtctacttgaggctgcaatcacactgaggaactcacaattccacacatacaagaggctccgtcttaacgcagcacttagacacgtgctgttccaccttccctcatgctg

SEQ ID NO: 146242 - DNA, 1497 bp, Homo sapiens
  Payload ID: 8974
  Gene Symbol: KIR3DS1
  Gene Name: killer cell immunoglobulin-like receptor, three domains, short cytoplasmic tail, 1
  ENST ID: ENST00000611562
  CDS Start-End: 26-1393
gccgcctgtctgcaccggcagcaccatgtcgctcatggtcgtcagcatggcgtgtgttgggttcttcttggaccagagtgtgtgggcacacgtgggtggtcaggacaagcccttcctgtctgcctggcccagcgctgtggtgcctcgcggaggacacgtgactcttcggtgtcactatcgtcataggtttaacaatttcatgctatacaaagaagacagaatccacgttcccatcttccatggcagaatattccaggagggcttcaacatgagccctgtgaccacagcacatgcagggaactacacatgtcggggttcacacccacactcccccactgggtggtcggcacccagcaaccccatggtgatcatggtcacaggaaaccacagaaaaccttccctcctggcccacccaggtcccctggtgaaatcaggagagagagtcatcctgcaatgttggtcagatatcatgtttgagcacttctttctgcacagagagtggatctctaaggacccctcacgcctcgttggacagatccatgatggggtctccaaggccaatttctccatcggttccatgatgcgtgcccttgcagggacctacagatgctacggttctgttactcacaccccctatcagttgtcagctcccagtgatcccctggacatcgtggtcacaggtctatatgagaaaccttctctctcagcccagccgggccccaaggttcaggcaggagagagcgtgaccttgtcctgtagctcccggagctcctatgacatgtaccatctatccagggaggggggagcccatgaacgtaggctccctgcagtgcgcaaggtcaacagaacattccaggcagatttccctctgggccctgccacccacggagggacctacagatgcttcggctctttccgtcactctccctacgagtggtcagacccgagtgacccactgcttgtttctgtcacaggaaacccttcaagtagttggccttcacccacagaaccaagctccaaatctggtatccgcagacacctgcacattctgattgggacctcagtggctatcatcctcttcatcatcctcttcttctttctccttcattgctgctgctccaacaaaaagaatgctgctgtaatggaccaagagcctgccggggacagaacagtgaacagggaggactctgatgatcaagaccctcaggaggtgacatatgcacagttggatcactgcgttttcacacagagaaaaatcactcccccttctcagaggcccaagacacccccaacagataccagcatgtacatagaacttccaaatgctgagtccagatccaaagctgtcttctgtccacgagcaccacagtcaggccttgaggggatcttctagggagacaacagccctgtctcaaaaccgggttgccagctcccatgtaccagcagctggaatctgaaggcatcagtcttcatcttaggggatcgctcttcctcaaa

SEQ ID NO: 146243 - DNA, 1541 bp, Homo sapiens
  Payload ID: 8974
  Gene Symbol: KIR3DS1
  Gene Name: killer cell immunoglobulin-like receptor, three domains, short cytoplasmic tail, 1
  ENST ID: ENST00000618890
  CDS Start-End: 38-1186
agctggggcgcagccgcctgtctgcaccggcagcaccatgttgctcatggtcgtcagcatggcgtgtgttgggttgttcttggtccagagggccggtccacacatgggtggtcaggacaagcccttcctgtctgcctggcccagcgctgtggtgcctcgcggaggacacgtgactcttcggtgtcactatcgtcataggtttaacaatttcatgctatacaaagaagacagaatccacgttcccatcttccatggcagaatattccaggagggcttcaacatgagccctgtgaccacagcacatgcagggaactacacatgtcggggttcacacccacactcccccactgggtggtcggcacccagcaaccccatggtgatcatggtcacaggaaaccacagaaaaccttccctcctggcccacccaggtcccctggtgaaatcaggagagagagtcatcctgcaatgttggtcagatatcatgtttgagcacttctttctgcacaaagagtggatctctaaggacccctcacgcctcgttggacagatccatgatggggtctccaaggccaatttctccatcggttccatgatgcgtgcccttgcagggacctacagatgctacggttctgttactcacaccccctatcagttgtcagctcccagtgatcccctggacatcgtggtcacaggtctatatgagaaaccttctctctcagcccagccgggccccaaggttcaggcaggagagagcgtgaccttgtcctgtagctcccggagctcctatgacatgtaccatctatccagggaggggggagcccatgaacgtaggctccctgcagtgcgcaaggtcaacagaacattccaggcagatttccctctgggccctgccacccacggagggacctacagatgcttcggctctttccgtcactctccctacgagtggtcagacccgagtgacccactgcttgtttctgtcacaggaaacccttcaagtagttggccttcacccacagaaccaagctccaaatctggtaacctcagacacctgcacattctgattgggacctcagtggtcaaaatccctttcaccatcctcctcttctttctccttcatcgctggtgctccaacaaaaaaaaatgctgctgtaatggaccaagagcctgcagggaacagaagtgaacagcgaggattctgatgaacaagaccatcaggaggtgtcatacgcataattggaacactgtgttttcacacagagaaaaatcactcgcccttctcagaggcccaagacacccccaacagataccagcatgtacatagaacttccaaatgctgagcccagatccaaagttgtcttctgtccacgagcaccacagtcaggccttgaggggatcttctagggagacaacagccctgtctcaaaactgggttgccagctcccatgtaccagcagctggaatctgaaggcatcagtcttcatcttagggcatcgctcttcctcacaccacaaatctgaatgtgcctctcacttgcttac

SEQ ID NO: 146244 - DNA, 1740 bp, Homo sapiens; identical to SEQ ID NO: 146241
  Payload ID: 8974
  Gene Symbol: KIR3DS1
  Gene Name: killer cell immunoglobulin-like receptor, three domains, short cytoplasmic tail, 1
  Uniprot ID: Q14943
  ENST ID: ENST00000619911
  CDS Start-End: 12-1175

SEQ ID NO: 146245 - DNA, 1380 bp, Homo sapiens
  Payload ID: 8974
  Gene Symbol: KIR3DS1
  Gene Name: killer cell immunoglobulin-like receptor, three domains, short cytoplasmic tail, 1
  ENST ID: ENST00000621178
  CDS Start-End: 64-1212
ataacatcctgtgcgctgctgagctgagctggggcgcagccgcctgtctgcaccggcagcaccatgttgctcatggtcgtcagcatggcgtgtgttgggttgttcttggtccagagggccggtccacacatgggtggtcaggacaagcccttcctgtctgcctggcccagcgctgtggtgcctcgcggaggacacgtgactcttcggtgtcactatcgtcataggtttaacaatttcatgctatacaaagaagacagaatccacgttcccatcttccatggcagaatattccaggagggcttcaacatgagccctgtgaccacagcacatgcagggaactacacatgtcggggttcacacccacactcccccactgggtggtcggcacccagcaaccccatggtgatcatggtcacaggaaaccacagaaaaccttccctcctggcccacccaggtcccctggtgaaatcaggagagagagtcatcctgcaatgttggtcagatatcatgtttgagcacttctttctgcacaaagagtggatctctaaggacccctcacgcctcgttggacagatccatgatggggtctccaaggccaatttctccatcggttccatgatgcgtgcccttgcagggacctacagatgctacggttctgttactcacaccccctatcagttgtcagctcccagtgatcccctggacatcgtggtcacaggtctatatgagaaaccttctctctcagcccagccgggccccaaggttcaggcaggagagagcgtgaccttgtcctgtagctcccggagctcctatgacatgtaccatctatccagggaggggggagcccatgaacgtaggctccctgcagtgcgcaaggtcaacagaacattccaggcagatttccctctgggccctgccacccacggagggacctacagatgcttcggctctttccgtcactctccctacgagtggtcagacccgagtgacccactgcttgtttctgtcacaggaaacccttcaagtagttggccttcacccacagaaccaagctccaaatctggtaacctcagacacctgcacattctgattgggacctcagtggtcaaaatccctttcaccatcctcctcttctttctccttcatcgctggtgctccaacaaaaaaaaatgctgctgtaatggaccaagagcctgcagggaacagaagtgaacagcgaggattctgatgaacaagaccatcaggaggtgtcatacgcataattggaacactgtgttttcacacagagaaaaatcactcgcccttctcagaggcccaagacacccccaacagataccagcatgtacatagaacttccaaatgctgagcccagatccaaag

SEQ ID NO: 146246 - DNA, 1769 bp, Homo sapiens
  Payload ID: 8974
  Gene Symbol: KIR3DS1
  Gene Name: killer cell immunoglobulin-like receptor, three domains, short cytoplasmic tail, 1
  ENST ID: ENST00000615875
  CDS Start-End: 38-1204
agctggggcgcagccgcctgtctgcaccggcagcaccatgttgctcatggtcgtcagcatggcgtgtgttgggttgttcttggtccagagggccggtccacacatgggtggtcaggacaagcccttcctgtctgcctggcccagcgctgtggtgcctcgcggaggacacgtgactcttcggtgtcactatcgtcataggtttaacaatttcatgctatacaaagaagacagaatccacgttcccatcttccatggcagaatattccaggagggcttcaacatgagccctgtgaccacagcacatgcagggaactacacatgtcggggttcacacccacactcccccactgggtggtcggcacccagcaaccccatggtgatcatggtcacaggaaaccacagaaaaccttccctcctggcccacccaggtcccctggtgaaatcaggagagagagtcatcctgcaatgttggtcagatatcatgtttgagcacttctttctgcacaaagagtggatctctaaggacccctcacgcctcgttggacagatccatgatggggtctccaaggccaatttctccatcggttccatgatgcgtgcccttgcagggacctacagatgctacggttctgttactcacaccccctatcagttgtcagctcccagtgatcccctggacatcgtggtcacaggtctatatgagaaaccttctctctcagcccagccgggccccaaggttcaggcaggagagagcgtgaccttgtcctgtagctcccggagctcctatgacatgtaccatctatccagggaggggggagcccatgaacgtaggctccctgcagtgcgcaaggtcaacagaacattccaggcagatttccctctgggccctgccacccacggagggacctacagatgcttcggctctttccgtcactctccctacgagtggtcagacccgagtgacccactgcttgtttctgtcacaggaaacccttcaagtagttggccttcacccacagaaccaagctccaaatctggtaacctcagacacctgcacattctgattgggacctcagtggtcaaaatccctttcaccatcctcctcttctttctccttcatcgctggtgctccaacaaaaaaaaaaatgctgctgtaatggaccaagagcctgcagggaacagaagtgaacagcgaggattctgatgaacaagaccatcaggaggtgtcatacgcataattggaacactgtgttttcacacagagaaaaatcactcgcccttctcagaggcccaagacacccccaacagataccagcatgtacatagaacttccaaatgctgagcccagatccaaagttgtcttctgtccacgagcaccacagtcaggccttgaggggatcttctagggagacaacagccctgtctcaaaactgggttgccagctcccatgtaccagcagctggaatctgaaggcatcagtcttcatcttagggcatcgctcttcctcacaccacaaatctgaatgtgcctctcacttgcttacaaatgtctaaggtccccactgcctgctggagaaaaaacacactcctttgcttagcccacagttctccatttcacttgacccctgcccacctctccaacctaactggcttacttcctagtctacttgaggctgcaatcacactgaggaactcacaattccacacatacaagaggctccgtcttaacgcagcacttagacacgtgctgttccaccttccctcatgctg

SEQ ID NO: 146247 - DNA, 1769 bp, Homo sapiens; identical to SEQ ID NO: 146246
  Payload ID: 8974
  Gene Symbol: KIR3DS1
  Gene Name: killer cell immunoglobulin-like receptor, three domains, short cytoplasmic tail, 1
  ENST ID: ENST00000622416
  CDS Start-End: 38-1204

SEQ ID NO: 146248 - DNA, 1740 bp, Homo sapiens; identical to SEQ ID NO: 146241
  Payload ID: 8974
  Gene Symbol: KIR3DS1
  Gene Name: killer cell immunoglobulin-like receptor, three domains, short cytoplasmic tail, 1
  Uniprot ID: Q14943
  ENST ID: ENST00000616388
  CDS Start-End: 12-1175

SEQ ID NO: 146249 - DNA, 1660 bp, Homo sapiens
  Payload ID: 8974
  Gene Symbol: KIR3DS1
  Gene Name: killer cell immunoglobulin-like receptor, three domains, short cytoplasmic tail, 1
  ENST ID: ENST00000614429
  CDS Start-End: 34-1182
ggggcgcagccgcctgtctgcaccggcagcaccatgttgctcatggtcgtcagcatggcgtgtgttgggttgttcttggtccagagggccggtccacacatgggtggtcaggacaagcccttcctgtctgcctggcccagcgctgtggtgcctcgcggaggacacgtgactcttcggtgtcactatcgtcataggtttaacaatttcatgctatacaaagaagacagaatccacgttcccatcttccatggcagaatattccaggagggcttcaacatgagccctgtgaccacagcacatgcagggaactacacatgtcggggttcacacccacactcccccactgggtggtcggcacccagcaaccccatggtgatcatggtcacaggaaaccacagaaaaccttccctcctggcccacccaggtcccctggtgaaatcaggagagagagtcatcctgcaatgttggtcagatatcatgtttgagcacttctttctgcacaaagagtggatctctaaggacccctcacgcctcgttggacagatccatgatggggtctccaaggccaatttctccatcggttccatgatgcgtgcccttgcagggacctacagatgctacggttctgttactcacaccccctatcagttgtcagctcccagtgatcccctggacatcgtggtcacaggtctatatgagaaaccttctctctcagcccagccgggccccaaggttcaggcaggagagagcgtgaccttgtcctgtagctcccggagctcctatgacatgtaccatctatccagggaggggggagcccatgaacgtaggctccctgcagtgcgcaaggtcaacagaacattccaggcagatttccctctgggccctgccacccacggagggacctacagatgcttcggctctttccgtcactctccctacgagtggtcagacccgagtgacccactgcttgtttctgtcacaggaaacccttcaagtagttggccttcacccacagaaccaagctccaaatctggtaacctcagacacctgcacattctgattgggacctcagtggtcaaaatccctttcaccatcctcctcttctttctccttcatcgctggtgctccaacaaaaaaaaatgctgctgtaatggaccaagagcctgcagggaacagaagtgaacagcgaggattctgatgaacaagaccatcaggaggtgtcatacgcataattggaacactgtgttttcacacagagaaaaatcactcgcccttctcagaggcccaagacacccccaacagataccagcatgtacatagaacttccaaatgctgagcccagatccaaagttgtcttctgtccacgagcaccacagtcaggccttgaggggatcttctagggagacaacagccctgtctcaaaactgggttgccagctcccatgtaccagcagctggaatctgaaggcatcagtcttcatcttagggcatcgctcttcctcacaccacaaatctgaatgtgcctctcacttgcttacaaatgtctaaggtccccactgcctgctggagaaaaaacacactcctttgcttagcccacagttctccatttcacttgacccctgcccacctctccaacctaactggcttacttcctagtctac

SEQ ID NO: 146250 - DNA, 931 bp, Homo sapiens
  Payload ID: 8974
  Gene Symbol: KIR3DS1
  Gene Name: killer cell immunoglobulin-like receptor, three domains, short cytoplasmic tail, 1
  ENST ID: ENST00000620731
  CDS Start-End: 1-864
atgttgctcatggtcgtcagcatggcgtgtgttgggttgttcttggtccagagggccggtccacacatgggaaaccacagaaaaccttccctcctggcccacccaggtcccctggtgaaatcaggagagagagtcatcctgcaatgttggtcagatatcatgtttgagcacttctttctgcacaaagagtggatctctaaggacccctcacgcctcgttggacagatccatgatggggtctccaaggccaatttctccatcggttccatgatgcgtgcccttgcagggacctacagatgctacggttctgttactcacaccccctatcagttgtcagctcccagtgatcccctggacatcgtggtcacaggtctatatgagaaaccttctctctcagcccagccgggccccaaggttcaggcaggagagagcgtgaccttgtcctgtagctcccggagctcctatgacatgtaccatctatccagggaggggggagcccatgaacgtaggctccctgcagtgcgcaaggtcaacagaacattccaggcagatttccctctgggccctgccacccacggagggacctacagatgcttcggctctttccgtcactctccctacgagtggtcagacccgagtgacccactgcttgtttctgtcacaggaaacccttcaagtagttggccttcacccacagaaccaagctccaaatctggtaacctcagacacctgcacattctgattgggacctcagtggtcaaaatccctttcaccatcctcctcttctttctccttcatcgctggtgctccaacaaaaaaaaatgctgctgtaatggaccaagagcctgcagggaacagaagtgaacagcgaggattctgatgaacaagaccatcaggaggtgtcatacgcataattggaacactgtgtttt

SEQ ID NO: 146251 - DNA, 1769 bp, Homo sapiens; identical to SEQ ID NO: 146246
  Payload ID: 8974
  Gene Symbol: KIR3DS1
  Gene Name: killer cell immunoglobulin-like receptor, three domains, short cytoplasmic tail, 1
  ENST ID: ENST00000620611
  CDS Start-End: 38-1204

SEQ ID NO: 146252 - DNA, 1656 bp, Homo sapiens
  Payload ID: 8974
  Gene Symbol: KIR3DS1
  Gene Name: killer cell immunoglobulin-like receptor, three domains, short cytoplasmic tail, 1
  ENST ID: ENST00000614217
  CDS Start-End: 14-1162
caccggcagcaccatgttgctcatggtcgtcagcatggcgtgtgttgggttgttcttggtccagagggccggtccacacatgggtggtcaggacaagcccttcctgtctgcctggcccagcgctgtggtgcctcgcggaggacacgtgactcttcggtgtcactatcgtcataggtttaacaatttcatgctatacaaagaagacagaatccacgttcccatcttccatggcagaatattccaggagggcttcaacatgagccctgtgaccacagcacatgcagggaactacacatgtcggggttcacacccacactcccccactgggtggtcggcacccagcaaccccatggtgatcatggtcacaggaaaccacagaaaaccttccctcctggcccacccaggtcccctggtgaaatcaggagagagagtcatcctgcaatgttggtcagatatcatgtttgagcacttctttctgcacagagagtggatctctaaggacccctcacgcctcgttggacagatccatgatggggtctccaaggccaatttctccatcggttccatgatgcgtgcccttgcagggacctacagatgctacggttctgttactcacaccccctatcagttgtcagctcccagtgatcccctggacatcgtggtcacaggtctatatgagaaaccttctctctcagcccagccgggccccaaggttcaggcaggagagagcgtgaccttgtcctgtagctcccggagctcctatgacatgtaccatctatccagggaggggggagcccatgaacgtaggctccctgcagtgcgcaaggtcaacagaacattccaggcagatttccctctgggccctgccacccacggagggacctacagatgcttcggctctttccgtcactctccctacgagtggtcagacccgagtgacccactgcttgtttctgtcacaggaaacccttcaagtagttggccttcacccacagaaccaagctccaaatctggtaacctcagacacctgcacattctgattgggacctcagtggtcaaaatccctttcaccatcctcctcttctttctccttcatcgctggtgctccaacaaaaaaaaatgctgctgtaatggaccaagagcctgcagggaacagaagtgaacagcgaggattctgatgaacaagaccatcaggaggtgtcatacgcataattggaacactgtgttttcacacagagaaaaatcactcgcccttctcagaggcccaagacacccccaacagataccagcatgtacatagaacttccaaatgctgagcccagatccaaagttgtcttctgtccacgagcaccacagtcaggccttgaggggatcttctagggagacaacagccctgtctcaaaactgggttgccagctcccatgtaccagcagctggaatctgaaggcatcagtcttcatcttagggcatcgctcttcctcacaccacaaatctgaatgtgcctctcacttgcttacaaatgtctaaggtccccactgcctgctggagaaaaaacacactcctttgcttagcccacagttctccatttcacttgacccctgcccacctctccaacctaactggcttacttcctagtctacttgaggctgcaatcac

SEQ ID NO: 146253 - DNA, 1740 bp, Homo sapiens; identical to SEQ ID NO: 146241
  Payload ID: 8974
  Gene Symbol: KIR3DS1
  Gene Name: killer cell immunoglobulin-like receptor, three domains, short cytoplasmic tail, 1
  Uniprot ID: Q14943
  ENST ID: ENST00000615275
  CDS Start-End: 12-1175

SEQ ID NO: 146254 - DNA, 1690 bp, Homo sapiens
  Payload ID: 8974
  Gene Symbol: KIR3DS1
  Gene Name: killer cell immunoglobulin-like receptor, three domains, short cytoplasmic tail, 1
  ENST ID: ENST00000610716
  CDS Start-End: 64-1212
ataacatcctgtgcgctgctgagctgagctggggcgcagccgcctgtctgcaccggcagcaccatgttgctcatggtcgtcagcatggcgtgtgttgggttgttcttggtccagagggccggtccacacatgggtggtcaggacaagcccttcctgtctgcctggcccagcgctgtggtgcctcgcggaggacacgtgactcttcggtgtcactatcgtcataggtttaacaatttcatgctatacaaagaagacagaatccacgttcccatcttccatggcagaatattccaggagggcttcaacatgagccctgtgaccacagcacatgcagggaactacacatgtcggggttcacacccacactcccccactgggtggtcggcacccagcaaccccatggtgatcatggtcacaggaaaccacagaaaaccttccctcctggcccacccaggtcccctggtgaaatcaggagagagagtcatcctgcaatgttggtcagatatcatgtttgagcacttctttctgcacaaagagtggatctctaaggacccctcacgcctcgttggacagatccatgatggggtctccaaggccaatttctccatcggttccatgatgcgtgcccttgcagggacctacagatgctacggttctgttactcacaccccctatcagttgtcagctcccagtgatcccctggacatcgtggtcacaggtctatatgagaaaccttctctctcagcccagccgggccccaaggttcaggcaggagagagcgtgaccttgtcctgtagctcccggagctcctatgacatgtaccatctatccagggaggggggagcccatgaacgtaggctccctgcagtgcgcaaggtcaacagaacattccaggcagatttccctctgggccctgccacccacggagggacctacagatgcttcggctctttccgtcactctccctacgagtggtcagacccgagtgacccactgcttgtttctgtcacaggaaacccttcaagtagttggccttcacccacagaaccaagctccaaatctggtaacctcagacacctgcacattctgattgggacctcagtggtcaaaatccctttcaccatcctcctcttctttctccttcatcgctggtgctccaacaaaaaaaaatgctgctgtaatggaccaagagcctgcagggaacagaagtgaacagcgaggattctgatgaacaagaccatcaggaggtgtcatacgcataattggaacactgtgttttcacacagagaaaaatcactcgcccttctcagaggcccaagacacccccaacagataccagcatgtacatagaacttccaaatgctgagcccagatccaaagttgtcttctgtccacgagcaccacagtcaggccttgaggggatcttctagggagacaacagccctgtctcaaaactgggttgccagctcccatgtaccagcagctggaatctgaaggcatcagtcttcatcttagggcatcgctcttcctcacaccacaaatctgaatgtgcctctcacttgcttacaaatgtctaaggtccccactgcctgctggagaaaaaacacactcctttgcttagcccacagttctccatttcacttgacccctgcccacctctccaacctaactggcttacttcctagtctac

SEQ ID NO: 146255 - DNA, 1541 bp, Homo sapiens; identical to SEQ ID NO: 146243
  Payload ID: 8974
  Gene Symbol: KIR3DS1
  Gene Name: killer cell immunoglobulin-like receptor, three domains, short cytoplasmic tail, 1
  ENST ID: ENST00000620498
  CDS Start-End: 38-1186

SEQ ID NO: 146256 - DNA, 1769 bp, Homo sapiens; identical to SEQ ID NO: 146246
  Payload ID: 8974
  Gene Symbol: KIR3DS1
  Gene Name: killer cell immunoglobulin-like receptor, three domains, short cytoplasmic tail, 1
  ENST ID: ENST00000621225
  CDS Start-End: 38-1204

SEQ ID NO: 146257 - DNA, 1740 bp, Homo sapiens; identical to SEQ ID NO: 146241
  Payload ID: 8974
  Gene Symbol: KIR3DS1
  Gene Name: killer cell immunoglobulin-like receptor, three domains, short cytoplasmic tail, 1
  Uniprot ID: Q14943
  ENST ID: ENST00000616583
  CDS Start-End: 12-1175

SEQ ID NO: 146258 - DNA, 1740 bp, Homo sapiens; identical to SEQ ID NO: 146241
  Payload ID: 8974
  Gene Symbol: KIR3DS1
  Gene Name: killer cell immunoglobulin-like receptor, three domains, short cytoplasmic tail, 1
  Uniprot ID: Q14943
  ENST ID: ENST00000613279
  CDS Start-End: 12-1175

SEQ ID NO: 146259 - DNA, 1740 bp, Homo sapiens
  Payload ID: 8974
  Gene Symbol: KIR3DS1
  Gene Name: killer cell immunoglobulin-like receptor, three domains, short cytoplasmic tail, 1
  ENST ID: ENST00000617337
  CDS Start-End: 12-1175
ccggcagcaccatgtcgctcatggtcgtcagcatggcgtgtgttgggttgttcttggtccagagggccggtccacacatgggtggtcaggacaagcccttcctgtctgcctggcccagcgctgtggtgcctcgcggaggacacgtgactcttcggtgtcactatcgtcataggtttaacaatttcatgctatacaaagaagacagaatccacgttcccatcttccatggcagaatattccaggagggcttcaacatgagccctgtgaccacagcacatgcagggaactacacatgtcggggttcacacccacactcccccactgggtggtcggcacccagcaaccccatggtgatcatggtcacaggaaaccacagaaaaccttccctcctggcccacccaggtcccctggtgaaatcaggagagagagtcatcctgcaatgttggtcagatatcatgtttgagcacttctttctgcacagagagtggatctctaaggacccctcacgcctcgttggacagatccatgatggggtctccaaggccaatttctccatcggttccatgatgcgtgcccttgcagggacctacagatgctacggttctgttactcacaccccctatcagttgtcagctcccagtgatcccctggacatcgtggtcacaggtctatatgagaaaccttctctctcagcccagccgggccccaaggttcaggcaggagagagcgtgaccttgtcctgtagctcccggagctcctatgacatgtaccatctatccagggaggggggagcccatgaacgtaggctccctgcagtgcgcaaggtcaacagaacattccaggcagatttccctctgggccctgccacccacggagggacctacagatgcttcggctctttccgtcactctccctacgagtggtcagacccgagtgacccactgcttgtttctgtcacaggaaacccttcaagtagttggccttcacccacagaaccaagctccaaatctggtaacctcagacacctgcacattctgattgggacctcagtggtcaaaatccctttcaccatcctcctcttctttctccttcatcgctggtgctccaacaaaaaaaatgctgctgtaatggaccaagagcctgcagggaacagaagtgaacagcgaggattctgatgaacaagaccatcaggaggtgtcatacgcataattggaacactgtgttttcacacagagaaaaatcactcgcccttctcagaggcccaagacacccccaacagataccagcatgtacatagaacttccaaatgctgagcccagatccaaagttgtcttctgtccacgagcaccacagtcaggccttgaggggatcttctagggagacaacagccctgtctcaaaactgggttgccagctcccatgtaccagcagctggaatctgaaggcatcagtcttcatcttagggcatcgctcttcctcacaccacaaatctgaatgtgcctctcacttgcttacaaatgtctaaggtccccactgcctgctggagaaaaaacacactcctttgcttagcccacagttctccatttcacttgacccctgcccacctctccaacctaactggcttacttcctagtctacttgaggctgcaatcacactgaggaactcacaattccacacatacaagaggctccgtcttaacgcagcacttagacacgtgctgttccaccttccctcatgctg

SEQ ID NO: 146260 - DNA, 1690 bp, Homo sapiens; identical to SEQ ID NO: 146254
  Payload ID: 8974
  Gene Symbol: KIR3DS1
  Gene Name: killer cell immunoglobulin-like receptor, three domains, short cytoplasmic tail, 1
  ENST ID: ENST00000620926
  CDS Start-End: 64-1212

SEQ ID NO: 146261 - DNA, 671 bp, Homo sapiens
  Payload ID: 8974
  Gene Symbol: KIR3DS1
  Gene Name: killer cell immunoglobulin-like receptor, three domains, short cytoplasmic tail, 1
  ENST ID: ENST00000612571
  CDS Start-End: 15-671
gcaccggcagcaccatgttgctcatggtcgtcagcatggcgtgtgttgggttcttcttggtccagagggccggtccacacatgggtggtcaggacaagcccttcctgtctgcctggcccagcgctgtggtgcctcgaggaggacacgtgactcttcggtgtcactatcgtcataggtttaacaatttcatgctatacaaagaagacagaatccacgttcccatcttccatggcagaatattccaggagggcttcaacatgagccctgtgaccacagcacatgcagggaactacacatgtcggggttcacacccacactcccccactgggtggtcggcacccagcaaccccatggtgatcatggtcacaggaaaccacagaaaaccttccctcctggcccacccaggtcccctggtgaaatcaggagagagagtcatcctgcaatgttggtcagatatcatgtttgagcacttctttctgcacaaagaggggatctctaaggacccctcacgcctcgttggacagatccatgatggggtctccaaggccaatttctccatcggttccatgatgcgtgcccttgcagggacctacagatgctacggttctgttactcacaccccctatcagttgtcagctcccagtgatcccctggacatcgtggtcacaggt

SEQ ID NO: 146262 - DNA, 1769 bp, Homo sapiens; identical to SEQ ID NO: 146246
  Payload ID: 8974
  Gene Symbol: KIR3DS1
  Gene Name: killer cell immunoglobulin-like receptor, three domains, short cytoplasmic tail, 1
  ENST ID: ENST00000610591
  CDS Start-End: 38-1204

SEQ ID NO: 146263 - DNA, 1378 bp, Homo sapiens
  Payload ID: 8975
  Gene Symbol: KIR3DX1
  Gene Name: killer cell immunoglobulin-like receptor, three domains, X1
  Uniprot ID: Q9H7L2
  ENST ID: ENST00000221567
  CDS Start-End: 8-1066
tggcaccatggcccccaaactcatcaccgtcctgtgtctgggattctgcctgaaccagaagatctgcccacatgcgggtgctcaggacaagttctccctgtcagcctggccgagccctgtggttcccctaggaggacgtgtgactctctcctgtcattcccatcttcgatttgtcatatggacaatattccaaacaactgggacccgaagccatgagttgcacactggcctttccaacaacatcaccatcagccctgtgaccccagaacacgcagggacctacagatgtgttggaatttacaagcacgcctcaaagtggtcagctgagagcaactccctgaagatcatcgtcacaggcttgttcacaaaaccctccatctcagcgcacccaagctccctggtgcatgcaggagccagggtgagcctgcgctgtcactcagaactggcctttgatgaatttatcttatacaaagaggggcacatacagcattcccagcagcttgaccaggggatggaggctgggatccattacgtcgaggctgtcttttccatgggtcctgtaacgcctgcccatgcaggagcctacagatgctgtggttgtttcagtcactcccgctatgagtggtcggctcccagtgaccccctggacattgtgatcacaggaaaatacaaaaagccttctctctccacccaggtggaccccatgatgaggctgggagagaagttgaccctcttctgcagctctgaaatctcatttgaccagtaccatctgttcagacacggggttgctcatggacagtggctcagtggagggcagagacacagggaagcattccaggccaacttttctgtgggccgtgcaacgccagtccctggcgggacctatagatgctatggttccttcaatgactctccctataagcccccagtgacccgctgcaactttacaccacaggaaacactaagagtactcctctgtcattcacagaatccacccctgaatctgacacacctcgccctcaaggacagtccagcaacctgcatatgctcactggactctcagtagccatcatctccattggcgtttgcctctctgcttttattggtttctggtgttacataaaatatcacaccaccatggcaaacacagagcccacggaaggccaacggacggatgaagaggagcctgcagcagaagagacacaggagatcatatatgcccagttaaaccaccaggccctctcacagacaggattccctcctgcctcccagtgtccccactacctctcggaggatcctagtatctacatcactgtccaccaagcccaggctgaggccagagctgcccccagtctttggcacaaagggcattaatacg

SEQ ID NO: 146264 - DNA, 1240 bp, Homo sapiens
  Payload ID: 8975
  Gene Symbol: KIR3DX1
  Gene Name: killer cell immunoglobulin-like receptor, three domains, X1
  ENST ID: ENST00000447145
  CDS Start-End: 107-526
ggcaccctctaaactctgcaaactgaaactggaaccatggttaccacatcctgttcattttccaatttagctcaacccctgtgtcctgcccaatagaagtggcaccatggcccccaaactcatcaccgtcctgtgtctgggattctgcctgaaccagaagatctgcccacatgcgggtgctcaggacaagttctccctgtcagcctggccgagccctgtggttcccctaggaggacgtgtgactctctcctgtcattcccatcttcgatttgtcatatggacaatattccaaacaactgggacccgaagccatgagttgcacactggcctttccaacaacatcaccatcagccctgtgaccccagaacacgcagggacctacagatgtgttggaatttacaagcacgcctcaaagtggtcagctgagagcaactccctgaagatcatcgtcacagccttctctctccacccaggtggaccccatgatgaggctgggagagaagttgaccctcttctgcagctctgaaatctcatttgaccagtaccatctgttcagacacggggttgctcatggacagtggctcagtggagggcagagacacagggaagcattccaggccaacttttctgtgggccgtgcaacgccagtccctggcgggacctatagatgctatggttccttcaatgactctccctataagcccccagtgacccgctgcaactttacaccacaggaaacactaagagtactcctctgtcattcacagaatccacccctgaatctgacacacctcgccctcaaggacagtccagcaacctgcatatgctcactggactctcagtagccatcatctccattggcgtttgcctctctgcttttattggtttctggtgttacataaaatatcacaccaccatggcaaacacagagcccacggaaggccaacggacggatgaagaggagcctgcagcagaagagacacaggagatcatatatgcccagttaaaccaccaggccctctcacagacaggattccctcctgcctcccagtgtccccactacctctcggaggatcctagtatctacatcactgtccaccaagcccaggctgaggccagagctgcccccagtctttggcacaaagggcattaatacgcaaggacctggatctattcctaggaggattttttttccacggacattcttcctccttctggtaccatcttgacacctcgaagc

SEQ ID NO: 146265 - DNA, 1333 bp, Homo sapiens
  Payload ID: 8975
  Gene Symbol: KIR3DX1
  Gene Name: killer cell immunoglobulin-like receptor, three domains, X1
  ENST ID: ENST00000446586
  CDS Start-End: 107-508
ggcaccctctaaactctgcaaactgaaactggaaccatggttaccacatcctgttcattttccaatttagctcaacccctgtgtcctgcccaatagaagtggcaccatggcccccaaactcatcaccgtcctgtgtctgggattctgcctgaaccagaagatctgcccacatgcgggtgctcaggacaagttctccctgtcagcctggccgagccctgtggttcccctaggaggacgtgtgactctctcctgtcattcccatcttcgatttgtcatatggacaatattccaaacaactgggacccgaagccatgagttgcacactggcctttccaacaacatcaccatcagccctgtgaccccagaacacgcagggacctacagatgtgttggaatttacaagcacgcctcaaagtggtcagctgagagcaactccctgaagatcatcgtcacaggtggaccccatgatgaggctgggagagaagttgaccctcttctgcagctctgaaatctcatttgaccagtaccatctgttcagacacggggttgctcatggacagtggctcagtggagggcagagacacagggaagcattccaggccaacttttctgtgggccgtgcaacgccagtccctggcgggacctatagatgctatggttccttcaatgactctccctataagcccccagtgacccgctgcaactttacaccacaggaaacactaagagtactcctctgtcattcacagaatccacccctgaatctgacacacctcgccctcaaggacagtccagcaacctgcatatgctcactggactctcagtagccatcatctccattggcgtttgcctctctgcttttattggtttctggtgttacataaaatatctgggggaggctggatcacgctgcagcctcaggcacgcccttgccttgttttggtcttggtattgccacctctgaagtgaagatctggaagactttctttttcaccccacagacaccaccatggcaaacacagagcccacggaaggccaacggacggatgaagaggagcctgcagcagaagagacacaggagatcatatatgcccagttaaaccaccaggccctctcacagacaggattccctcctgcctcccagtgtccccactacctctcggaggatcctagtatctacatcactgtccaccaagcccaggctgaggccagagctgcccccagtctttggcacaaagggcattaatacgcaaggacctggatctattcctaggaggattttttttccacggacattcttcctccttctggtaccatcttgacacctcgaagc

SEQ ID NO: 146266 - DNA, 1222 bp, Homo sapiens
  Payload ID: 8975
  Gene Symbol: KIR3DX1
  Gene Name: killer cell immunoglobulin-like receptor, three domains, X1
  ENST ID: ENST00000434659
  CDS Start-End: 107-508
ggcaccctctaaactctgcaaactgaaactggaaccatggttaccacatcctgttcattttccaatttagctcaacccctgtgtcctgcccaatagaagtggcaccatggcccccaaactcatcaccgtcctgtgtctgggattctgcctgaaccagaagatctgcccacatgcgggtgctcaggacaagttctccctgtcagcctggccgagccctgtggttcccctaggaggacgtgtgactctctcctgtcattcccatcttcgatttgtcatatggacaatattccaaacaactgggacccgaagccatgagttgcacactggcctttccaacaacatcaccatcagccctgtgaccccagaacacgcagggacctacagatgtgttggaatttacaagcacgcctcaaagtggtcagctgagagcaactccctgaagatcatcgtcacaggtggaccccatgatgaggctgggagagaagttgaccctcttctgcagctctgaaatctcatttgaccagtaccatctgttcagacacggggttgctcatggacagtggctcagtggagggcagagacacagggaagcattccaggccaacttttctgtgggccgtgcaacgccagtccctggcgggacctatagatgctatggttccttcaatgactctccctataagcccccagtgacccgctgcaactttacaccacaggaaacactaagagtactcctctgtcattcacagaatccacccctgaatctgacacacctcgccctcaaggacagtccagcaacctgcatatgctcactggactctcagtagccatcatctccattggcgtttgcctctctgcttttattggtttctggtgttacataaaatatcacaccaccatggcaaacacagagcccacggaaggccaacggacggatgaagaggagcctgcagcagaagagacacaggagatcatatatgcccagttaaaccaccaggccctctcacagacaggattccctcctgcctcccagtgtccccactacctctcggaggatcctagtatctacatcactgtccaccaagcccaggctgaggccagagctgcccccagtctttggcacaaagggcattaatacgcaaggacctggatctattcctaggaggattttttttccacggacattcttcctccttctggtaccatcttgacacctcgaagc

SEQ ID NO: 146267 - DNA, 1240 bp, Homo sapiens
  Payload ID: 8975
  Gene Symbol: KIR3DX1
  Gene Name: killer cell immunoglobulin-like receptor, three domains, X1
  ENST ID: ENST00000622805
  CDS Start-End: 107-526
ggcaccctctaaactctgcaaactgaaactggaaccatggttaccacatcctgttcattttccaatttagctcaacccctgtgtcctgcccaatagaagtggcaccatggcccccaaactcatcaccgtcctgtgtctgggattctgcctgaaccagaagatctgcccacatgcgggtgctcaggacaagttctccctgtcagcctggccgagccctgtggttcccctaggaggacgtgtgactctctcctgtcattcccatcttcggtttgtcatatggacaatattccaaacaactgggacccgaagccatgagttgcacactggcctttccaacaacatcaccatcagccctgtgaccccagaacacgcagggacctacagatgtgttggaatttacaagcacgcctcaaagtggtcagctgagagcaactccctgaagatcatcgtcacagccttctctctccacccaggtggaccccatgatgaggctgggagagaagttgaccctcttctgcagctctgaaatctcatttgaccagtaccatctgttcagacacggggttgctcatggacagtggctcagtggagggcagagacacagggaagcattccaggccaacttttctgtgggccgtgcaacgccagtccctggcgggacctatagatgctatggttccttcaatgactctccctataagcccccagtgacccgctgcaactttacaccacaggaaacactaagagtactcctctgtcattcacagaatccacccctgaatctgacacacctcgccctcaaggacagtccagcaacctgcatatgctcactggactctcagtagccatcatctccattggcgtttgcctctctgcttttattggtttctggtgttacataaaatatcacaccaccatggcaaacacagagcccacggaaggccaacggacggatgaagaggagcctgcagcagaagagacacaggagatcatatatgcccagttaaaccaccaggccctctcacagacaggattccctcctgcctcccagtgtccccactacctctcggaggatcctagtatctacatcactgtccaccaagcccaggctgaggccagagctgcccccagtctttggcacaaagggcattaatacgcaaggacctggatctattcctaggaggattttttttccacggacattcttcctccttctggtaccatcttgacacctcgaagc

SEQ ID NO: 146268 - DNA, 2548 bp, Homo sapiens
  Payload ID: 8975
  Gene Symbol: KIR3DX1
  Gene Name: killer cell immunoglobulin-like receptor, three domains, X1
  ENST ID: ENST00000622318
  CDS Start-End: 1-362
ctgaaatctcatttgaccagtaccatctgttcagacacggggttgctcatggacagtggctcagtggagggcagagacacagggaagcattccaggccaacttttctgtgggccgtgcaacgccagtccctggcgggacctatagatgctatggttccttcaatgactctccctataagcccccagtgacccgctgcaactttacaccacaggaaacactaagagtactcctctgtcattcacagaatccacccctgaatctgacaccaccatggcaaacacagagcccacggaaggccaacggacggatgaagaggagcctgcagcagaagagacacaggagatcatatatgcccagttaaaccaccaggccctctcacagacaggattccctcctgcctcccagtgtccccactacctctcgaaggatcctagtatctacatcactgtccaccaagcccaggctgaggccagagctgcccccagtctttggcacaaagggcattaatacgcaaggacctggatctattcctaggaggattttttttccacggacattcttcctccttctggtaccatcttgacacctcgaagctggcaacagcagtgtctgaatgcttgtgggattatcttaaaattccagcactgctgaacagacaactagccattctacaattctattttgagcatccaaccatttaaggtgatttgactctacccacacactcatcctggatatctcattaatatcatctgagttatcctgaaactctacagacatgcttctggaaagccgatgtatatgctcagccagtttaatctctaaattactcaataaggtttttttaaaaaaatttttttaaagttctggggtacatgctcaggatgtgcaggtttgttacgtaggtaaacgtgtgccatggtggtttgctgcacctatcaaaccgtcacctaggtattaagcccagcaggcattagctctcttccctaatgctctccataccccctgccctcctctgacaggccccagtgaatgtgttcccctccctgtgtccatgtgttctcattgttcagctcccacttataagtgaaaacatgcggtgtctggttttctgttcctgcattagtttgctgaggataatgtcttctagcttcattcatgtctctgcaaatgatatgatctcattcctttttatgactgcgtagtattccgtggtgtatatgtacaactttatttttatccagtctatcattgatgggcatttgggttgattccacgtctttgctgttactcaacaaaattttgcagagatgaagtgtattctatatctgagtcatctaatatggtagccactagccaaatatggctttttaacttagaattagaatagatcaaattccatgaagtttaaaattcagttcctcagccacatggccacaatttgagttctcagagccacgtgtggctgctggctgtgggagagaatagcatgaacacaaaatgttttccttgtcagaggaagttctagctgttctagattaaaggtgcaaatttgaagatgcagagcctattttctcatgcagtgcaggctcctggaagagacctaatgtaacaaaacgataatatttcacatcaatggtgacatgtctttatcttacgaaatgcggggaacaagcagagttctcttgtggagtgtcttatcacctcttatcctcatgcaaatttctgccatagagattttctcccaaactttgagaaggtcacctctgtcaggcctctgagcccaagctaagccatcctatcccctgtgacctgcacgtacacatccagatggcctgaagcaactgaagattcacaaaagaagtgaaaatagccttaactgatgacattccaccactgtgacttgttcccgccccactaactgataccatatattctgccccgcccaagaaggtactttgtaatattcctcgcccccttaccccccaccgccctgcccccgctcgcccgccttaagaaggtactttgtaatattctcccccacaactttagaaggtactttgtaatattctccccaactttagaaggtactttgtaatattctcccccacaactttagaaggtactttgtaatattctcccctccccttaagaaggtactttgtaatattctcccccacaactttagaaggtactttgtaatattctcccctccccttaagaaggtacttcgaggctgggtgcggtggctcatgtctgtaatcccagcactctggggggccgaggtgggtggatcatgaggtcaggagatcgagaccatcctggctaatgtggtgaaaccccgtctctactaaaaaaatacaaaacaattagctgggcatggtggcgggtgcctgtagtcccagccacttgggagtctgaggcaggagaatggcgtgaacccaggaggcagagcttgcagtgagctgagatcgcgccactgcactccagcctgggcgatagagcaagactctgtctcaaaaaaaaaaaaaaaaaaaaaaaaaaaaa

SEQ ID NO: 146269 - DNA, 1378 bp, Homo sapiens
  Payload ID: 8975
  Gene Symbol: KIR3DX1
  Gene Name: killer cell immunoglobulin-like receptor, three domains, X1
  Uniprot ID: Q9H7L2
  ENST ID: ENST00000614511
  CDS Start-End: 8-1066
tggcaccatggcccccaaactcatcaccgtcctgtgtctgggattctgcctgaaccagaagatctgcccacatgcgggtgctcaggacaagttctccctgtcagcctggccgagccctgtggttcccctaggaggacgtgtgactctctcctgtcattcccatcttcggtttgtcatatggacaatattccaaacaactgggacccgaagccatgagttgcacactggcctttccaacaacatcaccatcagccctgtgaccccagaacacgcagggacctacagatgtgttggaatttacaagcacgcctcaaagtggtcagctgagagcaactccctgaagatcatcgtcacaggcttgttcacaaaaccctccatctcagcgcacccaagctccctggtgcatgcaggagccagggtgagcctgcgctgtcactcagaactggcctttgatgaatttatcttatacaaagaggggcacatacagcattcccagcagcttgaccaggggatggaggctgggatccattacgtcgaggctgtcttttccatgggtcctgtaacgcctgcccatgcaggagcctacagatgctgtggttgtttcagtcactcccgctatgagtggtcggctcccagtgaccccctggacattgtgatcacaggaaaatacaaaaagccttctctctccacccaggtggaccccatgatgaggctgggagagaagttgaccctcttctgcagctctgaaatctcatttgaccagtaccatctgttcagacacggggttgctcatggacagtggctcagtggagggcagagacacagggaagcattccaggccaacttttctgtgggccgtgcaacgccagtccctggcgggacctatagatgctatggttccttcaatgactctccctataagcccccagtgacccgctgcaactttacaccacaggaaacactaagagtactcctctgtcattcacagaatccacccctgaatctgacacacctcgccctcaaggacagtccagcaacctgcatatgctcactggactctcagtagccatcatctccattggcgtttgcctctctgcttttattggtttctggtgttacataaaatatcacaccaccatggcaaacacagagcccacggaaggccaacggacggatgaagaggagcctgcagcagaagagacacaggagatcatatatgcccagttaaaccaccaggccctctcacagacaggattccctcctgcctcccagtgtccccactacctctcggaggatcctagtatctacatcactgtccaccaagcccaggctgaggccagagctgcccccagtctttggcacaaagggcattaatacg

SEQ ID NO: 146270 - DNA, 3011 bp, Homo sapiens
  Payload ID: 8975
  Gene Symbol: KIR3DX1
  Gene Name: killer cell immunoglobulin-like receptor, three domains, X1
  ENST ID: ENST00000620623
  CDS Start-End: 39-1136
agctcaacccctgtgtcctgcccaatagaagtggcaccatggcccccaaactcatcaccgtcctgtgtctgggattctgcctgaaccagaagatctgcccacatgcgggtgctcaggacaagttctccctgtcagcctggccgagccctgtggttcccctaggaggacgtgtgactctctcctgtcattcccatcttcggtttgtcatatggacaatattccaaacaactgggacccgaagccatgagttgcacactggcctttccaacaacatcaccatcagccctgtgaccccagaacacgcagggacctacagatgtgttggaatttacaagcacgcctcaaagtggtcagctgagagcaactccctgaagatcatcgtcacaggcttgttcacaaaaccctccatctcagcgcacccaagctccctggtgcatgcaggagccagggtgagcctgcgctgtcactcagaactggcctttgatgaatttatcttatacaaagaggggcacatacagcattcccagcagcttgaccaggggatggaggctgggatccattacgtcgaggctgtcttttccatgggtcctgtaacgcctgcccatgcaggagcctacagatgctgtggttgtttcagtcactcccgctatgagtggtcggctcccagtgaccccctggacattgtgatcacaggaaaatacaaaaagccttctctctccacccaggtggaccccatgatgaggctgggagagaagttgaccctcttctgcagctctgaaatctcatttgaccagtaccatctgttcagacacggggttgctcatggacagtggctcagtggagggcagagacacagggaagcattccaggccaacttttctgtgggccgtgcaacgccagtccctggcgggacctatagatgctatggttccttcaatgactctccctataagcccccagtgacccgctgcaactttacaccacaggaaacactaagagtactcctctgtcattcacagaatccacccctgaatctgacaccaccatggcaaacacagagcccacggaaggccaacggacggatgaagaggagcctgcagcagaagagacacaggagatcatatatgcccagttaaaccaccaggccctctcacagacaggattccctcctgcctcccagtgtccccactacctctcggaggatcctagtatctacatcactgtccaccaagcccaggctgaggccagagctgcccccagtctttggcacaaagggcattaatacgcaaggacctggatctattcctaggaggattttttttccacggacattcttcctccttctggtaccatcttgacacctcgaagctggcaacagcagtgtctgaatgcttgtgggattatcttaaaattccagcactgctgaacagacaactagccattctacaattctattttgagcatccaaccatttaaggtgatttgactctacccacacactcatcctggatatctcattaatatcatctgagttatcctgaaactctacagacatgcttctggaaagccgatgtatatgctcagccagtttaatctctaaattactcaataaggtttttttaaaaaaatttttttaaagttctggggtacatgctcaggatgtgcaggtttgttacgtaggtaaacgtgtgccatggtggtttgctgcacctatcaaaccgtcacctaggtattaagcccagcaggcattagctctcttccctaatgctctccataccccctgccctcctctgacaggccccagtgaatgtgttcccctccctgtgtccatgtgttctcattgttcagctcccacttataagtgaaaacatgcggtgtctggttttctgttcctgcattagtttgctgaggataatgtcttctagcttcattcatgtctctgcaaatgatatgatctcattcctttttatgactgcgtagtattccgtggtgtatatgtacaactttatttttatccagtctatcattgatgggcatttgggttgattccacgtctttgctgttactcaacaaaattttgcagagatgaagtgtattctatatctgagtcatctaatatggtagccactagccaaatatggctttttaacttagaattagaatagatcaaattccatgaagtttaaaattcagttcctcagccacatggccacaatttgagttctcagagccacgtgtggctgctggctgtgggagagaatagcatgaacacaaaatgttttccttgtcagaggaagttctagctgttctagattaaaggtgcaaatttgaagatgcagagcctattttctcatgcagtgcaggctcctggaagagacctaatgtaacaaaacgataatatttcacatcaatggtgacatgtctttatcttacgaaatgcggggaacaagcagagttctcttgtggagtgtcttatcacctcttatcctcatgcaaatttctgccatagagattttctcccaaactttgagaaggtcacctctgtcaggcctctgagcccaagctaagccatcctatcccctgtgacctgcacgtacacatccagatggcctgaagcaactgaagattcacaaaagaagtgaaaatagccttaactgatgacattccaccactgtgacttgttcccgccccactaactgataccatatattctgccccgcccaagaaggtactttgtaatattcctcgcccccttaccccccaccgccctgcccccgctcgcccgccttaagaaggtactttgtaatattctcccccacaactttagaaggtactttgtaatattctcccccacaactttagaaggtactttgtaatattctcccccacaactttagaaggtactttgtaatattctcccccacaactttagaaggtactttgtaatattctcccccacaactttagaaggtactttgtaatattctcccccacaactttagaaggtactt

SEQ ID NO: 146271 - DNA, 1222 bp, Homo sapiens
  Payload ID: 8975
  Gene Symbol: KIR3DX1
  Gene Name: killer cell immunoglobulin-like receptor, three domains, X1
  ENST ID: ENST00000615010
  CDS Start-End: 107-508
ggcaccctctaaactctgcaaactgaaactggaaccatggttaccacatcctgttcattttccaatttagctcaacccctgtgtcctgcccaatagaagtggcaccatggcccccaaactcatcaccgtcctgtgtctgggattctgcctgaaccagaagatctgcccacatgcgggtgctcaggacaagttctccctgtcagcctggccgagccctgtggttcccctaggaggacgtgtgactctctcctgtcattcccatcttcggtttgtcatatggacaatattccaaacaactgggacccgaagccatgagttgcacactggcctttccaacaacatcaccatcagccctgtgaccccagaacacgcagggacctacagatgtgttggaatttacaagcacgcctcaaagtggtcagctgagagcaactccctgaagatcatcgtcacaggtggaccccatgatgaggctgggagagaagttgaccctcttctgcagctctgaaatctcatttgaccagtaccatctgttcagacacggggttgctcatggacagtggctcagtggagggcagagacacagggaagcattccaggccaacttttctgtgggccgtgcaacgccagtccctggcgggacctatagatgctatggttccttcaatgactctccctataagcccccagtgacccgctgcaactttacaccacaggaaacactaagagtactcctctgtcattcacagaatccacccctgaatctgacacacctcgccctcaaggacagtccagcaacctgcatatgctcactggactctcagtagccatcatctccattggcgtttgcctctctgcttttattggtttctggtgttacataaaatatcacaccaccatggcaaacacagagcccacggaaggccaacggacggatgaagaggagcctgcagcagaagagacacaggagatcatatatgcccagttaaaccaccaggccctctcacagacaggattccctcctgcctcccagtgtccccactacctctcggaggatcctagtatctacatcactgtccaccaagcccaggctgaggccagagctgcccccagtctttggcacaaagggcattaatacgcaaggacctggatctattcctaggaggattttttttccacggacattcttcctccttctggtaccatcttgacacctcgaagc

SEQ ID NO: 146272 - DNA, 1378 bp, Homo sapiens
  Payload ID: 8975
  Gene Symbol: KIR3DX1
  Gene Name: killer cell immunoglobulin-like receptor, three domains, X1
  Uniprot ID: Q9H7L2
  ENST ID: ENST00000621920
  CDS Start-End: 8-1066
tggcaccatggcccccaaactcatcaccgtcctgtgtctgggattctgcctgaaccagaagatctgcccacatgcgggtgctcaggacaagttctccctgtcagcctggccgagccctgtggttcccctaggaggacgtgtgactctctcctgtcattcccatcttcggtttgtcatatggacaatattccaaacaactgggacccgaagccatgagttgcacactggcctttccaacaacatcaccatcagccctgtgaccccagaacacgcagggacctacagatgtgttggaatttacaagcacgcctcaaagtggtcagctgagagcaactccctgaagatcatcgtcacaggcttgttcacaaaaccctccatctcagcgcacccaagctccctggtgcatgcaggagccagggtgagcctgcgctgtcactcagaactggcctttgatgaatttatcttatacaaagaggggcacatacagcattcccagcagcttgaccaggggatggaggctgggatccattacgtcgaggctgtcttttccatgggtcctgtaacgcctgcccatgcaggagcctacagatgctgtggttgtttcagtcactcccgctatgagtggtcggctcccagtgaccccctggacattgtgatcacaggaaaatacaaaaagccttctctctccacccaggtggaccccatgatgaggctgggagagaagttgaccctcttctgcagctctgaaatctcatttgaccagtaccatctgttcagacacggggttgctcatggacagtggctcagtggagggcagagacacagggaagcattccaggccaacttttctgtgggccgtgcaacgccagtccctggcgggacctatagatgctatggttccttcaatgactctccctataagcccccagtgacccgctgcaactttacaccacaggaaacactaagagtactcctctgtcattcacagaatccacccctgaatctgacacacctcgccctcaaggacagtccagcaacctgcatatgctcactggactctcagtagccatcatctccattggcgtttgcctctctgcttttattggtttctggtgttacataaaatatcacaccaccatggcaaacacagagcccacggaaggccaacggacggatgaagaggagcctgcagcagaagagacacaggagatcatatatgcccagttaaaccaccaggccctctcacagacaggattccctcctgcctcccagtgtccccactacctctcgaaggatcctagtatctacatcactgtccaccaagcccaggctgaggccagagctgcccccagtctttggcacaaagggcattaatacg

SEQ ID NO: 146273 - DNA, 3325 bp, Homo sapiens
  Payload ID: 8975
  Gene Symbol: KIR3DX1
  Gene Name: killer cell immunoglobulin-like receptor, three domains, X1
  ENST ID: ENST00000610811
  CDS Start-End: 39-1136
agctcaacccctgtgtcctgcccaatagaagtggcaccatggcccccaaactcatcaccgtcctgtgtctgggattctgcctgaaccagaagatctgcccacatgcgggtgctcaggacaagttctccctgtcagcctggccgagccctgtggttcccctaggaggacgtgtgactctctcctgtcattcccatcttcgatttgtcatatggacaatattccaaacaactgggacccgaagccatgagttgcacactggcctttccaacaacatcaccatcagccctgtgaccccagaacacgcagggacctacagatgtgttggaatttacaagcacgcctcaaagtggtcagctgagagcaactccctgaagatcatcgtcacaggcttgttcacaaaaccctccatctcagcgcacccaagctccctggtgcatgcaggagccagggtgagcctgcgctgtcactcagaactggcctttgatgaatttatcttatacaaagaggggcacatacagcattcccagcagcttgaccaggggatggaggctgggatccattacgtcgaggctgtcttttccatgggtcctgtaacgcctgcccatgcaggagcctacagatgctgtggttgtttcagtcactcccgctatgagtggtcggctcccagtgaccccctggacattgtgatcacaggaaaatacaaaaagccttctctctccacccaggtggaccccatgatgaggctgggagagaagttgaccctcttctgcagctctgaaatctcatttgaccagtaccatctgttcagacacggggttgctcatggacagtggctcagtggagggcagagacacagggaagcattccaggccaacttttctgtgggccgtgcaacgccagtccctggcgggacctatagatgctatggttccttcaatgactctccctataagcccccagtgacccgctgcaactttacaccacaggaaacactaagagtactcctctgtcattcacagaatccacccctgaatctgacaccaccatggcaaacacagagcccacggaaggccaacggacggatgaagaggagcctgcagcagaagagacacaggagatcatatatgcccagttaaaccaccaggccctctcacagacaggattccctcctgcctcccagtgtccccactacctctcggaggatcctagtatctacatcactgtccaccaagcccaggctgaggccagagctgcccccagtctttggcacaaagggcattaatacgcaaggacctggatctattcctaggaggattttttttccacggacattcttcctccttctggtaccatcttgacacctcgaagctggcaacagcagtgtctgaatgcttgtgggattatcttaaaattccagcactgctgaacagacaactagccattctacaattctattttgagcatccaaccatttaaggtgatttgactctacccacacactcatcctggatatctcattaatatcatctgagttatcctgaaactctacagacatgcttctggaaagccgatgtatatgctcagccagtttaatctctaaattactcaataaggtttttttaaaaaaatttttttaaagttctggggtacatgctcaggatgtgcaggtttgttacgtaggtaaacgtgtgccatggtggtttgctgcacctatcaaaccgtcacctaggtattaagcccagcaggcattagctctcttccctaatgctctccataccccctgccctcctctgacaggccccagtgaatgtgttcccctccctgtgtccatgtgttctcattgttcagctcccacttataagtgaaaacatgcggtgtctggttttctgttcctgcattagtttgctgaggataatgtcttctagcttcattcatgtctctgcaaatgatatgatctcattcctttttatgactgcgtagtattccgtggtgtatatgtacaactttatttttatccagtctatcattgatgggcatttgggttgattccacgtctttgctgttactcaacaaaattttgcagagatgaagtgtattctatatctgagtcatctaatatggtagccactagccaaatatggctttttaacttagaattagaatagatcaaattccatgaagtttaaaattcagttcctcagccacatggccacaatttgagttctcagagccacgtgtggctgctggctgtgggagagaatagcatgaacacaaaatgttttccttgtcagaggaagttctagctgttctagattaaaggtgcaaatttgaagatgcagagcctattttctcatgcagtgcaggctcctggaagagacctaatgtaacaaaacgataatatttcacatcaatggtgacatgtctttatcttacgaaatgcggggaacaagcagagttctcttgtggagtgtcttatcacctcttatcctcatgcaaatttctgccatagagattttctcccaaactttgagaaggtcacctctgtcaggcctctgagcccaagctaagccatcctatcccctgtgacctgcacgtacacatccagatggcctgaagcaactgaagattcacaaaagaagtgaaaatagccttaactgatgacattccaccactgtgacttgttcccgccccactaactgataccatatattctgccccgcccaagaaggtactttgtaatattcctcgcccccttaccccccaccgccctgcccccgctcgcccgccttaagaaggtactttgtaatattctcccccacaactttagaaggtactttgtaatattctccccaactttagaaggtactttgtaatattctcccccacaactttagaaggtactttgtaatattctcccctccccttaagaaggtactttgtaatattctcccccacaactttagaaggtactttgtaatattctcccctccccttaagaaggtacttcgaggctgggtgcggtggctcatgtctgtaatcccagcactctggggggccgaggtgggtggatcacgaggtcaggagatcgagaccatcctggctaatgtggtgaaaccccgtctctactaaaaaaatacaaaacaattagctgggcatggtggcgggtgcctgtagtcccagccacttgggagtctgaggcaggagaatggcgtgaacccaggaggcagagcttgcagtgagctgagatcgcgccactgcactccagcctgggcgatagagcaagactctgtctcaaaaaaaaaaaaaaaaaaaaaaaaaaaaagaa

SEQ ID NO: 146274 - DNA, 1333 bp, Homo sapiens
  Payload ID: 8975
  Gene Symbol: KIR3DX1
  Gene Name: killer cell immunoglobulin-like receptor, three domains, X1
  ENST ID: ENST00000612726
  CDS Start-End: 107-508
ggcaccctctaaactctgcaaactgaaactggaaccatggttaccacatcctgttcattttccaatttagctcaacccctgtgtcctgcccaatagaagtggcaccatggcccccaaactcatcaccgtcctgtgtctgggattctgcctgaaccagaagatctgcccacatgcgggtgctcaggacaagttctccctgtcagcctggccgagccctgtggttcccctaggaggacgtgtgactctctcctgtcattcccatcttcggtttgtcatatggacaatattccaaacaactgggacccgaagccatgagttgcacactggcctttccaacaacatcaccatcagccctgtgaccccagaacacgcagggacctacagatgtgttggaatttacaagcacgcctcaaagtggtcagctgagagcaactccctgaagatcatcgtcacaggtggaccccatgatgaggctgggagagaagttgaccctcttctgcagctctgaaatctcatttgaccagtaccatctgttcagacacggggttgctcatggacagtggctcagtggagggcagagacacagggaagcattccaggccaacttttctgtgggccgtgcaacgccagtccctggcgggacctatagatgctatggttccttcaatgactctccctataagcccccagtgacccgctgcaactttacaccacaggaaacactaagagtactcctctgtcattcacagaatccacccctgaatctgacacacctcgccctcaaggacagtccagcaacctgcatatgctcactggactctcagtagccatcatctccattggcgtttgcctctctgcttttattggtttctggtgttacataaaatatctgggggaggctggatcacgctgcagcctcaggcacgcccttgccttgttttggtcttggtattgccacctctgaagtgaagatctggaagactttctttttcaccccacagacaccaccatggcaaacacagagcccacggaaggccaacggacggatgaagaggagcctgcagcagaagagacacaggagatcatatatgcccagttaaaccaccaggccctctcacagacaggattccctcctgcctcccagtgtccccactacctctcggaggatcctagtatctacatcactgtccaccaagcccaggctgaggccagagctgcccccagtctttggcacaaagggcattaatacgcaaggacctggatctattcctaggaggattttttttccacggacattcttcctccttctggtaccatcttgacacctcgaagc

SEQ ID NO: 146275 - DNA, 1378 bp, Homo sapiens; identical to SEQ ID NO: 146269
  Payload ID: 8975
  Gene Symbol: KIR3DX1
  Gene Name: killer cell immunoglobulin-like receptor, three domains, X1
  Uniprot ID: Q9H7L2
  ENST ID: ENST00000614591
  CDS Start-End: 8-1066

SEQ ID NO: 146276 - DNA, 2548 bp, Homo sapiens
  Payload ID: 8975
  Gene Symbol: KIR3DX1
  Gene Name: killer cell immunoglobulin-like receptor, three domains, X1
  ENST ID: ENST00000613278
  CDS Start-End: 1-362
ctgaaatctcatttgaccagtaccatctgttcagacacggggttgctcatggacagtggctcagtggagggcagagacacagggaagcattccaggccaacttttctgtgggccgtgcaacgccagtccctggcgggacctatagatgctatggttccttcaatgactctccctataagcccccagtgacccgctgcaactttacaccacaggaaacactaagagtactcctctgtcattcacagaatccacccctgaatctgacaccaccatggcaaacacagagcccacggaaggccaacggacggatgaagaggagcctgcagcagaagagacacaggagatcatatatgcccagttaaaccaccaggccctctcacagacaggattccctcctgcctcccagtgtccccactacctctcggaggatcctagtatctacatcactgtccaccaagcccaggctgaggccagagctgcccccagtctttggcacaaagggcattaatacgcaaggacctggatctattcctaggaggattttttttccacggacattcttcctccttctggtaccatcttgacacctcgaagctggcaacagcagtgtctgaatgcttgtgggattatcttaaaattccagcactgctgaacagacaactagccattctacaattctattttgagcatccaaccatttaaggtgatttgactctacccacacactcatcctggatatctcattaatatcatctgagttatcctgaaactctacagacatgcttctggaaagccgatgtatatgctcagccagtttaatctctaaattactcaataaggtttttttaaaaaaatttttttaaagttctggggtacatgctcaggatgtgcaggtttgttacgtaggtaaacgtgtgccatggtggtttgctgcacctatcaaaccgtcacctaggtattaagcccagcaggcattagctctcttccctaatgctctccataccccctgccctcctctgacaggccccagtgaatgtgttcccctccctgtgtccatgtgttctcattgttcagctcccacttataagtgaaaacatgcggtgtctggttttctgttcctgcattagtttgctgaggataatgtcttctagcttcattcatgtctctgcaaatgatatgatctcattcctttttatgactgcgtagtattccgtggtgtatatgtacaactttatttttatccagtctatcattgatgggcatttgggttgattccacgtctttgctgttactcaacaaaattttgcagagatgaagtgtattctatatctgagtcatctaatatggtagccactagccaaatatggctttttaacttagaattagaatagatcaaattccatgaagtttaaaattcagttcctcagccacatggccacaatttgagttctcagagccacgtgtggctgctggctgtgggagagaatagcatgaacacaaaatgttttccttgtcagaggaagttctagctgttctagattaaaggtgcaaatttgaagatgcagagcctattttctcatgcagtgcaggctcctggaagagacctaatgtaacaaaacgataatatttcacatcaatggtgacatgtctttatcttacgaaatgcggggaacaagcagagttctcttgtggagtgtcttatcacctcttatcctcatgcaaatttctgccatagagattttctcccaaactttgagaaggtcacctctgtcaggcctctgagcccaagctaagccatcctatcccctgtgacctgcacgtacacatccagatggcctgaagcaactgaagattcacaaaagaagtgaaaatagccttaactgatgacattccaccactgtgacttgttcccgccccactaactgataccatatattctgccccgcccaagaaggtactttgtaatattcctcgcccccttaccccccaccgccctgcccccgctcgcccgccttaagaaggtactttgtaatattctcccccacaactttagaaggtactttgtaatattctccccaactttagaaggtactttgtaatattctcccccacaactttagaaggtactttgtaatattctcccctccccttaagaaggtactttgtaatattctcccccacaactttagaaggtactttgtaatattctcccctccccttaagaaggtacttcgaggctgggtgcggtggctcatgtctgtaatcccagcactctggggggccgaggtgggtggatcacgaggtcaggagatcgagaccatcctggctaatgtggtgaaaccccgtctctactaaaaaaatacaaaacaattagctgggcatggtggcgggtgcctgtagtcccagccacttgggagtctgaggcaggagaatggcgtgaacccaggaggcagagcttgcagtgagctgagatcgcgccactgcactccagcctgggcgatagagcaagactctgtctcaaaaaaaaaaaaaaaaaaaaaaaaaaaaa

SEQ ID NO: 146277 - DNA, 1203 bp, Homo sapiens
  Payload ID: 8976
  Gene Symbol: KIR2DL1
  Gene Name: killer cell immunoglobulin-like receptor, two domains, long cytoplasmic tail, 1
  Uniprot ID: P43626
  ENST ID: ENST00000291633
  CDS Start-End: 27-1151
ggctgcctgtctgctccggcagcaccatgtcgctcttggtcgtcagcatggcgtgtgttgggttcttcttgctgcagggggcctggccacatgagggagtccacagaaaaccttccctcctggcccacccaggtcgcctggtgaaatcagaagagacagtcatcctgcagtgttggtcagatgtcatgtttgaacacttccttctgcacagagaggggatgtttaacgacactttgcgcctcattggagaacaccatgatggggtctccaaggccaacttctccatcagtcgcatgacgcaagacctggcagggacctacagatgctacggttctgttactcactccccctatcaggtgtcagctcccagtgaccctctggacatcgtgatcataggtctatatgagaaaccttctctctcagcccagctgggccccacggttctggcaggagagaatgtgaccttgtcctgcagctcccggagctcctatgacatgtaccatctatccagggaaggggaggcccatgaacgtaggctccctgcagggcccaaggtcaacggaacattccaggctgactttcctctgggccctgccacccacggagggacctacagatgcttcggctctttccatgactctccatacgagtggtcaaagtcaagtgacccactgcttgtttctgtcacaggaaacccttcaaatagttggccttcacccactgaaccaagctccaaaaccgagaggatgtttcaccacgttggccaagcttgtctgaaactcccaacctcaagtgatccgaccgtctcagcatgccaaagtaacccccgacacctgcacattctgattgggacctcagtggtcatcatcctcttcatcctcctcttctttctccttcatcgctggtgctccaacaaaaaaaatgctgcggtaatggaccaagagtctgcaggaaacagaacagcgaatagcgaggactctgatgaacaagaccctcaggaggtgacatacacacagttgaatcactgcgttttcacacagagaaaaatcactcgcccttctcagaggcccaagacacccccaacagatatcatcgtgtacacggaacttccaaatgctgagtccagatccaaagttgtctcctgcccatgagcaccacagtcaggccttgagggcgtcttctagggagacaacagccctgtct

SEQ ID NO: 146278 - DNA, 1596 bp, Homo sapiens
  Payload ID: 8976
  Gene Symbol: KIR2DL1
  Gene Name: killer cell immunoglobulin-like receptor, two domains, long cytoplasmic tail, 1
  ENST ID: ENST00000336077
  CDS Start-End: 41-1087
ctgagctcggtcgcggctgcctgtctgctccggcagcaccatgtcgctcttggtcgtcagcatggcgtgtgttgggttcttcttgctgcagggggcctggccacatgagggagtccacagaaaaccttccctcctggcccacccaggtcgcctggtgaaatcagaagagacagtcatcctgcagtgttggtcagatgtcatgtttgaacacttccttctgcacagagaggggatgtttaacgacactttgcgcctcattggagaacaccatgatggggtctccaaggccaacttctccatcagtcgcatgacgcaagacctggcagggacctacagatgctacggttctgttactcactccccctatcaggtgtcagctcccagtgaccctctggacatcgtgatcataggtctatatgagaaaccttctctctcagcccagctgggccccacggttctggcaggagagaatgtgaccttgtcctgcagctcccggagctcctatgacatgtaccatctatccagggaaggggaggcccatgaacgtaggctccctgcagggcccaaggtcaacggaacattccaggctgactttcctctgggccctgccacccacggagggacctacagatgcttcggctctttccatgactctccatacgagtggtcaaagtcaagtgacccactgcttgtttctgtcacaggaaacccttcaaatagttggccttcacccactgaaccaagctccaaaaccggtaacccccgacacctgcacattctgattgggacctcagtggtcatcatcctcttcatcctcctcttctttctccttcatcgctggtgctccaacaaaaaaaatgctgcggtaatggaccaagagtctgcaggaaacagaacagcgaatagcgaggactctgatgaacaagaccctcaggaggtgacatacacacagttgaatcactgcgttttcacacagagaaaaatcactcgcccttctcagaggcccaagacacccccaacagatatcatcgtgtacacggaacttccaaatgctgagtccagatccaaagttgtctcctgcccatgagcaccacagtcaggccttgagggcgtcttctagggagacaacagccctgtctcaaaaccgggttgccagctcccatgtaccagcagctggaatctgaaggcgtgagtctgcatcttagggcatcgatcttcctcacaccacaaatctgaatgtgcctctctcttgcttacaaatgtctaaggtccccactgcctgctggagaaaaaacacactcctttgcttaacccacagttctccatttcacttgacccctgcccacctctccaacctaactggcttacttcctagtctacttgaggctgcaatcacactgaggaactcacaattccaaacatacaagaggctccctcttaacgcagcacttagacacgtgttgttccaccttccctcatgctgttccacctcccctcagactagctttcagtcttctgtcagcagtaaaacttatatattttttaaaataacttcaatgtagttttccatccttcaaataaacatgtctgccccca

SEQ ID NO: 146279 - DNA, 1341 bp, Homo sapiens
  Payload ID: 8976
  Gene Symbol: KIR2DL1
  Gene Name: killer cell immunoglobulin-like receptor, two domains, long cytoplasmic tail, 1
  ENST ID: ENST00000612504
  CDS Start-End: 90-1136
tgtaaactgcatgggcagggcgccaaataacatcctgtgcgctgctgagctgagctcggtcgcggctgcctgtctgctccggcagcaccatgtcgctcttggtcgtcagcatggcgtgtgttgggttcttcttgctgcagggggcctggccacatgagggagtccacagaaaaccttccctcctggcccacccaggtcgcctggtgaaatcagaagagacagtcatcctgcagtgttggtcagatgtcatgtttgaacacttccttctgcacagagaggggatgtttaacgacactttgcgcctcattggagaacaccatgatggggtctccaaggccaacttctccatcagtcgcatgacgcaagacctggcagggacctacagatgctacggttctgttactcactccccctatcaggtgtcagctcccagtgaccctctggacatcgtgatcataggtctatatgagaaaccttctctctcagcccagctgggccccacggttctggcaggagagaatgtgaccttgtcctgcagctcccggagctcctatgacatgtaccatctatccagggaaggggaggcccatgaacgtaggctccctgcagggcccaaggtcaacggaacattccaggctgactttcctctgggccctgccacccacggagggacctacagatgcttcggctctttccatgactctccatacgagtggtcaaagtcaagtgacccactgcttgtttctgtcacaggaaacccttcaaatagttggccttcacccactgaaccaagctccaaaaccggtaacccccgacacctgcacattctgattgggacctcagtggtcatcatcctcttcatcctcctcttctttctccttcatcgctggtgctccaacaaaaaaaatgctgcggtaatggaccaagagtctgcaggaaacagaacagcgaatagcgaggactctgatgaacaagaccctcaggaggtgacatacacacagttgaatcactgcgttttcacacagagaaaaatcactcgcccttctcagaggcccaagacacccccaacagatatcatcgtgtacacggaacttccaaatgctgagtccagatccaaagttgtctcctgcccatgagcaccacagtcaggccttgagggcgtcttctagggagacaacagccctgtctcaaaaccgggttgccagctcccatgtaccagcagctggaatctgaaggcgtgagtctgcatcttagggcatcgatcttcctcacaccacaaatctgaatgtgcctctcacttgcttacaaatgtctaaggtccccactgcctgctggagaaaa

SEQ ID NO: 146280 - DNA, 1406 bp, Homo sapiens
  Payload ID: 8976
  Gene Symbol: KIR2DL1
  Gene Name: killer cell immunoglobulin-like receptor, two domains, long cytoplasmic tail, 1
  ENST ID: ENST00000619424
  CDS Start-End: 38-1084
agctcggtcgcggctgcctgtctgctccggcagcaccatgtcgctcttggtcgtcagcatggcgtgtgttgggttcttcttgctgcagggggcctggccacatgagggagtccacagaaaaccttccctcctggcccacccaggtcgcctggtgaaatcagaagagacagtcatcctgcagtgttggtcagatgtcatgtttgaacacttccttctgcacagagaggggatgtttaacgacactttgcgcctcattggagaacaccatgatggggtctccaaggccaacttctccatcagtcgcatgacgcaagacctggcagggacctacagatgctacggttctgttactcactccccctatcaggtgtcagctcccagtgaccctctggacatcgtgatcataggtctatatgagaaaccttctctctcagcccagctgggccccacggttctggcaggagagaatgtgaccttgtcctgcagctcccggagctcctatgacatgtaccatctatccagggaaggggaggcccatgaacgtaggctccctgcagggcccaaggtcaacggaacattccaggctgactttcctctgggccctgccacccacggagggacctacagatgcttcggctctttccatgactctccatacgagtggtcaaagtcaagtgacccactgcttgtttctgtcacaggaaacccttcaaatagttggccttcacccactgaaccaagctccaaaaccggtaacccccgacacctgcacattctgattgggacctcagtggtcatcatcctcttcatcctcctcttctttctccttcatcgctggtgctccaacaaaaaaaatgctgcggtaatggaccaagagtctgcaggaaacagaacagcgaatagcgaggactctgatgaacaagaccctcaggaggtgacatacacacagttgaatcactgcgttttcacacagagaaaaatcactcgcccttctcagaggcccaagacacccccaacagatatcatcgtgtacacggaacttccaaatgctgagtccagatccaaagttgtctcctgcccatgagcaccacagtcaggccttgagggcgtcttctagggagacaacagccctgtctcaaaaccgggttgccagctcccatgtaccagcagctggaatctgaaggcgtgagtctgcatcttagggcatcgatcttcctcacaccacaaatctgaatgtgcctctctcttgcttacaaatgtctaaggtccccactgcctgctggagaaaaaacacactcctttgcttaacccacagttctccatttcacttgacccctgcccacctctccaacctaactggcttacttcctagtctacttgaggctgcaatcacactgaggaactca

SEQ ID NO: 146281 - DNA, 1401 bp, Homo sapiens
  Payload ID: 8976
  Gene Symbol: KIR2DL1
  Gene Name: killer cell immunoglobulin-like receptor, two domains, long cytoplasmic tail, 1
  ENST ID: ENST00000616302
  CDS Start-End: 33-1079
ggtcgcggctgcctgtctgctccggcagcaccatgtcgctcttggtcgtcagcatggcgtgtgttgggttcttcttgctgcagggggcctggccacatgagggagtccacagaaaaccttccctcctggcccacccaggtcgcctggtgaaatcagaagagacagtcatcctgcagtgttggtcagatgtcatgtttgaacacttccttctgcacagagaggggatgtttaacgacactttgcgcctcattggagaacaccatgatggggtctccaaggccaacttctccatcagtcgcatgacgcaagacctggcagggacctacagatgctacggttctgttactcactccccctatcaggtgtcagctcccagtgaccctctggacatcgtgatcataggtctatatgagaaaccttctctctcagcccagctgggccccacggttctggcaggagagaatgtgaccttgtcctgcagctcccggagctcctatgacatgtaccatctatccagggaaggggaggcccatgaacgtaggctccctgcagggcccaaggtcaacggaacattccaggctgactttcctctgggccctgccacccacggagggacctacagatgcttcggctctttccatgactctccatacgagtggtcaaagtcaagtgacccactgcttgtttctgtcacaggaaacccttcaaatagttggccttcacccactgaaccaagctccaaaaccggtaacccccgacacctgcacattctgattgggacctcagtggtcatcatcctcttcatcctcctcttctttctccttcatcgctggtgctccaacaaaaaaaatgctgcggtaatggaccaagagtctgcaggaaacagaacagcgaatagcgaggactctgatgaacaagaccctcaggaggtgacatacacacagttgaatcactgcgttttcacacagagaaaaatcactcgcccttctcagaggcccaagacacccccaacagatatcatcgtgtacacggaacttccaaatgctgagtccagatccaaagttgtctcctgcccatgagcaccacagtcaggccttgagggcgtcttctagggagacaacagccctgtctcaaaaccgggttgccagctcccatgtaccagcagctggaatctgaaggcgtgagtctgcatcttagggcatcgatcttcctcacaccacaaatctgaatgtgcctctcacttgcttacaaatgtctaaggtccccactgcctgctggagaaaaaacacactcctttgcttaacccacagttctccatttcacttgacccctgcccacctctccaacctaactggcttacttcctagtctacttgaggctgcaatcacactgaggaactca

SEQ ID NO: 146282 - DNA, 1586 bp, Homo sapiens
  Payload ID: 8976
  Gene Symbol: KIR2DL1
  Gene Name: killer cell immunoglobulin-like receptor, two domains, long cytoplasmic tail, 1
  Uniprot ID: P43626
  ENST ID: ENST00000611611
  CDS Start-End: 27-1073
ggctgcctgtctgctccggcagcaccatgtcgctcttgttcgtcagcatggcgtgtgttgggttcttcttgctgcagggggcctggccacatgagggagtccacagaaaaccttccctcctggcccacccaggtcccctggtgaaatcagaagagacagtcatcctgcaatgttggtcagatgtcatgtttgaacacttccttctgcacagagaggggatgtttaacgacactttgcgcctcattggagaacaccatgatggggtctccaaggccaacttctccatcagtcgcatgacgcaagacctggcagggacctacagatgctacggttctgttactcactccccctatcaggtgtcagctcccagtgaccctctggacatcgtgatcataggtctatatgagaaaccttctctctcagcccagccgggccccacggttctggcaggagagaatgtgaccttgtcctgcagctcccggagctcctatgacatgtaccatctatccagggaaggggaggcccatgaacgtaggctccctgcagggcccaaggtcaacggaacattccaggctgactttcctctgggccctgccacccacggagggacctacagatgcttcggctctttccatgactctccatacgagtggtcaaagtcaagtgacccactgcttgtttctgtcacaggaaacccttcaaatagttggccttcacccactgaaccaagctccaaaaccggtaacccccgacacctgcacattctgattgggacctcagtggtcatcatcctcttcatcctcctcttctttctccttcatcgctggtgctccaacaaaaaaaatgctgcggtaatggaccaagagtctgcaggaaacagaacagcgaatagcgaggactctgatgaacaagaccctcaggaggtgacatacacacagttgaatcactgcgttttcacacagagaaaaatcactcgcccttctcagaggcccaagacacccccaacagatatcatcgtgtacacggaacttccaaatgctgagtccagatccaaagttgtctcctgcccatgagcaccacagtcaggccttgagggcgtcttctagggagacaacagccctgtctcaaaaccgggttgccagctcccatgtaccagcagctggaatctgaaggcatgagtctgcatcttagggcatcgatcttcctcacaccacaaatctgaatgtgcctctcacttgcttacaaatgtctaaggtccccactgcctgctggagaaaaaacacactcctttgcttagcccacagttctccatttcacttgacccctgcccacctctccaacctaactggcttacttcctagtctacttgaggctgcaatcacactgaggaactcacaattccaaacatacaagaggctccctcttaacgcagcacttagacacgtgttgttccaccttccctcatgctgttccacctcccctcagactagctttcagtcttctgtcagcagtaaaacttatatattttttaaaataacttcaatgtagttttccatccttcaaataaacatgtctgcccccatggt

SEQ ID NO: 146283 - DNA, 1212 bp, Homo sapiens
  Payload ID: 8976
  Gene Symbol: KIR2DL1
  Gene Name: killer cell immunoglobulin-like receptor, two domains, long cytoplasmic tail, 1
  Uniprot ID: P43626
  ENST ID: ENST00000620449
  CDS Start-End: 27-1151
ggctgcctgtctgctccggcagcaccatgtcgctcttggtcgtcagcatggcgtgtgttgggttcttcttgctgcagggggcctggccacatgagggagtccacagaaaaccttccctcctggcccacccaggtcgcctggtgaaatcagaagagacagtcatcctgcagtgttggtcagatgtcatgtttgaacacttccttctgcacagagaggggatgtttaacgacactttgcgcctcattggagaacaccatgatggggtctccaaggccaacttctccatcagtcgcatgacgcaagacctggcagggacctacagatgctacggttctgttactcactccccctatcaggtgtcagctcccagtgaccctctggacatcgtgatcataggtctatatgagaaaccttctctctcagcccagctgggccccacggttctggcaggagagaatgtgaccttgtcctgcagctcccggagctcctatgacatgtaccatctatccagggaaggggaggcccatgaacgtaggctccctgcagggcccaaggtcaacggaacattccaggctgactttcctctgggccctgccacccacggagggacctacagatgcttcggctctttccatgactctccatacgagtggtcaaagtcaagtgacccactgcttgtttctgtcacaggaaacccttcaaatagttggccttcacccactgaaccaagctccaaaaccgagaggatgtttcaccacgttggccaagcttgtctgaaactcccaacctcaagtgatccgaccgtctcagcatgccaaagtaacccccgacacctgcacattctgattgggacctcagtggtcatcatcctcttcatcctcctcttctttctccttcatcgctggtgctccaacaaaaaaaatgctgcggtaatggaccaagagtctgcaggaaacagaacagcgaatagcgaggactctgatgaacaagaccctcaggaggtgacatacacacagttgaatcactgcgttttcacacagagaaaaatcactcgcccttctcagaggcccaagacacccccaacagatatcatcgtgtacacggaacttccaaatgctgagtccagatccaaagttgtctcctgcccatgagcaccacagtcaggccttgagggcgtcttctagggagacaacagccctgtctcaaaaccgg

SEQ ID NO: 146284 - DNA, 1341 bp, Homo sapiens
  Payload ID: 8976
  Gene Symbol: KIR2DL1
  Gene Name: killer cell immunoglobulin-like receptor, two domains, long cytoplasmic tail, 1
  ENST ID: ENST00000616310
  CDS Start-End: 90-1136
tgtaaactgcatgggcagggcgccaaataacatcctgtgcgctgctgagctgagctcggtcgcggctgcctgtctgctccggcagcaccatgtcgctcttggtcgtcagcatggcgtgtgttgggttcttcttgctgcagggggcctggccacatgagggagtccacagaaaaccttccctcctggcccacccaggtcgcctggtgaaatcagaagagacagtcatcctgcagtgttggtcagatgtcatgtttgaacacttccttctgcacagagaggggatgtttaacgacactttgcgcctcattggagaacaccatgatggggtctccaaggccaacttctccatcagtcgcatgacgcaagacctggcagggacctacagatgctacggttctgttactcactccccctatcaggtgtcagctcccagtgaccctctggacatcgtgatcataggtctatatgagaaaccttctctctcagcccagctgggccccacggttctggcaggagagaatgtgaccttgtcctgcagctcccggagctcctatgacatgtaccatctatccagggaaggggaggcccatgaacgtaggctccctgcagggcccaaggtcaacggaacattccaggctgactttcctctgggccctgccacccacggagggacctacagatgcttcggctctttccatgactctccatacgagtggtcaaagtcaagtgacccactgcttgtttctgtcacaggaaacccttcaaatagttggccttcacccactgaaccaagctccaaaaccggtaacccccgacacctgcacattctgattgggacctcagtggtcatcatcctcttcatcctcctcttctttctccttcatcgctggtgctccaacaaaaaaaatgctgcggtaatggaccaagagtctgcaggaaacagaacagcgaatagcgaggactctgatgaacaagaccctcaggaggtgacatacacacagttgaatcactgcgttttcacacagagaaaaatcactcgcccttctcagaggcccaagacacccccaacagatatcatcgtgtacacggaacttccaaatgctgagtccagatccaaagttgtctcctgcccatgagcaccacagtcaggccttgagggcgtcttctagggagacaacagccctgtctcaaaaccgggttgccagctcccatgtaccagcagctggaatctgaaggcgtgagtctgcatcttagggcatcgatcttcctcacaccacaaatctgaatgtgcctctctcttgcttacaaatgtctaaggtccccactgcctgctggagaaaa

SEQ ID NO: 146285 - DNA, 1586 bp, Homo sapiens
  Payload ID: 8976
  Gene Symbol: KIR2DL1
  Gene Name: killer cell immunoglobulin-like receptor, two domains, long cytoplasmic tail, 1
  ENST ID: ENST00000620588
  CDS Start-End: 27-1073
ggctgcctgtctgctccggcagcaccatgtcgctcttggtcgtcagcatggcgtgtgttgggttcttcttgctgcagggggcctggccacatgagggagtccacagaaaaccttccctcctggcccacccaggtcgcctggtgaaatcagaagagacagtcatcctgcagtgttggtcagatgtcatgtttgaacacttccttctgcacagagaggggatgtttaacgacactttgcgcctcattggagaacaccatgatggggtctccaaggccaacttctccatcagtcgcatgacgcaagacctggcagggacctacagatgctacggttctgttactcactccccctatcaggtgtcagctcccagtgaccctctggacatcgtgatcataggtctatatgagaaaccttctctctcagcccagctgggccccacggttctggcaggagagaatgtgaccttgtcctgcagctcccggagctcctatgacatgtaccatctatccagggaaggggaggcccatgaacgtaggctccctgcagggcccaaggtcaacggaacattccaggctgactttcctctgggccctgccacccacggagggacctacagatgcttcggctctttccatgactctccatacgagtggtcaaagtcaagtgacccactgcttgtttctgtcacaggaaacccttcaaatagttggccttcacccactgaaccaagctccaaaaccggtaacccccgacacctgcacattctgattgggacctcagtggtcatcatcctcttcatcctcctcttctttctccttcatcgctggtgctccaacaaaaaaaatgctgcggtaatggaccaagagtctgcaggaaacagaacagcgaatagcgaggactctgatgaacaagaccctcaggaggtgacatacacacagttgaatcactgcgttttcacacagagaaaaatcactcgcccttctcagaggcccaagacacccccaacagatatcatcgtgtacacggaacttccaaatgctgagtccagatccaaagttgtctcctgcccatgagcaccacagtcaggccttgagggcgtcttctagggagacaacagccctgtctcaaaaccgggttgccagctcccatgtaccagcagctggaatctgaaggcgtgagtctgcatcttagggcatcgatcttcctcacaccacaaatctgaatgtgcctctctcttgcttacaaatgtctaaggtccccactgcctgctggagaaaaaacacactcctttgcttaacccacagttctccatttcacttgacccctgcccacctctccaacctaactggcttacttcctagtctacttgaggctgcaatcacactgaggaactcacaattccaaacatacaagaggctccctcttaacgcagcacttagacacgtgttgttccaccttccctcatgctgttccacctcccctcagactagctttcagtcttctgtcagcagtaaaacttatatattttttaaaataacttcaatgtagttttccatccttcaaataaacatgtctgcccccatggt

SEQ ID NO: 146286 - DNA, 1588 bp, Homo sapiens
  Payload ID: 8976
  Gene Symbol: KIR2DL1
  Gene Name: killer cell immunoglobulin-like receptor, two domains, long cytoplasmic tail, 1
  ENST ID: ENST00000616076
  CDS Start-End: 33-1079
ggtcgcggctgcctgtctgctccggcagcaccatgtcgctcttggtcgtcagcatggcgtgtgttgggttcttcttgctgcagggggcctggccacatgagggagtccacagaaaaccttccctcctggcccacccaggtcgcctggtgaaatcagaagagacagtcatcctgcagtgttggtcagatgtcatgtttgaacacttccttctgcacagagaggggatgtttaacgacactttgcgcctcattggagaacaccatgatggggtctccaaggccaacttctccatcagtcgcatgacgcaagacctggcagggacctacagatgctacggttctgttactcactccccctatcaggtgtcagctcccagtgaccctctggacatcgtgatcataggtctatatgagaaaccttctctctcagcccagctgggccccacggttctggcaggagagaatgtgaccttgtcctgcagctcccggagctcctatgacatgtaccatctatccagggaaggggaggcccatgaacgtaggctccctgcagggcccaaggtcaacggaacattccaggctgactttcctctgggccctgccacccacggagggacctacagatgcttcggctctttccatgactctccatacgagtggtcaaagtcaagtgacccactgcttgtttctgtcacaggaaacccttcaaatagttggccttcacccactgaaccaagctccaaaaccggtaacccccgacacctgcacattctgattgggacctcagtggtcatcatcctcttcatcctcctcttctttctccttcatcgctggtgctccaacaaaaaaaatgctgcggtaatggaccaagagtctgcaggaaacagaacagcgaatagcgaggactctgatgaacaagaccctcaggaggtgacatacacacagttgaatcactgcgttttcacacagagaaaaatcactcgcccttctcagaggcccaagacacccccaacagatatcatcgtgtacacggaacttccaaatgctgagtccagatccaaagttgtctcctgcccatgagcaccacagtcaggccttgagggcgtcttctagggagacaacagccctgtctcaaaaccgggttgccagctcccatgtaccagcagctggaatctgaaggcgtgagtctgcatcttagggcatcgatcttcctcacaccacaaatctgaatgtgcctctctcttgcttacaaatgtctaaggtccccactgcctgctggagaaaaaacacactcctttgcttaacccacagttctccatttcacttgacccctgcccacctctccaacctaactggcttacttcctagtctacttgaggctgcaatcacactgaggaactcacaattccaaacatacaagaggctccctcttaacgcagcacttagacacgtgttgttccaccttccctcatgctgttccacctcccctcagactagctttcagtcttctgtcagcagtaaaacttatatattttttaaaataacttcaatgtagttttccatccttcaaataaacatgtctgccccca

SEQ ID NO: 146287 - DNA, 1372 bp, Homo sapiens
  Payload ID: 8976
  Gene Symbol: KIR2DL1
  Gene Name: killer cell immunoglobulin-like receptor, two domains, long cytoplasmic tail, 1
  ENST ID: ENST00000614564
  CDS Start-End: 39-1085
gagctcggtcgcggctgcctgtctgctccggcagcaccatgtcgctcttggtcgtcagcatggcgtgtgttgggttcttcttgctgcagggggcctggccacatgagggagtccacagaaaaccttccctcctggcccacccaggtcgcctggtgaaatcagaagagacagtcatcctgcaatgttggtcagatgtcatgtttgaacacttccttctgcacagagaggggatgtttaacgacactttgcgcctcattggagaacaccatgatggggtctccaaggccaacttctccatcagtcgcatgacgcaagacctggcagggacctacagatgctacggttctgttactcactccccctatcaggtgtcagctcccagtgaccctctggacatcgtgatcataggtctatatgagaaaccttctctctcagcccagccgggccccacggttctggcaggagagaatgtgaccttgtcctgcagctcccggagctcctatgacatgtaccatctatccagggaaggggaggcccatgaacgtaggctccctgcagggaccaaggtcaacggaacattccaggccaactttcctctgggccctgccacccatggagggacctacagatgcttcggctctttccgtgactctccatacgagtggtcaaagtcaagtgacccactgcttgtttctgtcacaggaaacccttcaaatagttggccttcacccactgaaccaagctccgaaaccggtaacccccgacacctgcacattctgattgggacctcagtggtcatcatcctcttcatcctcctcttctttctccttcattgctggtgctccaacaaaaaaaatgctgcggtaatggaccaagagtctgcaggaaacagaacagcgaatagcgaggactctgatgaacaagaccctcaggaggtgacatacacacagttgaatcactgcgttttcacacagagaaaaatcactcgcccttctcagaggcccaagacacccccaacagatatcatcgtgtacacggaacttccaaatgctgagtccagatccaaagttgtctcctgcccatgagcaccacagtcaggccttgagggcgtcttctagagagacaacagccctgtctcaaaaccgggttgccagctcccatgtaccagcagctggaatctgaaggcatgagtctgcatcttagggcatcgctcttcctcacaccacaaatctgaatgtgcctctcacttgcttacaaatgtctaaggtccccactgcctgctggagaaaaaacacactcctttgcttagcccacagttctccatttcacttgacccctgcccacctctccaaccttactggcttacttccta

SEQ ID NO: 146288 - DNA, 1587 bp, Homo sapiens
  Payload ID: 8976
  Gene Symbol: KIR2DL1
  Gene Name: killer cell immunoglobulin-like receptor, two domains, long cytoplasmic tail, 1
  ENST ID: ENST00000614869
  CDS Start-End: 30-1076
cgcggccgactgtctgcacagacagcaccatgtcgctcatggtcgtcagcatggcgtgtgttgggttcttcttgctgcagggggcctggccacatgagggagtccacagaaaaccttccctccgggcccacccaggtcccctggtgaaatcagaagagacagtcatcctgcaatgttggtcagatgtcaggtttgagcacttccttctgcacagagaagggaagtttaaggacactttgcgcctcattggagagcaccatgatggggtctccaaggccaacttctccatcggtcccatgatgcaagaccttgcagggacctacagatgctacggttctgttactcactccccctatcagttgtcagctcccagtgaccctctggacatcgtcatcacaggtctatatgagaaaccttctctctcagcccagccgggccccacggttctggcaggagagagcgtgaccttgtcctgcagctcccggagctcctatgacatgtaccatctatccagggagggggaggcccatgaacgtaggttctctgcagggcccaaggtcaacggaacattccaggccgactttcctctgggccctgccacccacggagggacctacagatgcttcggctctttccgtgactctccatacgagtggtcaaactcgagtgacccactgcttgtttctgtcacaggaaacccttcaaatagttggccttcacccactgaaccaagctccaaaaccggtaacccccgacacctgcacattctgattgggacctcagtggtcatcatcctcttcatcctcctcttctttctccttcatcgctggtgctccaacaaaaaaaatgctgcggtaatggaccaagagtctgcaggaaacagaacagcgaatagcgaggactctgatgaacaagaccctcaggaggtgacatacacacagttgaatcactgcgttttcacacagagaaaaatcactcgcccttctcagaggcccaagacacccccaacagatatcatcgtgtacacggaacttccaaatgctgagtccagatccaaagttgtctcctgcccatgagcaccacagtcaggccttgagggcgtcttctagggagacaacagccctgtctcaaaaccgggttgccagctcccatgtaccagcagctggaatctgaaggcatgagtctgcatcttagggcatcgctcttcctcacaccacaaatctgaatgtgcctctcacttgcttacaaatgtctaaggtccccactgcctgctggagaaaaaacacactcctttgcttagcccacagttctccatttcacttgacccctgcccacctctccaacctaactggcttacttcctagtctacttgaggctgcaatcacactgaggaactcacaattccacacatacaagaggctccgtcttaacgcagcacttagacacgtgctgttccaccttccctcatgctgttccacctcccctcagactagctttcagccttctgtcagcagtaaaacttatatattttttaaaataacttcaatgtagttttccatccttcaaataaacatgtctgccctcatg

SEQ ID NO: 146289 - DNA, 1600 bp, Homo sapiens
  Payload ID: 8976
  Gene Symbol: KIR2DL1
  Gene Name: killer cell immunoglobulin-like receptor, two domains, long cytoplasmic tail, 1
  Uniprot ID: P43626
  ENST ID: ENST00000622463
  CDS Start-End: 41-1087
ctgagctcggtcgcggctgcctgtctgctccggcagcaccatgtcgctcttgttcgtcagcatggcgtgtgttgggttcttcttgctgcagggggcctggccacatgagggagtccacagaaaaccttccctcctggcccacccaggtcccctggtgaaatcagaagagacagtcatcctgcaatgttggtcagatgtcatgtttgaacacttccttctgcacagagaggggatgtttaacgacactttgcgcctcattggagaacaccatgatggggtctccaaggccaacttctccatcagtcgcatgacgcaagacctggcagggacctacagatgctacggttctgttactcactccccctatcaggtgtcagctcccagtgaccctctggacatcgtgatcataggtctatatgagaaaccttctctctcagcccagccgggccccacggttctggcaggagagaatgtgaccttgtcctgcagctcccggagctcctatgacatgtaccatctatccagggaaggggaggcccatgaacgtaggctccctgcagggcccaaggtcaacggaacattccaggctgactttcctctgggccctgccacccacggagggacctacagatgcttcggctctttccatgactctccatacgagtggtcaaagtcaagtgacccactgcttgtttctgtcacaggaaacccttcaaatagttggccttcacccactgaaccaagctccaaaaccggtaacccccgacacctgcacattctgattgggacctcagtggtcatcatcctcttcatcctcctcttctttctccttcatcgctggtgctccaacaaaaaaaatgctgcggtaatggaccaagagtctgcaggaaacagaacagcgaatagcgaggactctgatgaacaagaccctcaggaggtgacatacacacagttgaatcactgcgttttcacacagagaaaaatcactcgcccttctcagaggcccaagacacccccaacagatatcatcgtgtacacggaacttccaaatgctgagtccagatccaaagttgtctcctgcccatgagcaccacagtcaggccttgagggcgtcttctagggagacaacagccctgtctcaaaaccgggttgccagctcccatgtaccagcagctggaatctgaaggcatgagtctgcatcttagggcatcgatcttcctcacaccacaaatctgaatgtgcctctcacttgcttacaaatgtctaaggtccccactgcctgctggagaaaaaacacactcctttgcttagcccacagttctccatttcacttgacccctgcccacctctccaacctaactggcttacttcctagtctacttgaggctgcaatcacactgaggaactcacaattccaaacatacaagaggctccctcttaacgcagcacttagacacgtgttgttccaccttccctcatgctgttccacctcccctcagactagctttcagtcttctgtcagcagtaaaacttatatattttttaaaataacttcaatgtagttttccatccttcaaataaacatgtctgcccccatggt

SEQ ID NO: 146290 - DNA, 1593 bp, Homo sapiens
  Payload ID: 8976
  Gene Symbol: KIR2DL1
  Gene Name: killer cell immunoglobulin-like receptor, two domains, long cytoplasmic tail, 1
  ENST ID: ENST00000612069
  CDS Start-End: 38-1084
agctcggtcgcggctgcctgtctgctccggcagcaccatgtcgctcttggtcgtcagcatggcgtgtgttgggttcttcttgctgcagggggcctggccacatgagggagtccacagaaaaccttccctcctggcccacccaggtcgcctggtgaaatcagaagagacagtcatcctgcaatgttggtcagatgtcatgtttgaacacttccttctgcacagagaggggatgtttaacgacactttgcgcctcattggagaacaccatgatggggtctccaaggccaacttctccatcagtcgcatgacgcaagacctggcagggacctacagatgctacggttctgttactcactccccctatcaggtgtcagctcccagtgaccctctggacatcgtgatcataggtctatatgagaaaccttctctctcagcccagccgggccccacggttctggcaggagagaatgtgaccttgtcctgcagctcccggagctcctatgacatgtaccatctatccagggaaggggaggcccatgaacgtaggctccctgcagggcccaaggtcaacggaacattccaggctgactttcctctgggccctgccacccacggagggacctacagatgcttcggctctttccatgactctccatacgagtggtcaaagtcaagtgacccactgcttgtttctgtcacaggaaacccttcaaatagttggccttcacccactgaaccaagctccaaaaccggtaacccccgacacctgcacattctgattgggacctcagtggtcatcatcctcttcatcctcctcttctttctccttcatcgctggtgctccaacaaaaaaaatgctgcggtaatggaccaagagtctgcaggaaacagaacagcgaatagcgaggactctgatgaacaagaccctcaggaggtgacatacacacagttgaatcactgcgttttcacacagagaaaaatcactcgcccttctcagaggcccaagacacccccaacagatatcatcgtgtacacggaacttccaaatgctgagtccagatccaaagttgtctcctgcccatgagcaccacagtcaggccttgagggcgtcttctagggagacaacagccctgtctcaaaaccgggttgccagctcccatgtaccagcagctggaatctgaaggcatgagtctgcatcttagggcatcgctcttcctcacaccacaaatctgaatgtgcctctcacttgcttacaaatgtctaaggtccccactgcctgctggagaaaaaacacactcctttgcttagcccacagttctccatttcacttgacccctgcccacctctccaacctaactggcttacttcctagtctacttgaggctgcaatcacactgaggaactcacaattccaaacatacaagaggctccctcttaacgcagcacttagacacgtgttgttccaccttccctcatgctgttccacctcccctcagactagctttcagtcttctgtcagcagtaaaacttatatattttttaaaataacttcaatgtagttttccatccttcaaataaacatgtctgccccca

SEQ ID NO: 146291 - DNA, 1406 bp, Homo sapiens; identical to SEQ ID NO: 146280
  Payload ID: 8976
  Gene Symbol: KIR2DL1
  Gene Name: killer cell immunoglobulin-like receptor, two domains, long cytoplasmic tail, 1
  ENST ID: ENST00000618507
  CDS Start-End: 38-1084

SEQ ID NO: 146292 - DNA, 1212 bp, Homo sapiens
  Payload ID: 8976
  Gene Symbol: KIR2DL1
  Gene Name: killer cell immunoglobulin-like receptor, two domains, long cytoplasmic tail, 1
  ENST ID: ENST00000612312
  CDS Start-End: 27-1151
ggctgcctgtctgctccggcagcaccatgtcgctcttgttcgtcagcatggcgtgtgttgggttcttcttgctgcagggggcctggccacatgagggagtccacagaaaaccttccctcctggcccacccaggtcccctggtgaaatcagaagagacagtcatcctgcaatgttggtcagatgtcatgtttgaacacttccttctgcacagagaggggatgtttaacgacactttgcgcctcattggagaacaccatgatggggtctccaaggccaacttctccatcagtcgcatgacgcaagacctggcagggacctacagatgctacggttctgttactcactccccctatcaggtgtcagctcccagtgaccctctggacatcgtgatcataggtctatatgagaaaccttctctctcagcccagccgggccccacggttctggcaggagagaatgtgaccttgtcctgcagctcccggagctcctatgacatgtaccatctatccagggaaggggaggcccatgaacgtaggctccctgcagggcccaaggtcaacggaacattccaggctgactttcctctgggccctgccacccacggagggacctacagatgcttcggctctttccatgactctccatacgagtggtcaaagtcaagtgacccactgcttgtttctgtcacaggaaacccttcaaatagttggccttcacccactgaaccaagctccaaaaccgagaggatgtttcaccacgttggccaagcttgtctgaaactcccaacctcaagtgatccgaccgtctcagcatgccaaagtaacccccgacacctgcacattctgattgggacctcagtggtcatcatcctcttcatcctcctcttctttctccttcatcgctggtgctccaacaaaaaaaatgctgcggtaatggaccaagagtctgcaggaaacagaacagcgaatagcgaggactctgatgaacaagaccctcaggaggtgacatacacacagttgaatcactgcgttttcacacagagaaaaatcactcgcccttctcagaggcccaagacacccccaacagatatcatcgtgtacacggaacttccaaatgctgagtccagatccaaagttgtctcctgcccatgagcaccacagtcaggccttgagggcgtcttctagggagacaacagccctgtctcaaaaccgg

SEQ ID NO: 146293 - DNA, 1320 bp, Homo sapiens
  Payload ID: 8976
  Gene Symbol: KIR2DL1
  Gene Name: killer cell immunoglobulin-like receptor, two domains, long cytoplasmic tail, 1
  ENST ID: ENST00000618987
  CDS Start-End: 41-1087
ctgagctcggtcgcggctgcctgtctgctccggcagcaccatgtcgctcttggtcgtcagcatggcgtgtgttgggttcttcttgctgcagggggcctggccacatgagggagtccacagaaaaccttccctcctggcccacccaggtcgcctggtgaaatcagaagagacagtcatcctgcagtgttggtcagatgtcatgtttgaacacttccttctgcacagagaggggatgtttaacgacactttgcgcctcattggagaacaccatgatggggtctccaaggccaacttctccatcagtcgcatgacgcaagacctggcagggacctacagatgctacggttctgttactcactccccctatcaggtgtcagctcccagtgaccctctggacatcgtgatcataggtctatatgagaaaccttctctctcagcccagctgggccccacggttctggcaggagagaatgtgaccttgtcctgcagctcccggagctcctatgacatgtaccatctatccagggaaggggaggcccatgaacgtaggctccctgcagggcccaaggtcaacggaacattccaggctgactttcctctgggccctgccacccacggagggacctacagatgcttcggctctttccatgactctccatacgagtggtcaaagtcaagtgacccactgcttgtttctgtcacaggaaacccttcaaatagttggccttcacccactgaaccaagctccaaaaccggtaacccccgacacctgcacattctgattgggacctcagtggtcatcatcctcttcatcctcctcttctttctccttcatcgctggtgctccaacaaaaaaaatgctgcggtaatggaccaagagtctgcaggaaacagaacagcgaatagcgaggactctgatgaacaagaccctcaggaggtgacatacacacagttgaatcactgcgttttcacacagagaaaaatcactcgcccttctcagaggcccaagacacccccaacagatatcatcgtgtacacggaacttccaaatgctgagtccagatccaaagttgtctcctgcccatgagcaccacagtcaggccttgagggcgtcttctagggagacaacagccctgtctcaaaaccgggttgccagctcccatgtaccagcagctggaatctgaaggcgtgagtctgcatcttagggcatcgatcttcctcacaccacaaatctgaatgtgcctctctcttgcttacaaatgtctaaggtccccactgcctgctggagaaaaaacacactcctttgcttaacccacagtt

SEQ ID NO: 146294 - DNA, 1600 bp, Homo sapiens
  Payload ID: 8976
  Gene Symbol: KIR2DL1
  Gene Name: killer cell immunoglobulin-like receptor, two domains, long cytoplasmic tail, 1
  ENST ID: ENST00000617247
  CDS Start-End: 41-1087
ctgagctcggtcgcggctgcctgtctgctccggcagcaccatgtcgctcttggtcgtcagcatggcgtgtgttgggttcttcttgctgcagggggcctggccacatgagggagtccacagaaaaccttccctcctggcccacccaggtcgcctggtgaaatcagaagagacagtcatcctgcagtgttggtcagatgtcatgtttgaacacttccttctgcacagagaggggatgtttaacgacactttgcgcctcattggagaacaccatgatggggtctccaaggccaacttctccatcagtcgcatgacgcaagacctggcagggacctacagatgctacggttctgttactcactccccctatcaggtgtcagctcccagtgaccctctggacatcgtgatcataggtctatatgagaaaccttctctctcagcccagctgggccccacggttctggcaggagagaatgtgaccttgtcctgcagctcccggagctcctatgacatgtaccatctatccagggaaggggaggcccatgaacgtaggctccctgcagggcccaaggtcaacggaacattccaggctgactttcctctgggccctgccacccacggagggacctacagatgcttcggctctttccatgactctccatacgagtggtcaaagtcaagtgacccactgcttgtttctgtcacaggaaacccttcaaatagttggccttcacccactgaaccaagctccaaaaccggtaacccccgacacctgcacattctgattgggacctcagtggtcatcatcctcttcatcctcctcttctttctccttcatcgctggtgctccaacaaaaaaaatgctgcggtaatggaccaagagtctgcaggaaacagaacagcgaatagcgaggactctgatgaacaagaccctcaggaggtgacatacacacagttgaatcactgcgttttcacacagagaaaaatcactcgcccttctcagaggcccaagacacccccaacagatatcatcgtgtacacggaacttccaaatgctgagtccagatccaaagttgtctcctgcccatgagcaccacagtcaggccttgagggcgtcttctagggagacaacagccctgtctcaaaaccgggttgccagctcccatgtaccagcagctggaatctgaaggcgtgagtctgcatcttagggcatcgatcttcctcacaccacaaatctgaatgtgcctctctcttgcttacaaatgtctaaggtccccactgcctgctggagaaaaaacacactcctttgcttaacccacagttctccatttcacttgacccctgcccacctctccaacctaactggcttacttcctagtctacttgaggctgcaatcacactgaggaactcacaattccaaacatacaagaggctccctcttaacgcagcacttagacacgtgttgttccaccttccctcatgctgttccacctcccctcagactagctttcagtcttctgtcagcagtaaaacttatatattttttaaaataacttcaatgtagttttccatccttcaaataaacatgtctgcccccatggt

SEQ ID NO: 146295 - DNA, 1320 bp, Homo sapiens
  Payload ID: 8976
  Gene Symbol: KIR2DL1
  Gene Name: killer cell immunoglobulin-like receptor, two domains, long cytoplasmic tail, 1
  ENST ID: ENST00000616175
  CDS Start-End: 41-1087
ctgagctcggtcgcggctgcctgtctgctccggcagcaccatgtcgctcttggtcgtcagcatggcgtgtgttgggttcttcttgctgcagggggcctggccacatgagggagtccacagaaaaccttccctcctggcccacccaggtcgcctggtgaaatcagaagagacagtcatcctgcaatgttggtcagatgtcatgtttgaacacttccttctgcacagagaggggatgtttaacgacactttgcgcctcattggagaacaccatgatggggtctccaaggccaacttctccatcagtcgcatgacgcaagacctggcagggacctacagatgctacggttctgttactcactccccctatcaggtgtcagctcccagtgaccctctggacatcgtgatcataggtctatatgagaaaccttctctctcagcccagccgggccccacggttctggcaggagagaatgtgaccttgtcctgcagctcccggagctcctatgacatgtaccatctatccagggaaggggaggcccatgaacgtaggctccctgcagggaccaaggtcaacggaacattccaggccaactttcctctgggccctgccacccatggagggacctacagatgcttcggctctttccgtgactctccatacgagtggtcaaagtcaagtgacccactgcttgtttctgtcacaggaaacccttcaaatagttggccttcacccactgaaccaagctccgaaaccggtaacccccgacacctgcacattctgattgggacctcagtggtcatcatcctcttcatcctcctcttctttctccttcattgctggtgctccaacaaaaaaaatgctgcggtaatggaccaagagtctgcaggaaacagaacagcgaatagcgaggactctgatgaacaagaccctcaggaggtgacatacacacagttgaatcactgcgttttcacacagagaaaaatcactcgcccttctcagaggcccaagacacccccaacagatatcatcgtgtacacggaacttccaaatgctgagtccagatccaaagttgtctcctgcccatgagcaccacagtcaggccttgagggcgtcttctagggagacaacagccctgtctcaaaaccgggttgccagctcccatgtaccagcagctggaatctgaaggcatgagtctgcatcttagggcatcgctcttcctcacaccacaaatctgaatgtgcctctcacttgcttacaaatgtctaaggtccccactgcctgctggagaaaaaacacactcctttgcttagcccacagtt

SEQ ID NO: 146296 - DNA, 1212 bp, Homo sapiens
  Payload ID: 8976
  Gene Symbol: KIR2DL1
  Gene Name: killer cell immunoglobulin-like receptor, two domains, long cytoplasmic tail, 1
  ENST ID: ENST00000616631
  CDS Start-End: 27-1151
ggctgcctgtctgctccggcagcaccatgtcgctcttggtcgtcagcatggcgtgtgttgggttcttcttgctgcagggggcctggccacatgagggagtccacagaaaaccttccctcctggcccacccaggtcgcctggtgaaatcagaagagacagtcatcctgcaatgttggtcagatgtcatgtttgaacacttccttctgcacagagaggggatgtttaacgacactttgcgcctcattggagaacaccatgatggggtctccaaggccaacttctccatcagtcgcatgacgcaagacctggcagggacctacagatgctacggttctgttactcactccccctatcaggtgtcagctcccagtgaccctctggacatcgtgatcataggtctatatgagaaaccttctctctcagcccagccgggccccacggttctggcaggagagaatgtgaccttgtcctgcagctcccggagctcctatgacatgtaccatctatccagggaaggggaggcccatgaacgtaggctccctgcagggaccaaggtcaacggaacattccaggccaactttcctctgggccctgccacccatggagggacctacagatgcttcggctctttccgtgactctccatacgagtggtcaaagtcaagtgacccactgcttgtttctgtcacaggaaacccttcaaatagttggccttcacccactgaaccaagctccgaaaccgagaggatgtttcaccacgttggccaagcttgtctgaaactcccaacctcaagtgatccgaccgtctcagcatgccaaagtaacccccgacacctgcacattctgattgggacctcagtggtcatcatcctcttcatcctcctcttctttctccttcattgctggtgctccaacaaaaaaaatgctgcggtaatggaccaagagtctgcaggaaacagaacagcgaatagcgaggactctgatgaacaagaccctcaggaggtgacatacacacagttgaatcactgcgttttcacacagagaaaaatcactcgcccttctcagaggcccaagacacccccaacagatatcatcgtgtacacggaacttccaaatgctgagtccagatccaaagttgtctcctgcccatgagcaccacagtcaggccttgagggcgtcttctagggagacaacagccctgtctcaaaaccgg

SEQ ID NO: 146297 - DNA, 862 bp, Homo sapiens
  Payload ID: 8976
  Gene Symbol: KIR2DL1
  Gene Name: killer cell immunoglobulin-like receptor, two domains, long cytoplasmic tail, 1
  ENST ID: ENST00000614185
  CDS Start-End: 1-349
gtctcatcttcttccaggtaacccccgacacctgcacattctgattgggacctcagtggtcatcatcctcttcatcctcctcttctttctccttcatcgctggtgctccaacaaaaaaaatgctgcggtaatggaccaagagtctgcaggaaacagaacagcgaatagcgaggactctgatgaacaagaccctcaggaggtgacatacacacagttgaatcactgcgttttcacacagagaaaaatcactcgcccttctcagaggcccaagacacccccaacagatatcatcgtgtacacggaacttccaaatgctgagtccagatccaaagttgtctcctgcccatgagcaccacagtcaggccttgagggcgtcttctagggagacaacagccctgtctcaaaaccgggttgccagctcccatgtaccagcagctggaatctgaaggcatgagtctgcatcttagggcatcgatcttcctcacaccacaaatctgaatgtgcctctcacttgcttacaaatgtctaaggtccccactgcctgctggagaaaaaacacactcctttgcttagcccacagttctccatttcacttgacccctgcccacctctccaacctaactggcttacttcctagtctacttgaggctgcaatcacactgaggaactcacaattccaaacatacaagaggctccctcttaacgcagcacttagacacgtgttgttccaccttccctcatgctgttccacctcccctcagactagctttcagtcttctgtcagcagtaaaacttatatattttttaaaataacttcaatgtagttttccatccttcaaataaacatgtctgcccccatggt

SEQ ID NO: 146298 - DNA, 1600 bp, Homo sapiens; identical to SEQ ID NO: 146289
  Payload ID: 8976
  Gene Symbol: KIR2DL1
  Gene Name: killer cell immunoglobulin-like receptor, two domains, long cytoplasmic tail, 1
  Uniprot ID: P43626
  ENST ID: ENST00000615920
  CDS Start-End: 41-1087

SEQ ID NO: 146299 - DNA, 1572 bp, Homo sapiens
  Payload ID: 8976
  Gene Symbol: KIR2DL1
  Gene Name: killer cell immunoglobulin-like receptor, two domains, long cytoplasmic tail, 1
  ENST ID: ENST00000615298
  CDS Start-End: 15-1061
gctccggcagcaccatgtcgctcttggtcgtcagcatggcgtgtgttgggttcttcttgctgcagggggcctggccacatgagggagtccacagaaaaccttccctcctggcccacccaggtcgcctggtgaaatcagaagagacagtcatcctgcaatgttggtcagatgtcatgtttgaacacttccttctgcacagagaggggatgtttaacgacactttgcgcctcattggagaacaccatgatggggtctccaaggccaacttctccatcagtcgcatgacgcaagacctggcagggacctacagatgctacggttctgttactcactccccctatcaggtgtcagctcccagtgaccctctggacatcgtgatcataggtctatatgagaaaccttctctctcagcccagctgggccccacggttctggcaggagagaatgtgaccttgtcctgcagctcccggagctcctatgacatgtaccatctatccagggaaggggaggcccatgaacgtaggctccctgcagggcccaaggtcaacggaacattccaggctgactttcctctgggccctgccacccacggagggacctacagatgcttcggctctttccatgactctccatacgagtggtcaaagtcaagtgacccactgcttgtttctgtcacaggaaacccttcaaatagttggccttcacccactgaaccaagctccaaaaccggtaacccccgacacctgcacattctgattgggacctcagtggtcatcatcctcttcatcctcctcttctttctccttcatcgctggtgctccaacaagaaaaatgctgcggtaatggaccaagagtctgcaggaaacagaacagcgaatagcgaggactctgatgaacaagaccctcaggaggtgacatacacacagttgaatcactgcgttttcacacagagaaaaatcactcgcccttctcagaggcccaagacacccccaacagatatcatcgtgtacacggaacttccaaatgctgagtccagatccaaagttgtctcctgcccatgagcaccacagtcaggccttgagggcgtcttctagggagacaacagccctgtctcaaaaccgggttgccagctcccatgtaccagcagctggaatctgaaggcatgagtctgcatcttagggcatcgatcttcctcacaccacaaatctgaatgtgcctctcacttgcttacaaatgtctaaggtccccactgcctgctggagaaaaaacacactcctttgcttagcccacagttctccatttcacttgacccctgcccacctctccaacctaactggcttacttcctagtctacttgaggctgcaatcacactgaggaactcacaattccaaacatacaagaggctccctcttaacgcagcacttagacacgtgttgttccaccttccctcatgctgttccacctcccctcagactagctttcagtcttctgtcagcagtaaaacttatatattttttaaaataacttcaatgtagttttccatccttcaaataaacatgtctgcccccatg

SEQ ID NO: 146300 - DNA, 1406 bp, Homo sapiens
  Payload ID: 8976
  Gene Symbol: KIR2DL1
  Gene Name: killer cell immunoglobulin-like receptor, two domains, long cytoplasmic tail, 1
  ENST ID: ENST00000613465
  CDS Start-End: 38-1084
agctcggtcgcggctgcctgtctgctccggcagcaccatgtcgctcttggtcgtcagcatggcgtgtgttgggttcttcttgctgcagggggcctggccacatgagggagtccacagaaaaccttccctcctggcccacccaggtcgcctggtgaaatcagaagagacagtcatcctgcaatgttggtcagatgtcatgtttgaacacttccttctgcacagagaggggatgtttaacgacactttgcgcctcattggagaacaccatgatggggtctccaaggccaacttctccatcagtcgcatgacgcaagacctggcagggacctacagatgctacggttctgttactcactccccctatcaggtgtcagctcccagtgaccctctggacatcgtgatcataggtctatatgagaaaccttctctctcagcccagccgggccccacggttctggcaggagagaatgtgaccttgtcctgcagctcccggagctcctatgacatgtaccatctatccagggaaggggaggcccatgaacgtaggctccctgcagggaccaaggtcaacggaacattccaggccaactttcctctgggccctgccacccatggagggacctacagatgcttcggctctttccgtgactctccatacgagtggtcaaagtcaagtgacccactgcttgtttctgtcacaggaaacccttcaaatagttggccttcacccactgaaccaagctccgaaaccggtaacccccgacacctgcacattctgattgggacctcagtggtcatcatcctcttcatcctcctcttctttctccttcattgctggtgctccaacaaaaaaaatgctgcggtaatggaccaagagtctgcaggaaacagaacagcgaatagcgaggactctgatgaacaagaccctcaggaggtgacatacacacagttgaatcactgcgttttcacacagagaaaaatcactcgcccttctcagaggcccaagacacccccaacagatatcatcgtgtacacggaacttccaaatgctgagtccagatccaaagttgtctcctgcccatgagcaccacagtcaggccttgagggcgtcttctagggagacaacagccctgtctcaaaaccgggttgccagctcccatgtaccagcagctggaatctgaaggcatgagtctgcatcttagggcatcgctcttcctcacaccacaaatctgaatgtgcctctcacttgcttacaaatgtctaaggtccccactgcctgctggagaaaaaacacactcctttgcttagcccacagttctccatttcacttgacccctgcccacctctccaacctaactggcttacttcctagtctacttgaggctgcaatcacactgaggaactca

SEQ ID NO: 146301 - DNA, 1588 bp, Homo sapiens
  Payload ID: 8976
  Gene Symbol: KIR2DL1
  Gene Name: killer cell immunoglobulin-like receptor, two domains, long cytoplasmic tail, 1
  ENST ID: ENST00000610327
  CDS Start-End: 33-1079
ggtcgcggctgcctgtctgctccggcagcaccatgtcgctcttggtcgtcagcatggcgtgtgttgggttcttcttgctgcagggggcctggccacatgagggagtccacagaaaaccttccctcctggcccacccaggtcgcctggtgaaatcagaagagacagtcatcctgcagtgttggtcagatgtcatgtttgaacacttccttctgcacagagaggggatgtttaacgacactttgcgcctcattggagaacaccatgatggggtctccaaggccaacttctccatcagtcgcatgacgcaagacctggcagggacctacagatgctacggttctgttactcactccccctatcaggtgtcagctcccagtgaccctctggacatcgtgatcataggtctatatgagaaaccttctctctcagcccagctgggccccacggttctggcaggagagaatgtgaccttgtcctgcagctcccggagctcctatgacatgtaccatctatccagggaaggggaggcccatgaacgtaggctccctgcagggcccaaggtcaacggaacattccaggctgactttcctctgggccctgccacccacggagggacctacagatgcttcggctctttccatgactctccatacgagtggtcaaagtcaagtgacccactgcttgtttctgtcacaggaaacccttcaaatagttggccttcacccactgaaccaagctccaaaaccggtaacccccgacacctgcacattctgattgggacctcagtggtcatcatcctcttcatcctcctcttctttctccttcatcgctggtgctccaacaaaaaaaatgctgcggtaatggaccaagagtctgcaggaaacagaacagcgaatagcgaggactctgatgaacaagaccctcaggaggtgacatacacacagttgaatcactgcgttttcacacagagaaaaatcactcgcccttctcagaggcccaagacacccccaacagatatcatcgtgtacacggaacttccaaatgctgagtccagatccaaagttgtctcctgcccatgagcaccacagtcaggccttgagggcgtcttctagggagacaacagccctgtctcaaaaccgggttgccagctcccatgtaccagcagctggaatctgaaggcgtgagtctgcatcttagggcatcgatcttcctcacaccacaaatctgaatgtgcctctcacttgcttacaaatgtctaaggtccccactgcctgctggagaaaaaacacactcctttgcttaacccacagttctccatttcacttgacccctgcccacctctccaacctaactggcttacttcctagtctacttgaggctgcaatcacactgaggaactcacaattccaaacatacaagaggctccctcttaacgcagcacttagacacgtgttgttccaccttccctcatgctgttccacctcccctcagactagctttcagtcttctgtcagcagtaaaacttatatattttttaaaataacttcaatgtagttttccatccttcaaataaacatgtctgccccca

SEQ ID NO: 146302 - DNA, 1536 bp, Homo sapiens
  Payload ID: 8976
  Gene Symbol: KIR2DL1
  Gene Name: killer cell immunoglobulin-like receptor, two domains, long cytoplasmic tail, 1
  ENST ID: ENST00000611594
  CDS Start-End: 37-1083
gctcggtcgcggctgcctgtctgctccggcagcaccatgtcgctcttggtcgtcagcatggcgtgtgttgggttcttcttgctgcagggggcctggccacatgagggagtccacagaaaaccttccctcctggcccacccaggtcgcctggtgaaatcagaagagacagtcatcctgcagtgttggtcagatgtcatgtttgaacacttccttctgcacagagaggggatgtttaacgacactttgcgcctcattggagaacaccatgatggggtctccaaggccaacttctccatcagtcgcatgacgcaagacctggcagggacctacagatgctacggttctgttactcactccccctatcaggtgtcagctcccagtgaccctctggacatcgtgatcataggtctatatgagaaaccttctctctcagcccagctgggccccacggttctggcaggagagaatgtgaccttgtcctgcagctcccggagctcctatgacatgtaccatctatccagggaaggggaggcccatgaacgtaggctccctgcagggcccaaggtcaacggaacattccaggctgactttcctctgggccctgccacccacggagggacctacagatgcttcggctctttccatgactctccatacgagtggtcaaagtcaagtgacccactgcttgtttctgtcacaggaaacccttcaaatagttggccttcacccactgaaccaagctccaaaaccggtaacccccgacacctgcacattctgattgggacctcagtggtcatcatcctcttcatcctcctcttctttctccttcatcgctggtgctccaacaaaaaaaatgctgcggtaatggaccaagagtctgcaggaaacagaacagcgaatagcgaggactctgatgaacaagaccctcaggaggtgacatacacacagttgaatcactgcgttttcacacagagaaaaatcactcgcccttctcagaggcccaagacacccccaacagatatcatcgtgtacacggaacttccaaatgctgagtccagatccaaagttgtctcctgcccatgagcaccacagtcaggccttgagggcgtcttctagggagacaacagccctgtctcaaaaccgggttgccagctcccatgtaccagcagctggaatctgaaggcgtgagtctgcatcttagggcatcgatcttcctcacaccacaaatctgaatgtgcctctcacttgcttacaaatgtctaaggtccccactgcctgctggagaaaaaacacactcctttgcttaacccacagttctccatttcacttgacccctgcccacctctccaacctaactggcttacttcctagtctacttgaggctgcaatcacactgaggaactcacaattccaaacatacaagaggctccctcttaacgcagcacttagacacgtgttgttccaccttccctcatgctgttccacctcccctcagactagctttcagtcttctgtcagcagtaaaacttatatatt

SEQ ID NO: 146303 - DNA, 1454 bp, Homo sapiens
  Payload ID: 8976
  Gene Symbol: KIR2DL1
  Gene Name: killer cell immunoglobulin-like receptor, two domains, long cytoplasmic tail, 1
  ENST ID: ENST00000612129
  CDS Start-End: 12-1058
cagacagcaccatgtcgctcatggtcgtcagcatggtgtgtgttgggttcttcttgctgcagggggcctggccacatgagggagtccacagaaaaccttccctcctggcccacccaggtcccctggtgaaatcagaagagacagtcatcctgcaatgttggtcagatgtcaggtttcagcacttccttctgcacagagaagggaagtttaaggacactttgcacctcattggagagcaccatgatggggtctccaaggccaacttctccatcggtcccatgatgcaagaccttgcagggacctacagatgctacggttctgttactcactccccctatcagttgtcagctcccagtgaccctctggacatcgtcatcacaggtctatatgagaaaccttctctctcagcccagccgggccccacggttctggcaggagagagcgtgaccttgtcctgcagctcccggagctcctatgacatgtaccatctatccagggagggggaggcccatgaacgtaggttctctgcagggcccaaggtcaacggaacattccaggccgactttcctctgggccctgccacccacggaggaacctacagatgcttcggctctttccgtgactctccatacgagtggtcaaactcgagtgacccactgcttgtttctgtcacaggaaacccttcaaatagttggccttcacccactgaaccaagctccaaaaccggtaacccccgacacctgcacattctgattgggacctcagtggtcatcatcctcttcatcctcctcttctttctccttcatcgctggtgctccaacaaaaaaaatgctgcggtaatggaccaagagtctgcaggaaacagaacagcgaatagcgaggactctgatgaacaagaccctcaggaggtgacatacacacagttgaatcactgcgttttcacacagagaaaaatcactcgcccttctcagaggcccaagacacccccaacagatatcatcgtgtacacggaacttccaaatgctgagtccagatccaaagttgtctcctgcccatgagcaccacagtcaggccttgagggcgtcttctagggagacaacagccctgtctcaaaaccgggttgccagctcccatgtaccagcagctggaatctgaaggcatgagtctgcatcttagggcatcgatcttcctcacaccacaaatctgaatgtgcctctcacttgcttacaaatgtctaaggtccccactgcctgctggagaaaaaacacactcctttgcttagcccacagttctccatttcacttgacccctgcccacctctccaacctaactggcttacttcctagtctacttgaggctgcaatcacactgaggaactcacaattccaaacatacaagaggctccctcttaacgcagcacttagacacgtgttgttccaccttccctcatgctg

SEQ ID NO: 146304 - DNA, 1406 bp, Homo sapiens
  Payload ID: 8976
  Gene Symbol: KIR2DL1
  Gene Name: killer cell immunoglobulin-like receptor, two domains, long cytoplasmic tail, 1
  ENST ID: ENST00000610627
  CDS Start-End: 38-1084
agctcggtcgcggctgcctgtctgctccggcagcaccatgtcgctcttggtcgtcagcatggcgtgtgttgggttcttcttgctgcagggggcctggccacatgagggagtccacagaaaaccttccctcctggcccacccaggtcgcctggtgaaatcagaagagacagtcatcctgcagtgttggtcagatgtcatgtttgaacacttccttctgcacagagaggggatgtttaacgacactttgcgcctcattggagaacaccatgatggggtctccaaggccaacttctccatcagtcgcatgacgcaagacctggcagggacctacagatgctacggttctgttactcactccccctatcaggtgtcagctcccagtgaccctctggacatcgtgatcataggtctatatgagaaaccttctctctcagcccagctgggccccacggttctggcaggagagaatgtgaccttgtcctgcagctcccggagctcctatgacatgtaccatctatccagggaaggggaggcccatgaacgtaggctccctgcagggcccaaggtcaacggaacattccaggctgactttcctctgggccctgccacccacggagggacctacagatgcttcggctctttccatgactctccatacgagtggtcaaagtcaagtgacccactgcttgtttctgtcacaggaaacccttcaaatagttggccttcacccactgaaccaagctccaaaaccggtaacccccgacacctgcacattctgattgggacctcagtggtcatcatcctcttcatcctcctcttctttctccttcatcgctggtgctccaacaaaaaaaatgctgcggtaatggaccaagagtctgcaggaaacagaacagcgaatagcgaggactctgatgaacaagaccctcaggaggtgacatacacacagttgaatcactgcgttttcacacagagaaaaatcactcgcccttctcagaggcccaagacacccccaacagatatcatcgtgtacacggaacttccaaatgctgagtccagatccaaagttgtctcctgcccatgagcaccacagtcaggccttgagggcgtcttctagggagacaacagccctgtctcaaaaccgggttgccagctcccatgtaccagcagctggaatctgaaggcgtgagtctgcatcttagggcatcgatcttcctcacaccacaaatctgaatgtgcctctcacttgcttacaaatgtctaaggtccccactgcctgctggagaaaaaacacactcctttgcttaacccacagttctccatttcacttgacccctgcccacctctccaacctaactggcttacttcctagtctacttgaggctgcaatcacactgaggaactca

SEQ ID NO: 146305 - DNA, 1212 bp, Homo sapiens; identical to SEQ ID NO: 146283
  Payload ID: 8976
  Gene Symbol: KIR2DL1
  Gene Name: killer cell immunoglobulin-like receptor, two domains, long cytoplasmic tail, 1
  Uniprot ID: P43626
  ENST ID: ENST00000618563
  CDS Start-End: 27-1151

SEQ ID NO: 146306 - DNA, 1212 bp, Homo sapiens; identical to SEQ ID NO: 146283
  Payload ID: 8976
  Gene Symbol: KIR2DL1
  Gene Name: killer cell immunoglobulin-like receptor, two domains, long cytoplasmic tail, 1
  Uniprot ID: P43626
  ENST ID: ENST00000617376
  CDS Start-End: 27-1151

SEQ ID NO: 146307 - DNA, 1585 bp, Homo sapiens
  Payload ID: 8976
  Gene Symbol: KIR2DL1
  Gene Name: killer cell immunoglobulin-like receptor, two domains, long cytoplasmic tail, 1
  ENST ID: ENST00000617127
  CDS Start-End: 30-1076
cgcggctgcctgtctgctccggcagcaccatgtcgctcttggtcgtcagcatggcgtgtgttgggttcttcttgctgcagggggcctggccacatgagggagtccacagaaaaccttccctcctggcccacccaggtcgcctggtgaaatcagaagagacagtcatcctgcaatgttggtcagatgtcatgtttgaacacttccttctgcacagagaggggatgtttaacgacactttgcgcctcattggagaacaccatgatggggtctccaaggccaacttctccatcagtcgcatgacgcaagacctggcagggacctacagatgctacggttctgttactcactccccctatcaggtgtcagctcccagtgaccctctggacatcgtgatcataggtctatatgagaaaccttctctctcagcccagccgggccccacggttctggcaggagagaatgtgaccttgtcctgcagctcccggagctcctatgacatgtaccatctatccagggaaggggaggcccatgaacgtaggctccctgcagggaccaaggtcaacggaacattccaggccaactttcctctgggccctgccacccatggagggacctacagatgcttcggctctttccgtgactctccatacgagtggtcaaagtcaagtgacccactgcttgtttctgtcacaggaaacccttcaaatagttggccttcacccactgaaccaagctccgaaaccggtaacccccgacacctgcacattctgattgggacctcagtggtcatcatcctcttcatcctcctcttctttctccttcatcgctggtgctccaacaaaaaaaatgctgcggtaatggaccaagagtctgcaggaaacagaacagcgaatagcgaggactctgatgaacaagaccctcaggaggtgacatacacacagttgaatcactgcgttttcacacagagaaaaatcactcgcccttctcagaggcccaagacacccccaacagatatcatcgtgtacacggaacttccaaatgctgagtccagatccaaagttgtctcctgcccatgagcaccacagtcaggccttgagggcgtcttctagggagacaacagccctgtctcaaaaccgggttgccagctcccatgtaccagcagctggaatctgaaggcatgagtctgcatcttagggcatcgctcttcctcacaccacaaatctgaatgtgcctctcacttgcttacaaatgtctaaggtccccactgcctgctggagaaaaaacacactcctttgcttagcccacagttctccatttcacttgacccctgcccacctctccaacctaactggcttacttcctagtctacttgaggctgcaatcacactgaggaactcacaattccacacatacaagaggctccgtcttaacgcagcacttagacacgtgctgttccaccttccctcatgctgttccacctcccctcagactagctttcagccttctgtcagcagtaaaacttatatattttttaaaataacttcaatgtagttttccatccttcaaataaacatgtctgccctca

SEQ ID NO: 146308 - DNA, 1212 bp, Homo sapiens; identical to SEQ ID NO: 146292
  Payload ID: 8976
  Gene Symbol: KIR2DL1
  Gene Name: killer cell immunoglobulin-like receptor, two domains, long cytoplasmic tail, 1
  ENST ID: ENST00000611849
  CDS Start-End: 27-1151

SEQ ID NO: 146309 - DNA, 1320 bp, Homo sapiens
  Payload ID: 8976
  Gene Symbol: KIR2DL1
  Gene Name: killer cell immunoglobulin-like receptor, two domains, long cytoplasmic tail, 1
  ENST ID: ENST00000613580
  CDS Start-End: 41-1087
ctgagctcggtcgcggctgcctgtctgctccggcagcaccatgtcgctcttggtcgtcagcatggcgtgtgttgggttcttcttgctgcagggggcctggccacatgagggagtccacagaaaaccttccctcctggcccacccaggtcgcctggtgaaatcagaagagacagtcatcctgcagtgttggtcagatgtcatgtttgaacacttccttctgcacagagaggggatgtttaacgacactttgcgcctcattggagaacaccatgatggggtctccaaggccaacttctccatcagtcgcatgacgcaagacctggcagggacctacagatgctacggttctgttactcactccccctatcaggtgtcagctcccagtgaccctctggacatcgtgatcataggtctatatgagaaaccttctctctcagcccagctgggccccacggttctggcaggagagaatgtgaccttgtcctgcagctcctggagctcctatgacatgtaccatctatccagggaaggggaggcccatgaacgtaggctccctgcagggcccaaggtcaacggaacattccaggctgactttcctctgggccctgccacccacggagggacctacagatgcttcggctctttccatgactctccatacgagtggtcaaagtcaagtgacccactgcttgtttctgtcacaggaaacccttcaaatagttggccttcacccactgaaccaagctccaaaaccggtaacccccgacacctgcacattctgattgggacctcagtggtcatcatcctcttcatcctcctcttctttctccttcatcgctggtgctccaacaaaaaaaatgctgcggtaatggaccaagagtctgcaggaaacagaacagcgaatagcgaggactctgatgaacaagaccctcaggaggtgacatacacacagttgaatcactgcgttttcacacagagaaaaatcactcgcccttctcagaggcccaagacacccccaacagatatcatcgtgtacacggaacttccaaatgctgagtccagatccaaagttgtctcctgcccatgagcaccacagtcaggccttgagggcgtcttctagggagacaacagccctgtctcaaaaccgggttgccagctcccatgtaccagcagctggaatctgaaggcgtgagtctgcatcttagggcatcgatcttcctcacaccacaaatctgaatgtgcctctcacttgcttacaaatgtctaaggtccccactgcctgctggagaaaaaacacactcctttgcttaacccacagtt

SEQ ID NO: 146310 - DNA, 1576 bp, Homo sapiens
  Payload ID: 8976
  Gene Symbol: KIR2DL1
  Gene Name: killer cell immunoglobulin-like receptor, two domains, long cytoplasmic tail, 1
  ENST ID: ENST00000616642
  CDS Start-End: 21-1067
ctgtctgctccggcagcaccatgtcgctcttggtcgtcagcatggcgtgtgttgggttcttcttgctgcagggggcctggccacatgagggagtccacagaaaaccttccctcctggcccacccaggtcgcctggtgaaatcagaagagacagtcatcctgcaatgttggtcagatgtcatgtttgaacacttccttctgcacagagaggggatgtttaacgacactttgcgcctcattggagaacaccatgatggggtctccaaggccaacttctccatcagtcgcatgacgcaagacctggcagggacctacagatgctacggttctgttactcactccccctatcaggtgtcagctcccagtgaccctctggacgtcgtgatcataggtctatatgagaaaccttctctctcagcccagccgggccccacggttctggcaggagagaatgtgaccttgtcctgcagctcccggagctcctatgacatgtaccatctatccagggaaggggaggcccatgaacgtaggctccctgcagggaccaaggtcaacggaacattccaggccaactttcctctgggccctgccacccatggagggacctacagatgcttcggctctttccgtgactctccatacgagtggtcaaagtcaagtgacccactgcttgtttctgtcacaggaaacccttcaaatagttggccttcacccactgaaccaagctccgaaaccggtaacccccgacacctgcacattctgattgggacctcagtggtcatcatcctcttcatcctcctcttctttctccttcattgctggtgctccaacaaaaaaaatgctgcggtaatggaccaagagtctgcaggaaacagaacagcgaatagcgaggactctgatgaacaagaccctcaggaggtgacatacacacagttgaatcactgcgttttcacacagagaaaaatcactcgcccttctcagaggcccaagacacccccaacagatatcatcgtgtacacggaacttccaaatgctgagtccagatccaaagttgtctcctgcccatgagcaccacagtcaggccttgagggcgtcttctagggagacaacagccctgtctcaaaaccgggttgccagctcccatgtaccagcagctggaatctgaaggcatgagtctgcatcttagggcatcgctcttcctcacaccacaaatctgaatgtgcctctcacttgcttacaaatgtctaaggtccccactgcctgctggagaaaaaacacactcctttgcttagcccacagttctccatttcacttgacccctgcccacctctccaacctaactggcttacttcctagtctacttgaggctgcaatcacactgaggaactcacaattccaaacatacaagaggctccctcttaacgcagcacttagacacgtgttgttccaccttccctcatgctgttccacctcccctcagactagctttcagtcttctgtcagcagtaaaacttatatattttttaaaataacttcaatgtagttttccatccttcaaataaacatgtctgccccca

SEQ ID NO: 146311 - DNA, 1598 bp, Homo sapiens
  Payload ID: 8977
  Gene Symbol: KIR2DL2
  Gene Name: killer cell immunoglobulin-like receptor, two domains, long cytoplasmic tail, 2
  ENST ID: ENST00000613810
  CDS Start-End: 39-1085
gagctggggcgcagccgcctgtctgcaccggcagcaccatgtcgctcatggtcgtcagcatggcgtgtgttgggttcttcttgctgcagggggcctggccacatgagggagtccacagaaaaccttccctcctggcccacccaggtcgcctggtgaaatcagaagagacagtcatcctgcaatgttggtcagatgtcaggtttgagcacttccttctgcacagagaagggaagtttaaggacactttgcacctcattggagagcaccatgatggggtctccaaagccaacttctccatcggtcccatgatgcaagaccttgcagggacctacagatgctacggttctgttactcactccccctatcagttgtcagctcccagtgaccctctggacatcgtcatcacaggtctatatgagaaaccttctctctcagcccagccgggccccacggttctggcaggagagagcgtgaccttgtcctgcagctcccggagctcctatgacatgtaccatctatccagggagggggaggcccatgaatgtaggttctctgcagggcccaaggtcaacggaacattccaggccgactttcctctgggccctgccacccacggaggaacctacagatgcttcggctctttccgtgactctccatacgagtggtcaaactcgagtgacccactgcttgtttctgtcacaggaaacccttcaaatagttggccttcacccactgaaccaagctctaaaaccggtaacccccgacacctgcacattctgattgggacctcagtggtcatcatcctcttcatcctcctcttctttctccttcatcgctggtgctccaacaaaaaaaatgctgcggtaatggaccaagagtctgcagggaacagaacagcgaatagcgaggactctgatgaacaagaccctcaggaggtgacatacacacagttgaatcactgcgttttcacacagagaaaaatcactcgcccttctcagaggcccaagacacccccaacagatatcatcgtgtacacggaacttccaaatgctgagtccagatccaaagttgtctcctgcccatgagcaccacagtcaggccttgagggcgtcttctagggagacaacagccctgtctcaaaaccgggttgccagctcccatgtaccagcagctggaatctgaaggcatgagtctgcatcttagggcatcgctcttcctcacaccacaaatctgaatgtgcctctcacttgcttacaaatgtctaaggtccccactgcctgctggagaaaaaacacactcctttgcttagcccacagttctccatttcacttgacccctgcccacctctccaacctaactggcttacttcctagtctacttgaggctgcaatcacactgaggaactcacaattccaaacatacaagaggctccctcttaacgcagcacttagacacgtgttgttccaccttccctcatgctgttccacctcccctcagactagctttcagtcttctgtcagcagtaaaacttatatattttttaaaataacttcaatgtagttttccatccttcaaataaacatgtctgcccccatggt

SEQ ID NO: 146312 - DNA, 1598 bp, Homo sapiens
  Payload ID: 8977
  Gene Symbol: KIR2DL2
  Gene Name: killer cell immunoglobulin-like receptor, two domains, long cytoplasmic tail, 2
  ENST ID: ENST00000620664
  CDS Start-End: 39-1085
gagctggggcgcagccgcctgtctgcaccggcagcaccatgtcgctcatggtcgtcagcatggcgtgtgttgggttcttcttgctgcagggggcctggccacatgagggagtccacagaaaaccttccctcctggcccacccaggtcccctggtgaaatcagaagagacagtcatcctgcaatgttggtcagatgtcaggtttgagcacttccttctgcacagagaggggaagtataaggacactttgcacctcattggagagcaccatgatggggtctccaaggccaacttctccatcggtcccatgatgcaagaccttgcagggacctacagatgctacggttctgttactcactccccctatcagttgtcagctcccagtgaccctctggacatcgtcatcacaggtctatatgagaaaccttctctctcagcccagccgggccccacggttttggcaggagagagcgtgaccttgtcctgcagctcccggagctcctatgacatgtaccatctatccagggagggggaggcccatgaacgtaggttctctgcagggcccaaggtcaacggaacattccaggccgactttcctctgggccctgccacccacggaggaacctacagatgcttcggctctttccgtgactctccctatgagtggtcaaactcgagtgacccactgcttgtttctgtcacaggaaacccttcaaatagttggccttcacccactgaaccaagctccaaaaccggtaacccccgacacctgcacattctgattgggacctcagtggtcatcatcctcttcatcctcctcttctttctccttcatcgctggtgctccaacaaaaaaaatgctgcggtaatggaccaagagtctgcagggaacagaacagcgaatagcgaggactctgatgaacaagaccctcaggaggtgacatacacacagttgaatcactgcgttttcacacagagaaaaatcactcgcccttctcagaggcccaagacacccccaacagatatcatcgtgtacgcggaacttccaaatgctgagtccagatccaaagttgtctcctgcccatgagcaccacagtcaggccttgagggcgtcttctagggagacaacagctctgtctcaaaaccgggttgccagctcccatgtaccagcagctggaatctgaaggcatgagtctgcatcttagggcatcgctcttcctcacaccacaaatctgaatgtgcctctcacttgcttacaaatgtctaaggtccccactgcctgctggagaaaaaacacactcctttgcttagcccacagttctccatttcacttgacccctgcccacctctccaacctaactggcttacttcctagtctacttgaggctgcaatcacactgaggaactcacaattccaaacatacaagaggctccctcttaacgcagcacttagacacgtgttgttccaccttccctcatgctgttccacctcccctcagactagctttcagtcttctgtcagcagtaaaacttatatattttttaaaataacttcaatgtagttttccatccttcaaataaacatgtctgcccccatggt

SEQ ID NO: 146313 - DNA, 1509 bp, Homo sapiens
  Payload ID: 8977
  Gene Symbol: KIR2DL2
  Gene Name: killer cell immunoglobulin-like receptor, two domains, long cytoplasmic tail, 2
  ENST ID: ENST00000618906
  CDS Start-End: 1-996
atgtcgctcatggtcgtcagcatggcgtgtgttgggttcttcttgctgcagggggcctggccacatgagggagtccacagaaaaccttccctcctggcccacccaggtcgcctggtgaaatcagaagagacagtcatcctgcaatgttggtcagatgtcaggtttgagcacttccttctgcacagagaagggaagtttaaggacactttgcacctcattggagagcaccatgatggggtctccaaagccaacttctccatcggtcccatgatgcaagaccttgcagggacctacagatgctacggttctgttactcactccccctatcagttgtcagctcccagtgaccctctggacatcgtcatcacaggtctatatgagaaaccttctctctcagcccagccgggccccacggttctggcaggagagagcgtgaccttgtcctgcagctcccggagctcctatgacatgtaccatctatccagggagggggaggcccatgaatgtaggttctctgcagggcccaaggtcaacggaacattccaggccgactttcctctgggccctgccacccacggaggaacctacagatgcttcggctctttccgtgactctccatacgagtggtcaaactcgagtgacccactgcttgtttctgtcacaggtaacccccgacacctgcacattctgattgggacctcagtggtcatcatcctcttcatcctcctcttctttctccttcatcgctggtgctccaacaaaaaaaatgctgcggtaatggaccaagagtctgcagggaacagaacagcgaatagcgaggactctgatgaacaagaccctcaggaggtgacatacacacagttgaatcactgcgttttcacacagagaaaaatcactcgcccttctcagaggcccaagacacccccaacagatatcatcgtgtacacggaacttccaaatgctgagtccagatccaaagttgtctcctgcccatgagcaccacagtcaggccttgagggcgtcttctagggagacaacagccctgtctcaaaaccgggttgccagctcccatgtaccagcagctggaatctgaaggcatgagtctgcatcttagggcatcgctcttcctcacaccacaaatctgaatgtgcctctcacttgcttacaaatgtctaaggtccccactgcctgctggagaaaaaacacactcctttgcttagcccacagttctccatttcacttgacccctgcccacctctccaacctaactggcttacttcctagtctacttgaggctgcaatcacactgaggaactcacaattccaaacatacaagaggctccctcttaacgcagcacttagacacgtgttgttccaccttccctcatgctgttccacctcccctcagactagctttcagtcttctgtcagcagtaaaacttatatattttttaaaataacttcaatgtagttttccatccttcaaataaacatgtctgcccccatggt

SEQ ID NO: 146314 - DNA, 1572 bp, Homo sapiens
  Payload ID: 8977
  Gene Symbol: KIR2DL2
  Gene Name: killer cell immunoglobulin-like receptor, two domains, long cytoplasmic tail, 2
  Uniprot ID: P43627
  ENST ID: ENST00000618388
  CDS Start-End: 15-1061
gcacagacagcaccatgtcgctcatggtcgtcagcatggcgtgtgttgggttcttcttgctgcagggggcctggccacatgagggagtccacagaaaaccttccctcctggcccacccaggtcgcctggtgaaatcagaagagacagtcatcctgcaatgttggtcagatgtcaggtttgagcacttccttctgcacagagaagggaagtttaaggacactttgcacctcattggagagcaccatgatggggtctccaaagccaacttctccatcggtcccatgatgcaagaccttgcagggacctacagatgctacggttctgttactcactccccctatcagttgtcagctcccagtgaccctctggacatcgtcatcacaggtctatatgagaaaccttctctctcagcccagccgggccccacggttctggcaggagagagcgtgaccttgtcctgcagctcccggagctcctatgacatgtaccatctatccagggagggggaggcccatgaatgtaggttctctgcagggcccaaggtcaacggaacattccaggccgactttcctctgggccctgccacccacggaggaacctacagatgcttcggctctttccgtgactctccatacgagtggtcaaactcgagtgacccactgcttgtttctgtcataggaaacccttcaaatagttggccttcacccactgaaccaagctctaaaaccggtaacccccgacacctgcacattctgattgggacctcagtggtcatcatcctcttcatcctcctcttctttctccttcatcgctggtgctccaacaaaaaaaatgctgcggtaatggaccaagagtctgcagggaacagaacagcgaatagcgaggactctgatgaacaagaccctcaggaggtgacatacacacagttgaatcactgcgttttcacacagagaaaaatcactcgcccttctcagaggcccaagacacccccaacagatatcatcgtgtacgcggaacttccaaatgctgagtccagatccaaagttgtctcctgcccatgagcaccacagtcaggccttgagggcgtcttctagggagacaacagccctgtctcaaaaccgggttgccagctcccatgtaccagcagctggaatctgaaggcatgagtctgcatcttagggcatcgctcttcctcacaccacaaatctgaatgtgcctctcacttgcttacaaatgtctaaggtccccactgcctgctggagaaaaaacacactcctttgcttagcccacagttctccatttcacttgacccctgcccacctctccaacctaactggcttacttcctagtctacttgaggctgcaatcacactgaggaactcacaattccaaacatacaagaggctccctcttaacgcagcacttagacacgtgttgttccaccttccctcatgctgttccacctcccctcagactagctttcagtcttctgtcagcagtaaaacttatatattttttaaaataacttcaatgtagttttccatccttcaaataaacatgtctgcccccatg

SEQ ID NO: 146315 - DNA, 1598 bp, Homo sapiens
  Payload ID: 8977
  Gene Symbol: KIR2DL2
  Gene Name: killer cell immunoglobulin-like receptor, two domains, long cytoplasmic tail, 2
  ENST ID: ENST00000614566
  CDS Start-End: 39-1085
gagctggggcgcggccgcctgtctgcacagacagcaccatgtcgctcatggtcgtcagcatggcgtgtgttgggttcttcttgctgcagggggcctggccacatgagggagtccacagaaaaccttccctcctggcccacccaggtcgcctggtgaaatcagaagagacagtcatcctgcaatgttggtcagatgtcaggtttgagcacttccttctgcacagagaagggaagtttaaggacactttgcacctcattggagagcaccatgatggggtctccaaagccaacttctccatcggtcccatgatgcaagaccttgcagggacctacagatgctacggttctgttactcactccccctatcagttgtcagctcccagtgaccctctggacatcgtcatcacaggtctatatgagaaaccttctctctcagcccagccgggccccacggttctggcaggagagagcgtgaccttgtcctgcagctcccggagctcctatgacatgtaccatctatccagggagggggaggcccatgaatgtaggttctctgcagggcccaaggtcaacggaacattccaggccgactttcctctgggccctgccacccacggaggaacctacagatgcttcggctctttccgtgactctccatacgagtggtcaaactcgagtgacccactgcttgtttctgtcacaggaaacccttcaaatagttggccttcacccactgaaccaagctctaaaaccggtaacccccgacacctgcacattctgattgggacctcagtggtcatcatcctcttcatcctcctcttctttctccttcatcgctggtgctccaacaaaaaaaatgctgcggtaatggaccaagagtctgcagggaacagaacagcgaatagcgaggactctgatgaacaagaccctcaggaggtgacatacacacagttgaatcactgcgttttcacacagagaaaaatcactcgcccttctcagaggcccaagacacccccaacagatatcatcgtgtacacggaacttccaaatgctgagtccagatccaaagttgtctcctgcccatgagcaccacagtcaggccttgagggcgtcttctagggagacaacagccctgtctcaaaaccgggttgccagctcccatgtaccagcagctggaatctgaaggcatgagtctgcatcttagggcatcgctcttcctcacaccacaaatctgaatgtgcctctcacttgcttacaaatgtctaaggtccccactgcctgctggagaaaaaacacactcctttgcttagcccacagttctccatttcacttgacccctgcccacctctccaacctaactggcttacttcctagtctacttgaggctgcaatcacactgaggaactcacaattccaaacatacaagaggctccctcttaacgcagcacttagacacgtgttgttccaccttccctcatgctgttccacctcccctcagactagctttcagtcttctgtcagcagtaaaacttatatattttttaaaataacttcaatgtagttttccatccttcaaataaacatgtctgcccccatggt

SEQ ID NO: 146316 - DNA, 1598 bp, Homo sapiens
  Payload ID: 8977
  Gene Symbol: KIR2DL2
  Gene Name: killer cell immunoglobulin-like receptor, two domains, long cytoplasmic tail, 2
  ENST ID: ENST00000619239
  CDS Start-End: 39-1085
gagctggggcgcagccgcctgtctgcaccggcagcaccatgtcgctcatggtcgtcagcatggcgtgtgttgggttcttcttgctgcagggggcctggccacatgagggagtccacagaaaaccttccctcctggcccacccaggtcccctggtgaaatcagaagagacagtcatcctgcaatgttggtcagatgtcaggtttgagcacttccttctgcacagagaggggaagtataaggacactttgcacctcattggagagcaccatgatggggtctccaaggccaacttctccatcggtcccatgatgcaagaccttgcagggacctacagatgctacggttctgttactcactccccctatcagttgtcagctcccagtgaccctctggacatcgtcatcacaggtctatatgagaaaccttctctctcagcccagccgggccccacggttttggcaggagagagcgtgaccttgtcctgcagctcccggagctcctatgacatgtaccatctatccagggagggggaggcccatgaacgtaggttctctgcagggcccaaggtcaacggaacattccaggccgactttcctctgggccctgccacccacggaggaacctacagatgcttcggctctttccgtgactctccctatgagtggtcaaactcgagtgacccactgcttgtttctgtcacaggaaacccttcaaatagttggccttcacccactgaaccaagctccaaaaccggtaacccccgacacctgcacattctgattgggacctcagtggtcatcatcctcttcatcctcctcttctttctccttcatcgctggtgctccaacaaaaaaaatgctgcggtaatggaccaagagtctgcagggaacagaacagcgaatagcgaggactctgatgaacaagaccctcaggaggtgacatacacacagttgaatcactgcgttttcacacagagaaaaatcactcgcccttctcagaggcccaagacacccccaacagatatcatcgtgtacgcggaacttccaaatgctgagtccagatccaaagttgtctcctgcccatgagcaccacagtcaggccttgagggcgtcttctagggagacaacagccctgtctcaaaaccgggttgccagctcccatgtaccagcagctggaatctgaaggcatgagtctgcatcttagggcatcgctcttcctcacaccacaaatctgaatgtgcctctcacttgcttacaaatgtctaaggtccccactgcctgctggagaaaaaacacactcctttgcttagcccacagttctccatttcacttgacccctgcccacctctccaacctaactggcttacttcctagtctacttgaggctgcaatcacactgaggaactcacaattccaaacatacaagaggctccctcttaacgcagcacttagacacgtgttgttccaccttccctcatgctgttccacctcccctcagactagctttcagtcttctgtcagcagtaaaacttatatattttttaaaataacttcaatgtagttttccatccttcaaataaacatgtctgcccccatggt

SEQ ID NO: 146317 - DNA, 1598 bp, Homo sapiens; identical to SEQ ID NO: 146311
  Payload ID: 8977
  Gene Symbol: KIR2DL2
  Gene Name: killer cell immunoglobulin-like receptor, two domains, long cytoplasmic tail, 2
  ENST ID: ENST00000613017
  CDS Start-End: 39-1085

SEQ ID NO: 146318 - DNA, 1572 bp, Homo sapiens
  Payload ID: 8977
  Gene Symbol: KIR2DL2
  Gene Name: killer cell immunoglobulin-like receptor, two domains, long cytoplasmic tail, 2
  ENST ID: ENST00000621461
  CDS Start-End: 15-1061
gcacagacagcaccatgtcgctcatggtcgtcagcatggcgtgtgttgggttcttcttgctgcagggggcctggccacatgagggagtccacagaaaaccttccctcctggcccacccaggtcgcctggtgaaatcagaagagacagtcatcctgcaatgttggtcagatgtcaggtttgagcacttccttctgcacagagaagggaagtttaaggacactttgcacctcattggagagcaccatgatggggtctccaaagccaacttctccatcggtcccatgatgcaagaccttgcagggacctacagatgctacggttctgttactcactccccctatcagttgtcagctcccagtgaccctctggacatcgtcatcacaggtctatatgagaaaccttctctctcagcccagccgggccccacggttctggcaggagagagcgtgaccttgtcctgcagctcccggagctcctatgacatgtaccatctatccagggagggggaggcccatgaatgtaggttctctgcagggcccaaggtcaacggaacattccaggccgactttcctctgggccctgccacccacggaggaacctacagatgcttcggctctttccgtgactctccatacgagtggtcaaactcgagtgacccactgcttgtttctgtcacaggaaacccttcaaatagttggccttcacccactgaaccaagctctaaaaccggtaacccccgacacctgcacattctgattgggacctcagtggtcatcatcctcttcatcctcctcttctttctccttcatcgctggtgctccaacaaaaaaaatgctgcggtaatggaccaagagtctgcagggaacagaacagcgaatagcgaggactctgatgaacaagaccctcaggaggtgacatacacacagttgaatcactgcgttttcacacagagaaaaatcactcgcccttctcagaggcccaagacacccccaacagatatcatcgtgtacacggaacttccaaatgctgagtccagatccaaagttgtctcctgcccatgagcaccacagtcaggccttgagggcgtcttctagggagacaacagccctgtctcaaaaccgggttgccagctcccatgtaccagcagctggaatctgaaggcatgagtctgcatcttagggcatcgctcttcctcacaccacaaatctgaatgtgcctctcacttgcttacaaatgtctaaggtccccactgcctgctggagaaaaaacacactcctttgcttagcccacagttctccatttcacttgacccctgcccacctctccaacctaactggcttacttcctagtctacttgaggctgcaatcacactgaggaactcacaattccaaacatacaagaggctccctcttaacgcagcacttagacacgtgttgttccaccttccctcatgctgttccacctcccctcagactagctttcagtcttctgtcagcagtaaaacttatatattttttaaaataacttcaatgtagttttccatccttcaaataaacatgtctgcccccatg

SEQ ID NO: 146319 - DNA, 1169 bp, Homo sapiens
  Payload ID: 8977
  Gene Symbol: KIR2DL2
  Gene Name: killer cell immunoglobulin-like receptor, two domains, long cytoplasmic tail, 2
  ENST ID: ENST00000613022
  CDS Start-End: 3-917
ccatgtcgctcatggtcgtcagcatggcgtgtgttgggttcttcttgctgcagggggcctggccacatgagggagtccacagaaaaccttccctcctggcccacccaggtcgcctggtgaaatcagaagagacagtcatcctgcaatgttggtcagatgtcaggtttgagcacttccttctgcacagagaagggaagtttaaggacactttgcacctcattggagagcaccatgatggggtctccaaagccaacttctccatcggtcccatgatgcaagaccttgcagggacctacagatgctacggttctgttactcactccccctatcagttgtcagctcccagtgaccctctggacatcgtcatcacaggtctatatgagaaaccttctctctcagcccagccgggccccacggttctggcaggagagagcgtgaccttgtcctgcagctcccggagctcctatgacatgtaccatctatccagggagggggaggcccatgaatgtaggttctctgcagggcccaaggtcaacggaacattccaggccgactttcctctgggccctgccacccacggaggaacctacagatgcttcggctctttccgtgactctccatacgagtggtcaaactcgagtgacccactgcttgtttctgtcacaggaaacccttcaaatagttggccttcacccactgaaccaagctccaaaaccggtaaccccagacacctacatgttctgattgggacctcagtggtcaaaatccctttcaccatcctcctcttctttctccttcatcgctggtgctccgacaaaaaaaatgctgctgtaatggaccaagagcctgcagggaacagaacagtgaacagcgaggattctgatgaacaagaccatcaggaggtgtcatacgcataattggatcactgtgttttcacacagagaaaaatcactcgcccttctgagaggcccaagacacccccaacagataccagcatgtacatagaacttccaaatgctgagcccagatccaaagttgtcttctgtccacgagcaccacagtcaggccttgaggggatcttctagggagacaacagccctgtctcaaaaccgggttgccagctcccatgtaccagcagctggaatctgaaggcatcagtcttcatctta

SEQ ID NO: 146320 - DNA, 1371 bp, Homo sapiens
  Payload ID: 8977
  Gene Symbol: KIR2DL2
  Gene Name: killer cell immunoglobulin-like receptor, two domains, long cytoplasmic tail, 2
  Uniprot ID: P43627
  ENST ID: ENST00000618796
  CDS Start-End: 30-1076
cgcggccgcctgtctgcacagacagcaccatgtcgctcatggtcgtcagcatggcgtgtgttgggttcttcttgctgcagggggcctggccacatgagggagtccacagaaaaccttccctcctggcccacccaggtcgcctggtgaaatcagaagagacagtcatcctgcaatgttggtcagatgtcaggtttgagcacttccttctgcacagagaagggaagtttaaggacactttgcacctcattggagagcaccatgatggggtctccaaagccaacttctccatcggtcccatgatgcaagaccttgcagggacctacagatgctacggttctgttactcactccccctatcagttgtcagctcccagtgaccctctggacatcgtcatcacaggtctatatgagaaaccttctctctcagcccagccgggccccacggttctggcaggagagagcgtgaccttgtcctgcagctcccggagctcctatgacatgtaccatctatccagggagggggaggcccatgaatgtaggttctctgcagggcccaaggtcaacggaacattccaggccgactttcctctgggccctgccacccacggaggaacctacagatgcttcggctctttccgtgactctccatacgagtggtcaaactcgagtgacccactgcttgtttctgtcataggaaacccttcaaatagttggccttcacccactgaaccaagctctaaaaccggtaacccccgacacctgcacattctgattgggacctcagtggtcatcatcctcttcatcctcctcttctttctccttcatcgctggtgctccaacaaaaaaaatgctgcggtaatggaccaagagtctgcagggaacagaacagcgaatagcgaggactctgatgaacaagaccctcaggaggtgacatacacacagttgaatcactgcgttttcacacagagaaaaatcactcgcccttctcagaggcccaagacacccccaacagatatcatcgtgtacgcggaacttccaaatgctgagtccagatccaaagttgtctcctgcccatgagcaccacagtcaggccttgagggcgtcttctagggagacaacagccctgtctcaaaaccgggttgccagctcccatgtaccagcagctggaatctgaaggcatgagtctgcatcttagggcatcgctcttcctcacaccacaaatctgaatgtgcctctcacttgcttacaaatgtctaaggtccccactgcctgctggagaaaaaacacactcctttgcttagcccacagttctccatttcacttgacccctgcccacctctccaacctaactggcttacttcctagtctactt

SEQ ID NO: 146321 - DNA, 1593 bp, Homo sapiens
  Payload ID: 8977
  Gene Symbol: KIR2DL2
  Gene Name: killer cell immunoglobulin-like receptor, two domains, long cytoplasmic tail, 2
  Uniprot ID: P43627
  ENST ID: ENST00000616831
  CDS Start-End: 38-1084
agctggggcgcggccgcctgtctgcacagacagcaccatgtcgctcatggtcgtcagcatggcgtgtgttgggttcttcttgctgcagggggcctggccacatgagggagtccacagaaaaccttccctcctggcccacccaggtcgcctggtgaaatcagaagagacagtcatcctgcaatgttggtcagatgtcaggtttgagcacttccttctgcacagagaagggaagtttaaggacactttgcacctcattggagagcaccatgatggggtctccaaagccaacttctccatcggtcccatgatgcaagaccttgcagggacctacagatgctacggttctgttactcactccccctatcagttgtcagctcccagtgaccctctggacatcgtcatcacaggtctatatgagaaaccttctctctcagcccagccgggccccacggttctggcaggagagagcgtgaccttgtcctgcagctcccggagctcctatgacatgtaccatctatccagggagggggaggcccatgaatgtaggttctctgcagggcccaaggtcaacggaacattccaggccgactttcctctgggccctgccacccacggaggaacctacagatgcttcggctctttccgtgactctccatacgagtggtcaaactcgagtgacccactgcttgtttctgtcataggaaacccttcaaatagttggccttcacccactgaaccaagctctaaaaccggtaacccccgacacctgcacattctgattgggacctcagtggtcatcatcctcttcatcctcctcttctttctccttcatcgctggtgctccaacaaaaaaaatgctgcggtaatggaccaagagtctgcagggaacagaacagcgaatagcgaggactctgatgaacaagaccctcaggaggtgacatacacacagttgaatcactgcgttttcacacagagaaaaatcactcgcccttctcagaggcccaagacacccccaacagatatcatcgtgtacgcggaacttccaaatgctgagtccagatccaaagttgtctcctgcccatgagcaccacagtcaggccttgagggcgtcttctagggagacaacagctctgtctcaaaaccgggttgccagctcccatgtaccagcagctggaatctgaaggcatgagtctgcatcttagggcatcgctcttcctcacaccacaaatctgaatgtgcctctcacttgcttacaaatgtctaaggtccccactgcctgctggagaaaaaacacactcctttgcttagcccacagttctccatttcacttgacccctgcccacctctccaacctaactggcttacttcctagtctacttgaggctgcaatcacactgaggaactcacaattccaaacatacaagaggctccctcttaacgcagcacttagacacgtgttgttccaccttccctcatgctgttccacctcccctcagactagctttcagtcttctgtcagcagtaaaacttatatattttttaaaataacttcaatgtagttttccatccttcaaataaacatgtctgccccca

SEQ ID NO: 146322 - DNA, 1598 bp, Homo sapiens; identical to SEQ ID NO: 146311
  Payload ID: 8977
  Gene Symbol: KIR2DL2
  Gene Name: killer cell immunoglobulin-like receptor, two domains, long cytoplasmic tail, 2
  ENST ID: ENST00000616462
  CDS Start-End: 39-1085

SEQ ID NO: 146323 - DNA, 1645 bp, Homo sapiens
  Payload ID: 8977
  Gene Symbol: KIR2DL2
  Gene Name: killer cell immunoglobulin-like receptor, two domains, long cytoplasmic tail, 2
  Uniprot ID: P43627
  ENST ID: ENST00000611724
  CDS Start-End: 90-1136
tgtaaactgcatgggcagggcgccaaataacatcctgtgcgctgctgagctgagctggggcgcggccgcctgtctgcacagacagcaccatgtcgctcatggtcgtcagcatggcgtgtgttgggttcttcttgctgcagggggcctggccacatgagggagtccacagaaaaccttccctcctggcccacccaggtcgcctggtgaaatcagaagagacagtcatcctgcaatgttggtcagatgtcaggtttgagcacttccttctgcacagagaagggaagtttaaggacactttgcacctcattggagagcaccatgatggggtctccaaagccaacttctccatcggtcccatgatgcaagaccttgcagggacctacagatgctacggttctgttactcactccccctatcagttgtcagctcccagtgaccctctggacatcgtcatcacaggtctatatgagaaaccttctctctcagcccagccgggccccacggttctggcaggagagagcgtgaccttgtcctgcagctcccggagctcctatgacatgtaccatctatccagggagggggaggcccatgaatgtaggttctctgcagggcccaaggtcaacggaacattccaggccgactttcctctgggccctgccacccacggaggaacctacagatgcttcggctctttccgtgactctccatacgagtggtcaaactcgagtgacccactgcttgtttctgtcataggaaacccttcaaatagttggccttcacccactgaaccaagctctaaaaccggtaacccccgacacctgcacattctgattgggacctcagtggtcatcatcctcttcatcctcctcttctttctccttcatcgctggtgctccaacaaaaaaaatgctgcggtaatggaccaagagtctgcagggaacagaacagcgaatagcgaggactctgatgaacaagaccctcaggaggtgacatacacacagttgaatcactgcgttttcacacagagaaaaatcactcgcccttctcagaggcccaagacacccccaacagatatcatcgtgtacgcggaacttccaaatgctgagtccagatccaaagttgtctcctgcccatgagcaccacagtcaggccttgagggcgtcttctagggagacaacagccctgtctcaaaaccgggttgccagctcccatgtaccagcagctggaatctgaaggcatgagtctgcatcttagggcatcgctcttcctcacaccacaaatctgaatgtgcctctcacttgcttacaaatgtctaaggtccccactgcctgctggagaaaaaacacactcctttgcttagcccacagttctccatttcacttgacccctgcccacctctccaacctaactggcttacttcctagtctacttgaggctgcaatcacactgaggaactcacaattccaaacatacaagaggctccctcttaacgcagcacttagacacgtgttgttccaccttccctcatgctgttccacctcccctcagactagctttcagtcttctgtcagcagtaaaacttatatattttttaaaataacttcaatgtagttttccatccttcaaataaacatgtctgccccca

SEQ ID NO: 146324 - DNA, 1419 bp, Homo sapiens
  Payload ID: 8977
  Gene Symbol: KIR2DL2
  Gene Name: killer cell immunoglobulin-like receptor, two domains, long cytoplasmic tail, 2
  ENST ID: ENST00000612594
  CDS Start-End: 90-1136
tgtaaactgcatgggcagggcgccaaataacatcctgtgcgctgctgagctgagctggggcgcggccgcctgtctgcacagacagcaccatgtcgctcatggtcgtcagcatggcgtgtgttgggttcttcttgctgcagggggcctggccacatgagggagtccacagaaaaccttccctcctggcccacccaggtcgcctggtgaaatcagaagagacagtcatcctgcaatgttggtcagatgtcaggtttgagcacttccttctgcacagagaagggaagtttaaggacactttgcacctcattggagagcaccatgatggggtctccaaagccaacttctccatcggtcccatgatgcaagaccttgcagggacctacagatgctacggttctgttactcactccccctatcagttgtcagctcccagtgaccctctggacatcgtcatcacaggtctatatgagaaaccttctctctcagcccagccgggccccacggttctggcaggagagagcgtgaccttgtcctgcagctcccggagctcctatgacatgtaccatctatccagggagggggaggcccatgaatgtaggttctctgcagggcccaaggtcaacggaacattccaggccgactttcctctgggccctgccacccacggaggaacctacagatgcttcggctctttccgtgactctccatacgagtggtcaaactcgagtgacccactgcttgtttctgtcacaggaaacccttcaaatagttggccttcacccactgaaccaagctctaaaaccggtaacccccgacacctgcacattctgattgggacctcagtggtcatcatcctcttcatcctcctcttctttctccttcatcgctggtgctccaacaaaaaaaatgctgcggtaatggaccaagagtctgcagggaacagaacagcgaatagcgaggactctgatgaacaagaccctcaggaggtgacatacacacagttgaatcactgcgttttcacacagagaaaaatcactcgcccttctcagaggcccaagacacccccaacagatatcatcgtgtacacggaacttccaaatgctgagtccagatccaaagttgtctcctgcccatgagcaccacagtcaggccttgagggcgtcttctagggagacaacagccctgtctcaaaaccgggttgccagctcccatgtaccagcagctggaatctgaaggcatgagtctgcatcttagggcatcgctcttcctcacaccacaaatctgaatgtgcctctcacttgcttacaaatgtctaaggtccccactgcctgctggagaaaaaacacactcctttgcttagcccacagttctccatttcacttgacccctgcccacctctccaacctaactggcttactt

SEQ ID NO: 146325 - DNA, 1371 bp, Homo sapiens; identical to SEQ ID NO: 146320
  Payload ID: 8977
  Gene Symbol: KIR2DL2
  Gene Name: killer cell immunoglobulin-like receptor, two domains, long cytoplasmic tail, 2
  Uniprot ID: P43627
  ENST ID: ENST00000619621
  CDS Start-End: 30-1076

SEQ ID NO: 146326 - DNA, 1587 bp, Homo sapiens
  Payload ID: 8977
  Gene Symbol: KIR2DL2
  Gene Name: killer cell immunoglobulin-like receptor, two domains, long cytoplasmic tail, 2
  ENST ID: ENST00000618870
  CDS Start-End: 32-1078
ggcgcggccgcctgtctgcacagacagcaccatgtcgctcatggtcgtcagcatggcgtgtgttgggttcttcttgctgcagggggcctggccacatgagggagtccacagaaaaccttccctcctggcccacccaggtcgcctggtgaaatcagaagagacagtcatcctgcaatgttggtcagatgtcaggtttgagcacttccttctgcacagagaagggaagtttaaggacactttgcacctcattggagagcaccatgatggggtctccaaagccaacttctccatcggtcccatgatgcaagaccttgcagggacctacagatgctacggttctgttactcactccccctatcagttgtcagctcccagtgaccctctggacatcgtcatcacaggtctatatgagaaaccttctctctcagcccagccgggccccacggttctggcaggagagagcgtgaccttgtcctgcagctcccggagctcctatgacatgtaccatctatccagggagggggaggcccatgaatgtaggttctctgcagggcccaaggtcaacggaacattccaggccgactttcctctgggccctgccacccacggaggaacctacagatgcttcggctctttccgtgactctccatacgagtggtcaaactcgagtgacccactgcttgtttctgtcacaggaaacccttcaaatagttggccttcacccactgaaccaagctctaaaaccggtaacccccgacacctgcacattctgattgggacctcagtggtcatcatcctcttcatcctcctcttctttctccttcatcgctggtgctccaacaaaaaaaatgctgcggtaatggaccaagagtctgcagggaacagaacagcgaatagcgaggactctgatgaacaagaccctcaggaggtgacatacacacagttgaatcactgcgttttcacacagagaaaaatcactcgcccttctcagaggcccaagacacccccaacagatatcatcgtgtacacggaacttccaaatgctgagtccagatccaaagttgtctcctgcccatgagcaccacagtcaggccttgagggcgtcttctagggagacaacagccctgtctcaaaaccgggttgccagctcccatgtaccagcagctggaatctgaaggcatgagtctgcatcttagggcatcgctcttcctcacaccacaaatctgaatgtgcctctcacttgcttacaaatgtctaaggtccccactgcctgctggagaaaaaacacactcctttgcttagcccacagttctccatttcacttgacccctgcccacctctccaacctaactggcttacttcctagtctacttgaggctgcaatcacactgaggaactcacaattccaaacatacaagaggctccctcttaacgcagcacttagacacgtgttgttccaccttccctcatgctgttccacctcccctcagactagctttcagtcttctgtcagcagtaaaacttatatattttttaaaataacttcaatgtagttttccatccttcaaataaacatgtctgccccca

SEQ ID NO: 146327 - DNA, 1572 bp, Homo sapiens; identical to SEQ ID NO: 146314
  Payload ID: 8977
  Gene Symbol: KIR2DL2
  Gene Name: killer cell immunoglobulin-like receptor, two domains, long cytoplasmic tail, 2
  Uniprot ID: P43627
  ENST ID: ENST00000613410
  CDS Start-End: 15-1061

SEQ ID NO: 146328 - DNA, 1260 bp, Homo sapiens
  Payload ID: 8977
  Gene Symbol: KIR2DL2
  Gene Name: killer cell immunoglobulin-like receptor, two domains, long cytoplasmic tail, 2
  ENST ID: ENST00000617258
  CDS Start-End: 1-747
atgtcgctcatggtcgtcagcatggcgtgtgttgggttcttcttgctgcagggggcctggccacatgagggtctatatgagaaaccttctctctcagcccagccgggccccacggttctggcaggagagagcgtgaccttgtcctgcagctcccggagctcctatgacatgtaccatctatccagggagggggaggcccatgaatgtaggttctctgcagggcccaaggtcaacggaacattccaggccgactttcctctgggccctgccacccacggaggaacctacagatgcttcggctctttccgtgactctccatacgagtggtcaaactcgagtgacccactgcttgtttctgtcacaggaaacccttcaaatagttggccttcacccactgaaccaagctctaaaaccggtaacccccgacacctgcacattctgattgggacctcagtggtcatcatcctcttcatcctcctcttctttctccttcatcgctggtgctccaacaaaaaaaatgctgcggtaatggaccaagagtctgcagggaacagaacagcgaatagcgaggactctgatgaacaagaccctcaggaggtgacatacacacagttgaatcactgcgttttcacacagagaaaaatcactcgcccttctcagaggcccaagacacccccaacagatatcatcgtgtacacggaacttccaaatgctgagtccagatccaaagttgtctcctgcccatgagcaccacagtcaggccttgagggcgtcttctagggagacaacagccctgtctcaaaaccgggttgccagctcccatgtaccagcagctggaatctgaaggcatgagtctgcatcttagggcatcgctcttcctcacaccacaaatctgaatgtgcctctcacttgcttacaaatgtctaaggtccccactgcctgctggagaaaaaacacactcctttgcttagcccacagttctccatttcacttgacccctgcccacctctccaacctaactggcttacttcctagtctacttgaggctgcaatcacactgaggaactcacaattccaaacatacaagaggctccctcttaacgcagcacttagacacgtgttgttccaccttccctcatgctgttccacctcccctcagactagctttcagtcttctgtcagcagtaaaacttatatattttttaaaataacttcaatgtagttttccatccttcaaataaacatgtctgcccccatggt

SEQ ID NO: 146329 - DNA, 1371 bp, Homo sapiens
  Payload ID: 8977
  Gene Symbol: KIR2DL2
  Gene Name: killer cell immunoglobulin-like receptor, two domains, long cytoplasmic tail, 2
  ENST ID: ENST00000614650
  CDS Start-End: 30-1076
cgcggccgcctgtctgcacagacagcaccatgtcgctcatggtcgtcagcatggcgtgtgttgggttcttcttgctgcagggggcctggccacatgagggagtccacagaaaaccttccctcctggcccacccaggtcgcctggtgaaatcagaagagacagtcatcctgcaatgttggtcagatgtcaggtttgagcacttccttctgcacagagaagggaagtttaaggacactttgcacctcattggagagcaccatgatggggtctccaaagccaacttctccatcggtcccatgatgcaagaccttgcagggacctacagatgctacggttctgttactcactccccctatcagttgtcagctcccagtgaccctctggacatcgtcatcacaggtctatatgagaaaccttctctctcagcccagccgggccccacggttctggcaggagagagcgtgaccttgtcctgcagctcccggagctcctatgacatgtaccatctatccagggagggggaggcccatgaatgtaggttctctgcagggcccaaggtcaacggaacattccaggccgactttcctctgggccctgccacccacggaggaacctacagatgcttcggctctttccgtgactctccatacgagtggtcaaactcgagtgacccactgcttgtttctgtcacaggaaacccttcaaatagttggccttcacccactgaaccaagctctaaaaccggtaacccccgacacctgcacattctgattgggacctcagtggtcatcatcctcttcatcctcctcttctttctccttcatcgctggtgctccaacaaaaaaaatgctgcggtaatggaccaagagtctgcagggaacagaacagcgaatagcgaggactctgatgaacaagaccctcaggaggtgacatacacacagttgaatcactgcgttttcacacagagaaaaatcactcgcccttctcagaggcccaagacacccccaacagatatcatcgtgtacacggaacttccaaatgctgagtccagatccaaagttgtctcctgcccatgagcaccacagtcaggccttgagggcgtcttctagggagacaacagccctgtctcaaaaccgggttgccagctcccatgtaccagcagctggaatctgaaggcatgagtctgcatcttagggcatcgctcttcctcacaccacaaatctgaatgtgcctctcacttgcttacaaatgtctaaggtccccactgcctgctggagaaaaaacacactcctttgcttagcccacagttctccatttcacttgacccctgcccacctctccaacctaactggcttacttcctagtctactt

SEQ ID NO: 146330 - DNA, 1598 bp, Homo sapiens; identical to SEQ ID NO: 146311
  Payload ID: 8977
  Gene Symbol: KIR2DL2
  Gene Name: killer cell immunoglobulin-like receptor, two domains, long cytoplasmic tail, 2
  ENST ID: ENST00000617820
  CDS Start-End: 39-1085

SEQ ID NO: 146331 - DNA, 1419 bp, Homo sapiens; identical to SEQ ID NO: 146324
  Payload ID: 8977
  Gene Symbol: KIR2DL2
  Gene Name: killer cell immunoglobulin-like receptor, two domains, long cytoplasmic tail, 2
  ENST ID: ENST00000611206
  CDS Start-End: 90-1136

SEQ ID NO: 146332 - DNA, 1572 bp, Homo sapiens; identical to SEQ ID NO: 146318
  Payload ID: 8977
  Gene Symbol: KIR2DL2
  Gene Name: killer cell immunoglobulin-like receptor, two domains, long cytoplasmic tail, 2
  ENST ID: ENST00000622658
  CDS Start-End: 15-1061

SEQ ID NO: 146333 - DNA, 1598 bp, Homo sapiens; identical to SEQ ID NO: 146316
  Payload ID: 8977
  Gene Symbol: KIR2DL2
  Gene Name: killer cell immunoglobulin-like receptor, two domains, long cytoplasmic tail, 2
  ENST ID: ENST00000612992
  CDS Start-End: 39-1085

SEQ ID NO: 146334 - DNA, 1587 bp, Homo sapiens; identical to SEQ ID NO: 146326
  Payload ID: 8977
  Gene Symbol: KIR2DL2
  Gene Name: killer cell immunoglobulin-like receptor, two domains, long cytoplasmic tail, 2
  ENST ID: ENST00000622560
  CDS Start-End: 32-1078

SEQ ID NO: 146335 - DNA, 1590 bp, Homo sapiens
  Payload ID: 8978
  Gene Symbol: KIR2DL3
  Gene Name: killer cell immunoglobulin-like receptor, two domains, long cytoplasmic tail, 3
  Uniprot ID: P43628
  ENST ID: ENST00000342376
  CDS Start-End: 32-1057
ggcgcggccgcctgtctgcacagacagcaccatgtcgctcatggtcgtcagcatggtgtgtgttgggttcttcttgctgcagggggcctggccacatgagggagtccacagaaaaccttccctcctggcccacccaggtcccctggtgaaatcagaagagacagtcatcctgcaatgttggtcagatgtcaggtttcagcacttccttctgcacagagaagggaagtttaaggacactttgcacctcattggagagcaccatgatggggtctccaaggccaacttctccatcggtcccatgatgcaagaccttgcagggacctacagatgctacggttctgttactcactccccctatcagttgtcagctcccagtgaccctctggacatcgtcatcacaggtctatatgagaaaccttctctctcagcccagccgggccccacggttctggcaggagagagcgtgaccttgtcctgcagctcccggagctcctatgacatgtaccatctatccagggagggggaggcccatgaacgtaggttctctgcagggcccaaggtcaacggaacattccaggccgactttcctctgggccctgccacccacggaggaacctacagatgcttcggctctttccgtgactctccatacgagtggtcaaactcgagtgacccactgcttgtttctgtcacaggaaacccttcaaatagttggccttcacccactgaaccaagctccgaaaccggtaaccccagacacctgcatgttctgattgggacctcagtggtcatcatcctcttcatcctcctcctcttctttctccttcatcgctggtgctgcaacaaaaaaaatgctgttgtaatggaccaagagcctgcagggaacagaacagtgaacagggaggactctgatgaacaagaccctcaggaggtgacatatgcacagttgaatcactgcgttttcacacagagaaaaatcactcgcccttctcagaggcccaagacacccccaacagatatcatcgtgtacacggaacttccaaatgctgagccctgatccaaagttgtctcctgcccatgagcaccacagtcaggccttgaggggatcttctagggagacaacagccctgtctcaaaactgggttgccagctccaatgtaccagcagctggaatctgaaggcgtgagtctgcatcttagggcatcgctcttcctcacaccacaaatctgaacgtgcctctcccttgcttacaaatgtctaaggtccccactgcctgctggagagaaaacacactcctttgcttagcccacaattctccatttcacttgacccctgcccacctctccaacctaactggcttacttcctagtctacttgaggctgcaatcacactgaggaactcacaattccaaacatacaagaggctccctcttaacacggcacttagacacgtgctgttccaccttccctcatgctgttccacctcccctcagactagctttcagccttctgtcagcagtaaaacttatatattttttaaaataatttcaatgtagttttccctccttcaaataaacatgtctgccctca

SEQ ID NO: 146336 - DNA, 1601 bp, Homo sapiens
  Payload ID: 8978
  Gene Symbol: KIR2DL3
  Gene Name: killer cell immunoglobulin-like receptor, two domains, long cytoplasmic tail, 3
  ENST ID: ENST00000613321
  CDS Start-End: 39-1088
gagctggggcgcagccgcctgtctgcaccggcagcaccatgtcgctcatggtcgtcagcatggcgtgtgttgggttcttcttgctgcagggggcctggccacatgagggagtccacagaaaaccttccctcctggcccacccaggtcccctggtgaaatcagaagagacagtcatcctgcaatgttggtcagatgtcaggtttcagcacttccttctgcacagagaagggaagtttaaggacactttgcacctcattggagagcaccatgatggggtctccaaggccaacttctccatcggtcccatgatgcaagaccttgcagggacctacagatgctacggttctgttactcactccccctatcagttgtcagctcccagtgaccctctggacatcgtcatcacaggtctatatgagaaaccttctctctcagcccagccgggccccacggttctggcaggagagagcgtgaccttgtcctgcagctcccggagctcctatgacatgtaccatctatccagggagggggaggcccatgaacgtaggttctctgcagggcccaaggtcaacggaacattccaggccgactttcctctgggccctgccacccacggaggaacctacagatgcttcggctctttccgtgactctccatacgagtggtcaaactcgagtgacccactgcttgtttctgtcacaggaaacccttcaaatagttggccttcacccactgaaccaagctccaaaaccggtaacccaagacacctgcacgttctgattgggacctcagtggtcatcatcctcttcatcctcctcctcttctttctccttcatcgctggtgctccaacaagaaaaatgctgctgtaatggaccaagagcctgcagggaacagaacagcgaatagcgaggactctgatgaacaagaccctcaggaggtgacatacgtacagttggatcactgcgttttcacacagagaaaaatcactcgcccttctcagaggcccaagacacccccaacagataccagagtgtacacggaacttccaaatgctgagtccagatccaaagttgtctcctgcccatgagcaccacagtcaggccttgaggggatcttctagggagacaacagccctgtctcaaaaccgggttgccagctcccatgtaccagcagctggaatctgaaggcgtgagtctgcatcttagggcatcgctcttcctcacaccacaaatctgaatgtgcctctctcttgcttacaaatgtctaaggtccccactgcctgctggagagaaaacacactcctttgcttagcccacaattctccatttcacttgacccctgcccacctctccaaccttactggcttacttcctagtctacttgaggctgcaatcacactgaggaactcacagttccaaacatacaagaggctccctcttaacacggcacttagacacgtcctgttccaccttccctcatgctgttccacctcccctcagagtatctttcagccttctgtcagcagtaaaacttatatattttttaaaataatttcaatgtagttttccctccttcaaataaacatgtctgccctcatggt

SEQ ID NO: 146337 - DNA, 1377 bp, Homo sapiens
  Payload ID: 8978
  Gene Symbol: KIR2DL3
  Gene Name: killer cell immunoglobulin-like receptor, two domains, long cytoplasmic tail, 3
  ENST ID: ENST00000621438
  CDS Start-End: 39-1088
gagctggggcgcagccgcctgtctgcaccggcagcaccatgtcgctcatggtcgtcagcatggcgtgtgttgggttcttcttgctgcagggggcctggccacatgagggagtccacagaaaaccttccctcctggcccacccaggtcccctggtgaaatcagaagagacagtcatcctgcaatgttggtcagatgtcaggtttcagcacttccttctgcacagagaagggaagtttaaggacactttgcacctcattggagagcaccatgatggggtctccaaggccaacttctccatcggtcccatgatgcaagaccttgcagggacctacagatgctacggttctgttactcactccccctatcagttgtcagctcccagtgaccctctggacatcgtcatcacaggtctatatgagaaaccttctctctcagcccagccgggccccacggttctggcaggagagagcgtgaccttgtcctgcagctcccggagctcctatgacatgtaccatctatccagggagggggaggcccatgaacgtaggttctctgcagggcccaaggtcaacggaacattccaggccgactttcctctgggccctgccacccacggaggaacctacagatgcttcggctctttccgtgactctccatacgagtggtcaaactcgagtgacccactgcttgtttctgtcacaggaaacccttcaaatagttggccttcacccactgaaccaagctccgaaaccggtaacccaagacacctgcacgttctgattgggacctcagtggtcatcatcctcttcatcctcctcctcttctttctccttcatcgctggtgctccaacaagaaaaatgctgctgtaatggaccaagagcctgcagggaacagaacagcgaatagcgaggactctgatgaacaagaccctcaggaggtgacatacgtacagttggatcactgcgttttcacacagagaaaaatcactcgcccttctcagaggcccaagacacccccaacagataccagagtgtacacggaacttccaaatgctgagtccagatccaaagttgtctcctgcccatgagcaccacagtcaggccttgaggggatcttctagggagacaacagccctgtctcaaaaccgggttgccagctcccatgtaccagcagctggaatctgaaggcgtgagtctgcatcttagggcatcgctcttcctcacaccacaaatctgaatgtgcctctctcttgcttacaaatgtctaaggtccccactgcctgctggagagaaaacacactcctttgcttagcccacaattctccatttcacttgacccctgcccacctctccaaccttactggcttacttcctagt

SEQ ID NO: 146338 - DNA, 1590 bp, Homo sapiens
  Payload ID: 8978
  Gene Symbol: KIR2DL3
  Gene Name: killer cell immunoglobulin-like receptor, two domains, long cytoplasmic tail, 3
  Uniprot ID: P43628
  ENST ID: ENST00000615739
  CDS Start-End: 32-1057
ggcgcggccgcctgtctgcacagacagcaccatgtcgctcatggtcgtcagcatggtgtgtgttgggttcttcttgctgcagggggcctggccacatgagggagtccacagaaaaccttccctcctggcccacccaggtcccctggtgaaatcagaagagacagtcatcctgcaatgttggtcagatgtcaggtttcagcacttccttctgcacagagaagggaagtttaaggacactttgcacctcattggagagcaccatgatggggtctccaaggccaacttctccatcggtcccatgatgcaagaccttgcagggacctacagatgctacggttctgttactcactccccctatcagttgtcagctcccagtgaccctctggacatcgtcatcacaggtctatatgagaaaccttctctctcagcccagccgggccccacggttctggcaggagagagcgtgaccttgtcctgcagctcccggagctcctatgacatgtaccatctatccagggagggggaggcccatgaacgtaggttctctgcagggcccaaggtcaacggaacattccaggccgactttcctctgggccctgccacccacggaggaacctacagatgcttcggctctttccgtgactctccatacgagtggtcaaactcgagtgacccactgcttgtttctgtcacaggaaacccttcaaatagttggctttcacccactgaaccaagctccgaaaccggtaaccccagacacctgcatgttctgattgggacctcagtggtcatcatcctcttcatcctcctcctcttctttctccttcatcgctggtgctgcaacaaaaaaaatgctgttgtaatggaccaagagcctgcagggaacagaacagtgaacagggaggactctgatgaacaagaccctcaggaggtgacatatgcacagttgaatcactgcgttttcacacagagaaaaatcactcacccttctcagaggcccaagacacccccaacagatatcatcgtgtacacggaacttccaaatgctgagccctgatccaaagttgtctcctgcccatgagcaccacagtcaggccttgaggggatcttctagggagacaacagccctgtctcaaaactgggttgccagctccaatgtaccagcagctggaatctgaaggcgtgagtctgcatcttagggcatcgctcttcctcacaccacaaatctgaacgtgcctctctcttgcttacaaatgtctaaggtccccactgcctgctggagagaaaacacactcctttgcttagcccacaattctccatttcacttgacccctgcccacctctccaacctaactggcttacttcctagtctatttgaggctgcaatcacactgaggaactcacaattccaaacatacaagaggctccctcttaacacggcacttagacacgtgctgttccaccttccctcatgctgttccacctcccctcagactagctttcagccttctgtcagcagtaaaacttatatattttttaaaataatttcaatgtagttttccctccttcaaataaacatgtctgccctca

SEQ ID NO: 146339 - DNA, 1601 bp, Homo sapiens
  Payload ID: 8978
  Gene Symbol: KIR2DL3
  Gene Name: killer cell immunoglobulin-like receptor, two domains, long cytoplasmic tail, 3
  ENST ID: ENST00000613343
  CDS Start-End: 39-1088
gagctggggcgcagccgcctgtctgcaccggcagcaccatgtcgctcatggtcgtcagcatggcgtgtgttgggttcttcttgctgcagggggcctggccacatgagggagtccacagaaaaccttccctcctggcccacccaggtcccctggtgaaatcagaagagacagtcatcctgcaatgttggtcagatgtcaggtttcagcacttccttctgcacagagaagggaagtttaaggacactttgcacctcattggagagcaccatgatggggtctccaaggccaacttctccatcggtcccatgatgcaagaccttgcagggacctacagatgctacggttctgttactcactccccctatcagttgtcagctcccagtgaccctctggacatcgtcatcacaggtctatatgagaaaccttctctctcagcccagccgggccccacggttctggcaggagagagcgtgaccttgtcctgcagctcccggagctcctatgacatgtaccatctatccagggagggggaggcccatgaacgtaggttctctgcagggcccaaggtcaacggaacattccaggccgactttcctctgggccctgccacccacggaggaacctacagatgcttcggctctttccgtgactctccatacgagtggtcaaactcgagtgacccactgcttgtttctgtcacaggaaacccttcaaatagttggccttcacccactgaaccaagctccaaaaccggtaacccaagacacctgcacgttctgattgggacctcagtggtcatcatcctcttcatcctcctcctcttctttctccttcatcgctggtgctccaacaagaaaaatgctgctgtaatggaccaagagcctgcagggaacagaacagcgaatagcgaggactctgatgaacaagaccctcaggaggtgacatacgtacagttggatcactgcgttttcacacagagaaaaatcactcgcccttctcagaggcccaagacacccccaacagataccagagtgtacacggaacttccaaatgctgagtccagatccaaagttgtctcctgcccatgagcaccacagtcaggccttgaggggatcttctagggagacaacagccctgtctcaaaaccgggttgccagctcccatgtaccagcagctggaatctgaaggcgtgagtctgcatcttagggcatcgctcttcctcacaccacaaatctgaatgtgcctctctcttgcttacaaatgtctaaggtccccactgcctgctggagaaaaaacacactcctttgcttagcccacaattctccatttcacttgacccctgcccacctctccaaccttactggcttacttcctagtctacttgaggctgcaatcacactgaggaactcacagttccaaacatacaagaggctccctcttaacacggcacttagacacgtcctgttccaccttccctcatgctgttccacctcccctcagagtatctttcagccttctgtcagcagtaaaacttatatattttttaaaataatttcaatgtagttttccctccttcaaataaacatgtctgccctcatggt

SEQ ID NO: 146340 - DNA, 1585 bp, Homo sapiens
  Payload ID: 8978
  Gene Symbol: KIR2DL3
  Gene Name: killer cell immunoglobulin-like receptor, two domains, long cytoplasmic tail, 3
  Uniprot ID: P43628
  ENST ID: ENST00000611207
  CDS Start-End: 23-1048
gcctgtctgcacagacagcaccatgtcgctcatggtcgtcagcatggtgtgtgttgggttcttcttgctgcagggggcctggccacatgagggagtccacagaaaaccttccctcctggcccacccaggtcccctggtgaaatcagaagagacagtcatcctgcaatgttggtcagatgtcaggtttcagcacttccttctgcacagagaagggaagtttaaggacactttgcacctcattggagagcaccatgatggggtctccaaggccaacttctccatcggtcccatgatgcaagaccttgcagggacctacagatgctacggttctgttactcactccccctatcagttgtcagctcccagtgaccctctggacatcgtcatcacaggtctatatgagaaaccttctctctcagcccagccgggccccacggttctggcaggagagagcgtgaccttgtcctgcagctcccggagctcctatgacatgtaccatctatccagggagggggaggcccatgaacgtaggttctctgcagggcccaaggtcaacggaacattccaggccgactttcctctgggccctgccacccacggaggaacctacagatgcttcggctctttccgtgactctccatacgagtggtcaaactcgagtgacccactgcttgtttctgtcacaggaaacccttcaaatagttggccttcacccactgaaccaagctccgaaaccggtaaccccagacacctgcatgttctgattgggacctcagtggtcatcatcctcttcatcctcctcctcttctttctccttcatcgctggtgctgcaacaaaaaaaatgctgttgtaatggaccaagagcctgcagggaacagaacagtgaacagggaggactctgatgaacaagaccctcaggaggtgacatatgcacagttgaatcactgcgttttcacacagagaaaaatcactcgcccttctcagaggcccaagacacccccaacagatatcatcgtgtacacggaacttccaaatgctgagccctgatccaaagttgtctcctgcccatgagcaccacagtcaggccttgaggggatcttctagggagacaacagccctgtctcaaaactgggttgccagctccaatgtaccagcagctggaatctgaaggcgtgagtctgcatcttagggcatcgctcttcctcacaccacaaatctgaacgtgcctctcccttgcttacaaatgtctaaggtccccactgcctgctggagagaaaacacactcctttgcttagcccacaattctccatttcacttgacccctgcccacctctccaacctaactggcttacttcctagtctacttgaggctgcaatcacactgaggaactcacaattccaaacatacaagaggctccctcttaacacggcacttagacacgtgctgttccaccttccctcatgctgttccacctcccctcagactagctttcagccttctgtcagcagtaaaacttatatattttttaaaataatttcaatgtagttttccctccttcaaataaacatgtctgccctcatggt

SEQ ID NO: 146341 - DNA, 1596 bp, Homo sapiens
  Payload ID: 8978
  Gene Symbol: KIR2DL3
  Gene Name: killer cell immunoglobulin-like receptor, two domains, long cytoplasmic tail, 3
  Uniprot ID: P43628
  ENST ID: ENST00000610407
  CDS Start-End: 38-1063
agctggggcgcggccgcctgtctgcacagacagcaccatgtcgctcatggtcgtcagcatggtgtgtgttgggttcttcttgctgcagggggcctggccacatgagggagtccacagaaaaccttccctcctggcccacccaggtcccctggtgaaatcagaagagacagtcatcctgcaatgttggtcagatgtcaggtttcagcacttccttctgcacagagaagggaagtttaaggacactttgcacctcattggagagcaccatgatggggtctccaaggccaacttctccatcggtcccatgatgcaagaccttgcagggacctacagatgctacggttctgttactcactccccctatcagttgtcagctcccagtgaccctctggacatcgtcatcacaggtctatatgagaaaccttctctctcagcccagccgggccccacggttctggcaggagagagcgtgaccttgtcctgcagctcccggagctcctatgacatgtaccatctatccagggagggggaggcccatgaacgtaggttctctgcagggcccaaggtcaacggaacattccaggccgactttcctctgggccctgccacccacggaggaacctacagatgcttcggctctttccgtgactctccatacgagtggtcaaactcgagtgacccactgcttgtttctgtcacaggaaacccttcaaatagttggctttcacccactgaaccaagctccgaaaccggtaaccccagacacctgcatgttctgattgggacctcagtggtcatcatcctcttcatcctcctcctcttctttctccttcatcgctggtgctgcaacaaaaaaaatgctgttgtaatggaccaagagcctgcagggaacagaacagtgaacagggaggactctgatgaacaagaccctcaggaggtgacatatgcacagttgaatcactgcgttttcacacagagaaaaatcactcacccttctcagaggcccaagacacccccaacagatatcatcgtgtacacggaacttccaaatgctgagccctgatccaaagttgtctcctgcccatgagcaccacagtcaggccttgaggggatcttctagggagacaacagccctgtctcaaaactgggttgccagctccaatgtaccagcagctggaatctgaaggcgtgagtctgcatcttagggcatcgctcttcctcacaccacaaatctgaacgtgcctctctcttgcttacaaatgtctaaggtccccactgcctgctggagagaaaacacactcctttgcttagcccacaattctccatttcacttgacccctgcccacctctccaacctaactggcttacttcctagtctatttgaggctgcaatcacactgaggaactcacaattccaaacatacaagaggctccctcttaacacggcacttagacacgtgctgttccaccttccctcatgctgttccacctcccctcagactagctttcagccttctgtcagcagtaaaacttatatattttttaaaataatttcaatgtagttttccctccttcaaataaacatgtctgccctca

SEQ ID NO: 146342 - DNA, 1377 bp, Homo sapiens
  Payload ID: 8978
  Gene Symbol: KIR2DL3
  Gene Name: killer cell immunoglobulin-like receptor, two domains, long cytoplasmic tail, 3
  ENST ID: ENST00000621458
  CDS Start-End: 39-1088
gagctggggcgcagccgcctgtctgcaccggcagcaccatgtcgctcatggtcgtcagcatggcgtgtgttgggttcttcttgctgcagggggcctggccacatgagggagtccacagaaaaccttccctcctggcccacccaggtcccctggtgaaatcagaagagacagtcatcctgcaatgttggtcagatgtcaggtttcagcacttccttctgcacagagaagggaagtttaaggacactttgcacctcattggagagcaccatgatggggtctccaaggccaacttctccatcggtcccatgatgcaagaccttgcagggacctacagatgctacggttctgttactcactccccctatcagttgtcagctcccagtgaccctctggacatcgtcatcacaggtctatatgagaaaccttctctctcagcccagccgggccccacggttctggcaggagagagcgtgaccttgtcctgcagctcccggagctcctatgacatgtaccatctatccagggagggggaggcccatgaacgtaggttctctgcagggcccaaggtcaacggaacattccaggccgactttcctctgggccctgccacccacggaggaacctacagatgcttcggctctttccgtgactctccatacgagtggtcaaactcgagtgacccactgcttgtttctgtcacaggaaacccttcaaatagttggctttcacccactgaaccaagctccgaaaccggtaacccaagacacctgcacgttctgattgggacctcagtggtcatcatcctcttcatcctcctcctcttctttctccttcatcgctggtgctccaacaagaaaaatgctgctgtaatggaccaagagcctgcagggaacagaacagcgaatagcgaggactctgatgaacaagaccctcaggaggtgacatacgtacagttggatcactgcgttttcacacagagaaaaatcactcgcccttctcagaggcccaagacacccccaacagataccagagtgtacacggaacttccaaatgctgagtccagatccaaagttgtctcctgcccatgagcaccacagtcaggccttgaggggatcttctagggagacaacagccctgtctcaaaaccgggttgccagctcccatgtaccagcagctggaatctgaaggcgtgagtctgcatcttagggcatcgctcttcctcacaccacaaatctgaatgtgcctctctcttgcttacaaatgtctaaggtccccactgcctgctggagagaaaacacactcctttgcttagcccacaattctccatttcacttgacccctgcccacctctccaaccttactggcttacttcctagt

SEQ ID NO: 146343 - DNA, 1590 bp, Homo sapiens; identical to SEQ ID NO: 146335
  Payload ID: 8978
  Gene Symbol: KIR2DL3
  Gene Name: killer cell immunoglobulin-like receptor, two domains, long cytoplasmic tail, 3
  Uniprot ID: P43628
  ENST ID: ENST00000611990
  CDS Start-End: 32-1057

SEQ ID NO: 146344 - DNA, 1601 bp, Homo sapiens; identical to SEQ ID NO: 146339
  Payload ID: 8978
  Gene Symbol: KIR2DL3
  Gene Name: killer cell immunoglobulin-like receptor, two domains, long cytoplasmic tail, 3
  ENST ID: ENST00000610484
  CDS Start-End: 39-1088

SEQ ID NO: 146345 - DNA, 1601 bp, Homo sapiens; identical to SEQ ID NO: 146336
  Payload ID: 8978
  Gene Symbol: KIR2DL3
  Gene Name: killer cell immunoglobulin-like receptor, two domains, long cytoplasmic tail, 3
  ENST ID: ENST00000617657
  CDS Start-End: 39-1088

SEQ ID NO: 146346 - DNA, 1311 bp, Homo sapiens
  Payload ID: 8978
  Gene Symbol: KIR2DL3
  Gene Name: killer cell immunoglobulin-like receptor, two domains, long cytoplasmic tail, 3
  Uniprot ID: P43628
  ENST ID: ENST00000619995
  CDS Start-End: 41-1066
ctgagctggggcgcggccgcctgtctgcacagacagcaccatgtcgctcatggtcgtcagcatggtgtgtgttgggttcttcttgctgcagggggcctggccacatgagggagtccacagaaaaccttccctcctggcccacccaggtcccctggtgaaatcagaagagacagtcatcctgcaatgttggtcagatgtcaggtttcagcacttccttctgcacagagaagggaagtttaaggacactttgcacctcattggagagcaccatgatggggtctccaaggccaacttctccatcggtcccatgatgcaagaccttgcagggacctacagatgctacggttctgttactcactccccctatcagttgtcagctcccagtgaccctctggacatcgtcatcacaggtctatatgagaaaccttctctctcagcccagccgggccccacggttctggcaggagagagcgtgaccttgtcctgcagctcccggagctcctatgacatgtaccatctatccagggagggggaggcccatgaacgtaggttctctgcagggcccaaggtcaacggaacattccaggccgactttcctctgggccctgccacccacggaggaacctacagatgcttcggctctttccgtgactctccatacgagtggtcaaactcgagtgacccactgcttgtttctgtcacaggaaacccttcaaatagttggccttcacccactgaaccaagctccgaaaccggtaaccccagacacctgcatgttctgattgggacctcagtggtcatcatcctcttcatcctcctcctcttctttctccttcatcgctggtgctgcaacaaaaaaaatgctgttgtaatggaccaagagcctgcagggaacagaacagtgaacagggaggactctgatgaacaagaccctcaggaggtgacatatgcacagttgaatcactgcgttttcacacagagaaaaatcactcgcccttctcagaggcccaagacacccccaacagatatcatcgtgtacacggaacttccaaatgctgagccctgatccaaagttgtctcctgcccatgagcaccacagtcaggccttgaggggatcttctagggagacaacagccctgtctcaaaactgggttgccagctccaatgtaccagcagctggaatctgaaggcgtgagtctgcatcttagggcatcgctcttcctcacaccacaaatctgaacgtgcctctcccttgcttacaaatgtctaaggtccccactgcctgctggagagaaaacacactcctttgct

SEQ ID NO: 146347 - DNA, 1601 bp, Homo sapiens; identical to SEQ ID NO: 146336
  Payload ID: 8978
  Gene Symbol: KIR2DL3
  Gene Name: killer cell immunoglobulin-like receptor, two domains, long cytoplasmic tail, 3
  ENST ID: ENST00000622627
  CDS Start-End: 39-1088

SEQ ID NO: 146348 - DNA, 1596 bp, Homo sapiens
  Payload ID: 8978
  Gene Symbol: KIR2DL3
  Gene Name: killer cell immunoglobulin-like receptor, two domains, long cytoplasmic tail, 3
  Uniprot ID: P43628
  ENST ID: ENST00000619702
  CDS Start-End: 38-1063
agctggggcgcggccgcctgtctgcacagacagcaccatgtcgctcatggtcgtcagcatggtgtgtgttgggttcttcttgctgcagggggcctggccacatgagggagtccacagaaaaccttccctcctggcccacccaggtcccctggtgaaatcagaagagacagtcatcctgcaatgttggtcagatgtcaggtttcagcacttccttctgcacagagaagggaagtttaaggacactttgcacctcattggagagcaccatgatggggtctccaaggccaacttctccatcggtcccatgatgcaagaccttgcagggacctacagatgctacggttctgttactcactccccctatcagttgtcagctcccagtgaccctctggacatcgtcatcacaggtctatatgagaaaccttctctctcagcccagccgggccccacggttctggcaggagagagcgtgaccttgtcctgcagctcccggagctcctatgacatgtaccatctatccagggagggggaggcccatgaacgtaggttctctgcagggcccaaggtcaacggaacattccaggccgactttcctctgggccctgccacccacggaggaacctacagatgcttcggctctttccgtgactctccatacgagtggtcaaactcgagtgacccactgcttgtttctgtcacaggaaacccttcaaatagttggccttcacccactgaaccaagctccgaaaccggtaaccccagacacctgcatgttctgattgggacctcagtggtcatcatcctcttcatcctcctcctcttctttctccttcatcgctggtgctgcaacaaaaaaaatgctgttgtaatggaccaagagcctgcagggaacagaacagtgaacagggaggactctgatgaacaagaccctcaggaggtgacatatgcacagttgaatcactgcgttttcacacagagaaaaatcactcgcccttctcagaggcccaagacacccccaacagatatcatcgtgtacacggaacttccaaatgctgagccctgatccaaagttgtctcctgcccatgagcaccacagtcaggccttgaggggatcttctagggagacaacagccctgtctcaaaactgggttgccagctccaatgtaccagcagctggaatctgaaggcgtgagtctgcatcttagggcatcgctcttcctcacaccacaaatctgaacgtgcctctcccttgcttacaaatgtctaaggtccccactgcctgctggagagaaaacacactcctttgcttagcccacaattctccatttcacttgacccctgcccacctctccaacctaactggcttacttcctagtctacttgaggctgcaatcacactgaggaactcacaattccaaacatacaagaggctccctcttaacacggcacttagacacgtgctgttccaccttccctcatgctgttccacctcccctcagactagctttcagccttctgtcagcagtaaaacttatatattttttaaaataatttcaatgtagttttccctccttcaaataaacatgtctgccctca

SEQ ID NO: 146349 - DNA, 1601 bp, Homo sapiens; identical to SEQ ID NO: 146336
  Payload ID: 8978
  Gene Symbol: KIR2DL3
  Gene Name: killer cell immunoglobulin-like receptor, two domains, long cytoplasmic tail, 3
  ENST ID: ENST00000610480
  CDS Start-End: 39-1088

SEQ ID NO: 146350 - DNA, 1590 bp, Homo sapiens
  Payload ID: 8978
  Gene Symbol: KIR2DL3
  Gene Name: killer cell immunoglobulin-like receptor, two domains, long cytoplasmic tail, 3
  Uniprot ID: P43628
  ENST ID: ENST00000617150
  CDS Start-End: 32-1057
ggcgcggccgcctgtctgcacagacagcaccatgtcgctcatggtcgtcagcatggtgtgtgttgggttcttcttgctgcagggggcctggccacatgagggagtccacagaaaaccttccctcctggcccacccaggtcccctggtgaaatcagaagagacagtcatcctgcaatgttggtcagatgtcaggtttcagcacttccttctgcacagagaagggaagtttaaggacactttgcacctcattggagagcaccatgatggggtctccaaggccaacttctccatcggtcccatgatgcaagaccttgcagggacctacagatgctacggttctgttactcactccccctatcagttgtcagctcccagtgaccctctggacatcgtcatcacaggtctatatgagaaaccttctctctcagcccagccgggccccacggttctggcaggagagagcgtgaccttgtcctgcagctcccggagctcctatgacatgtaccatctatccagggagggggaggcccatgaacgtaggttctctgcagggcccaaggtcaacggaacattccaggccgactttcctctgggccctgccacccacggaggaacctacagatgcttcggctctttccgtgactctccatacgagtggtcaaactcgagtgacccactgcttgtttctgtcacaggaaacccttcaaatagttggctttcacccactgaaccaagctccgaaaccggtaaccccagacacctgcatgttctgattgggacctcagtggtcatcatcctcttcatcctcctcctcttctttctccttcatcgctggtgctgcaacaaaaaaaatgctgttgtaatggaccaagagcctgcagggaacagaacagtgaacagggaggactctgatgaacaagaccctcaggaggtgacatatgcacagttgaatcactgcgttttcacacagagaaaaatcactcacccttctcagaggcccaagacacccccaacagatatcatcgtgtacacggaacttccaaatgctgagccctgatccaaagttgtctcctgcccatgagcaccacagtcaggccttgaggggatcttctagggagacaacagccctgtctcaaaactgggttgccagctccaatgtaccagcagctggaatctgaaggcgtgagtctgcatcttagggcatcgctcttcctcacaccacaaatctgaacgtgcctctctcttgcttacaaatgtctaaggtccccactgcctgctggagagaaaacacactcctttgcttagcccacaattctccatttcacttgacccctgcccacctctccaacctaactggcttacttcctagtctacttgaggctgcaatcacactgaggaactcacaattccaaacatacaagaggctccctcttaacacggcacttagacacgtgctgttccaccttccctcatgctgttccacctcccctcagactagctttcagccttctgtcagcagtaaaacttatatattttttaaaataatttcaatgtagttttccctccttcaaataaacatgtctgccctca

SEQ ID NO: 146351 - DNA, 1596 bp, Homo sapiens; identical to SEQ ID NO: 146348
  Payload ID: 8978
  Gene Symbol: KIR2DL3
  Gene Name: killer cell immunoglobulin-like receptor, two domains, long cytoplasmic tail, 3
  Uniprot ID: P43628
  ENST ID: ENST00000614792
  CDS Start-End: 38-1063

SEQ ID NO: 146352 - DNA, 1590 bp, Homo sapiens
  Payload ID: 8978
  Gene Symbol: KIR2DL3
  Gene Name: killer cell immunoglobulin-like receptor, two domains, long cytoplasmic tail, 3
  ENST ID: ENST00000622307
  CDS Start-End: 30-1079
cgcggccgcctgtctgcacagacagcaccatgtcgctcatggtcgtcagcatggtgtgtgttgggttcttcttgctgcagggggcctggccacatgagggagtccacagaaaaccttccctcctggcccacccaggtcccctggtgaaatcagaagagacagtcatcctgcaatgttggtcagatgtcaggtttcagcacttccttctgcacagagaagggaagtttaaggacactttgcacctcattggagagcaccatgatggggtctccaaggccaacttctccatcggtcccatgatgcaagaccttgcagggacctacagatgctacggttctgttactcactccccctatcagttgtcagctcccagtgaccctctggacatcgtcatcacaggtctatatgagaaaccttctctctcagcccagccgggccccacggttctggcaggagagagcgtgaccttgtcctgcagctcccggagctcctatgacatgtaccatctatccagggagggggaggcccatgaacgtaggttctctgcagggcccaaggtcaacggaacattccaggccgactttcctctgggccctgccacccacggaggaacctacagatgcttcggctctttccgtgactctccatacgagtggtcaaactcgagtgacccactgcttgtttctgtcacaggaaacccttcaaatagttggccttcacccactgaaccaagctccaaaaccggtaacccaagacacctgcacgttctgattgggacctcagtggtcatcatcctcttcatcctcctcctcttctttctccttcatcgctggtgctccaacaagaaaaatgctgctgtaatggaccaagagcctgcagggaacagaacagcgaatagcgaggactctgatgaacaagaccctcaggaggtgacatacgtacagttggatcactgcgttttcacacagagaaaaatcactcgcccttctcagaggcccaagacacccccaacagataccagagtgtacacggaacttccaaatgctgagtccagatccaaagttgtctcctgcccatgagcaccacagtcaggccttgaggggatcttctagggagacaacagccctgtctcaaaaccgggttgccagctcccatgtaccagcagctggaatctgaaggcgtgagtctgcatcttagggcatcgctcttcctcacaccacaaatctgaatgtgcctctctcttgcttacaaatgtctaaggtccccactgcctgctggagagaaaacacactcctttgcttagcccacaattctccatttcacttgacccctgcccacctctccaaccttactggcttacttcctagtctacttgaggctgcaatcacactgaggaactcacagttccaaacatacaagaggctccctcttaacacggcacttagacacgtcctgttccaccttccctcatgctgttccacctcccctcagagtatctttcagccttctgtcagcagtaaaacttatatattttttaaaataatttcaatgtagttttccctccttcaaataaacatgtctgccctcatg

SEQ ID NO: 146353 - DNA, 1344 bp, Homo sapiens
  Payload ID: 8978
  Gene Symbol: KIR2DL3
  Gene Name: killer cell immunoglobulin-like receptor, two domains, long cytoplasmic tail, 3
  Uniprot ID: P43628
  ENST ID: ENST00000617790
  CDS Start-End: 90-1115
tgtaaactgcatgggcagggcgccaaataacatcctgtgcgctgctgagctgagctggggcgcggccgcctgtctgcacagacagcaccatgtcgctcatggtcgtcagcatggtgtgtgttgggttcttcttgctgcagggggcctggccacatgagggagtccacagaaaaccttccctcctggcccacccaggtcccctggtgaaatcagaagagacagtcatcctgcaatgttggtcagatgtcaggtttcagcacttccttctgcacagagaagggaagtttaaggacactttgcacctcattggagagcaccatgatggggtctccaaggccaacttctccatcggtcccatgatgcaagaccttgcagggacctacagatgctacggttctgttactcactccccctatcagttgtcagctcccagtgaccctctggacatcgtcatcacaggtctatatgagaaaccttctctctcagcccagccgggccccacggttctggcaggagagagcgtgaccttgtcctgcagctcccggagctcctatgacatgtaccatctatccagggagggggaggcccatgaacgtaggttctctgcagggcccaaggtcaacggaacattccaggccgactttcctctgggccctgccacccacggaggaacctacagatgcttcggctctttccgtgactctccatacgagtggtcaaactcgagtgacccactgcttgtttctgtcacaggaaacccttcaaatagttggccttcacccactgaaccaagctccgaaaccggtaaccccagacacctgcatgttctgattgggacctcagtggtcatcatcctcttcatcctcctcctcttctttctccttcatcgctggtgctgcaacaaaaaaaatgctgttgtaatggaccaagagcctgcagggaacagaacagtgaacagggaggactctgatgaacaagaccctcaggaggtgacatatgcacagttgaatcactgcgttttcacacagagaaaaatcactcgcccttctcagaggcccaagacacccccaacagatatcatcgtgtacacggaacttccaaatgctgagccctgatccaaagttgtctcctgcccatgagcaccacagtcaggccttgaggggatcttctagggagacaacagccctgtctcaaaactgggttgccagctccaatgtaccagcagctggaatctgaaggcgtgagtctgcatcttagggcatcgctcttcctcacaccacaaatctgaacgtgcctctcccttgcttacaaatgtctaaggtccccactgcctgctggagagaa

SEQ ID NO: 146354 - DNA, 1601 bp, Homo sapiens
  Payload ID: 8978
  Gene Symbol: KIR2DL3
  Gene Name: killer cell immunoglobulin-like receptor, two domains, long cytoplasmic tail, 3
  ENST ID: ENST00000620925
  CDS Start-End: 39-1088
gagctggggcgcagccgcctgtctgcaccggcagcaccatgtcgctcatggtcgtcagcatggcgtgtgttgggttcttcttgctgcagggggcctggccacatgagggagtccacagaaaaccttccctcctggcccacccaggtcccctggtgaaatcagaagagacagtcatcctgcaatgttggtcagatgtcaggtttcagcacttccttctgcacagagaagggaagtttaaggacactttgcacctcattggagagcaccatgatggggtctccaaggccaacttctccatcggtcccatgatgcaagaccttgcagggacctacagatgctacggttctgttactcactccccctatcagttgtcagctcccagtgaccctctggacatcgtcatcacaggtctatatgagaaaccttctctctcagcccagccgggccccacggttctggcaggagagagcgtgaccttgtcctgcagctcccggagctcctatgacatgtaccatctatccagggagggggaggcccatgaacgtaggttctctgcagggcccaaggtcaacggaacattccaggccgactttcctctgggccctgccacccacggaggaacctacagatgcttcggctctttccgtgactctccatacgagtggtcaaactcgagtgacccactgcttgtttctgtcacaggaaacccttcaaatagttggccttcacccactgaaccaagctccaaaaccggtaacccaagacacctgcacgttctgattgggacctcagtggtcatcatcctcttcatcctcctcctcttctttctccttcatcgctggtgctccaacaagaaaaatgctgctgtaatggaccaagagcctgcagggaacagaacagcgaatagcgaggactctgatgaacaagaccctcaggaggtgacatacgtacagttggatcactgcgttttcacacagagaaaaatcactcgcccttctcagaggcccaagacacccccaacagataccagagtgtacacggaacttccaaatgctgagtccagatccaaagttgtctcctgcccatgagcaccacagtcaggccttgaggggatcttctagggagacaacagccctgtctcaaaaccgggttgccagctcccatgtaccagcagctggactctgaaggcgtgagtctgcatcttagggcatcgctcttcctcacaccacaaatctgaatgtgcctctctcttgcttacaaatgtctaaggtccccactgcctgctggagagaaaacacactcctttgcttagcccacaattctccatttcacttgacccctgcccacctctccaaccttactggcttacttcctagtctacttgaggctgcaatcacactgaggaactcacagttccaaacatacaagaggctccctcttaacacggcacttagacacgtcctgttccaccttccctcatgctgttccacctcccctcagagtatctttcagccttctgtcagcagtaaaacttatatattttttaaaataatttcaatgtagttttccctccttcaaataaacatgtctgccctcatggt

SEQ ID NO: 146355 - DNA, 1572 bp, Homo sapiens
  Payload ID: 8978
  Gene Symbol: KIR2DL3
  Gene Name: killer cell immunoglobulin-like receptor, two domains, long cytoplasmic tail, 3
  Uniprot ID: P43628
  ENST ID: ENST00000617404
  CDS Start-End: 14-1039
cacagacagcaccatgtcgctcatggtcgtcagcatggtgtgtgttgggttcttcttgctgcagggggcctggccacatgagggagtccacagaaaaccttccctcctggcccacccaggtcccctggtgaaatcagaagagacagtcatcctgcaatgttggtcagatgtcaggtttcagcacttccttctgcacagagaagggaagtttaaggacactttgcacctcattggagagcaccatgatggggtctccaaggccaacttctccatcggtcccatgatgcaagaccttgcagggacctacagatgctacggttctgttactcactccccctatcagttgtcagctcccagtgaccctctggacatcgtcatcacaggtctatatgagaaaccttctctctcagcccagccgggccccacggttctggcaggagagagcgtgaccttgtcctgcagctcccggagctcctatgacatgtaccatctatccagggagggggaggcccatgaacgtaggttctctgcagggcccaaggtcaacggaacattccaggccgactttcctctgggccctgccacccacggaggaacctacagatgcttcggctctttccgtgactctccatacgagtggtcaaactcgagtgacccactgcttgtttctgtcacaggaaacccttcaaatagttggccttcacccactgaaccaagctccgaaaccggtaaccccagacacctgcatgttctgattgggacctcagtggtcatcatcctcttcatcctcctcctcttctttctccttcatcgctggtgctgcaacaaaaaaaatgctgttgtaatggaccaagagcctgcagggaacagaacagtgaacagggaggactctgatgaacaagaccctcaggaggtgacatatgcacagttgaatcactgcgttttcacacagagaaaaatcactcgcccttctcagaggcccaagacacccccaacagatatcatcgtgtacacggaacttccaaatgctgagccctgatccaaagttgtctcctgcccatgagcaccacagtcaggccttgaggggatcttctagggagacaacagccctgtctcaaaactgggttgccagctccaatgtaccagcagctggaatctgaaggcgtgagtctgcatcttagggcatcgctcttcctcacaccacaaatctgaacgtgcctctcccttgcttacaaatgtctaaggtccccactgcctgctggagagaaaacacactcctttgcttagcccacaattctccatttcacttgacccctgcccacctctccaacctaactggcttacttcctagtctacttgaggctgcaatcacactgaggaactcacaattccaaacatacaagaggctccctcttaacacggcacttagacacgtgctgttccaccttccctcatgctgttccacctcccctcagtctagctttcagccttctgtcagcagtaaaacttatatattttttaaaataatttcaatgtagttttccctccttcaaataaacatgtctgccctca

SEQ ID NO: 146356 - DNA, 1566 bp, Homo sapiens
  Payload ID: 8978
  Gene Symbol: KIR2DL3
  Gene Name: killer cell immunoglobulin-like receptor, two domains, long cytoplasmic tail, 3
  ENST ID: ENST00000616520
  CDS Start-End: 8-1033
cagcaccatgtcgctcatggtcgtcagcatggtgtgtgttgggttcttcttgctgcagggggcctggccacatgagggagtccacagaaaaccttccctcctggcccacccaggtcccctggtgaaatcagaagagacagtcatcctgcaatgttggtcagatgtcaggtttcagcacttccttctgcacagagaagggaagtttaaggacactttgcacctcattggagagcaccatgatggggtttccaaggccaacttctccatcggtcccatgatgcaagaccttgcagggacctacagatgctacggttctgttactcactccccctatcagttgtcagctcccagtgaccctctggacatcgtcatcacaggtctatatgagaaaccttctctctcagcccagccgggccccacggttctggcaggagagagcgtgaccttgtcctgcagctcccggagctcctatgacatgtaccatctatccagggagggggaggcccatgaacgtaggttctctgcagggcccaaggtcaacggaacattccaggccgactttcctctgggccctgccacccacggaggaacctacagatgcttcggctctttccgtgactctccatacgagtggtcaaactcgagtgacccactgcttgtttctgtcacaggaaacccttcaaatagttggccttcacccactgaaccaagctccgaaaccggtaaccccagacacctgcatgttctgattgggacctcagtggtcatcatcctcttcatcctcctcctcttctttctccttcatcgctggtgctgcaacaaaaaaaatgctgttgtaatggaccaagagcctgcagggaacagaacagtgaacagggaggactctgatgaacaagaccctcaggaggtgacatatgcacagttgaatcactgcgttttcacacagagaaaaatcactcacccttctcagaggcccaagacacccccaacagatatcatcgtgtacacggaacttccaaatgctgagccctgatccaaagttgtctcctgcccatgagcaccacagtcaggccttgaggggatcttctagggagacaacagccctgtctcaaaactgggttgccagctccaatgtaccagcagctggaatctgaaggcgtgagtctgcatcttagggcatcgctcttcctcacaccacaaatctgaacgtgcctctctcttgcttacaaatgtctaaggtccccactgcctgctggagagaaaacacactcctttgcttagcccacaattctccatttcacttgacccctgcccacctctccaacctaactggcttacttcctagtctacttgaggctgcaatcacactgaggaactcacaattccaaacatacaagaggctccctcttaacacggcacttagacacgtgctgttccaccttccctcatgctgttccacctcccctcagactagctttcagccttctgtcagcagtaaaacttatatattttttaaaataatttcaatgtagttttccctccttcaaataaacatgtctgccctca

SEQ ID NO: 146357 - DNA, 1601 bp, Homo sapiens; identical to SEQ ID NO: 146354
  Payload ID: 8978
  Gene Symbol: KIR2DL3
  Gene Name: killer cell immunoglobulin-like receptor, two domains, long cytoplasmic tail, 3
  ENST ID: ENST00000610900
  CDS Start-End: 39-1088

SEQ ID NO: 146358 - DNA, 1601 bp, Homo sapiens; identical to SEQ ID NO: 146336
  Payload ID: 8978
  Gene Symbol: KIR2DL3
  Gene Name: killer cell immunoglobulin-like receptor, two domains, long cytoplasmic tail, 3
  ENST ID: ENST00000617542
  CDS Start-End: 39-1088

SEQ ID NO: 146359 - DNA, 1590 bp, Homo sapiens
  Payload ID: 8978
  Gene Symbol: KIR2DL3
  Gene Name: killer cell immunoglobulin-like receptor, two domains, long cytoplasmic tail, 3
  Uniprot ID: P43628
  ENST ID: ENST00000622644
  CDS Start-End: 32-1057
ggcgcggccgcctgtctgcacagacagcaccatgtcgctcatggtcgtcagcatggtgtgtgttgggttcttcttgctgcagggggcctggccacatgagggagtccacagaaaaccttccctcctggcccacccaggtcccctggtgaaatcagaagagacagtcatcctgcaatgttggtcagatgtcaggtttcagcacttccttctgcacagagaagggaagtttaaggacactttgcacctcattggagagcaccatgatggggtctccaaggccaacttctccatcggtcccatgatgcaagaccttgcagggacctacagatgctacggttctgttactcactccccctatcagttgtcagctcccagtgaccctctggacatcgtcatcacaggtctatatgagaaaccttctctctcagcccagccgggccccacggttctggcaggagagagcgtgaccttgtcctgcagctcccggagctcctatgacatgtaccatctatccagggagggggaggcccatgaacgtaggttctctgcagggcccaaggtcaacggaacattccaggccgactttcctctgggccctgccacccacggaggaacctacagatgcttcggctctttccgtgactctccatacgagtggtcaaactcgagtgacccactgcttgtttctgtcacaggaaacccttcaaatagttggccttcacccactgaaccaagctccgaaaccggtaaccccagacacctgcatgttctgattgggacctcagtggtcatcatcctcttcatcctcctcctcttctttctccttcatcgctggtgctgcaacaaaaaaaatgctgttgtaatggaccaagagcctgcagggaacagaacagtgaacagggaggactctgatgaacaagaccctcaggaggtgacatatgcacagttgaatcactgcgttttcacacagagaaaaatcactcgcccttctcagaggcccaagacacccccaacagatatcatcgtgtacacggaacttccaaatgctgagccctgatccaaagttgtctcctgcccatgagcaccacagtcaggccttgaggggatcttctagggagacaacagccctgtctcaaaactgggttgccagctccaatgtaccagcagctggaatctgaaggcgtgagtctgcatcttagggcatcgctcttcctcacaccacaaatctgaacgtgcctctcccttgcttacaaatgtctaaggtccccactgcctgctggagagaaaacacactcctttgcttagcccacaattctccatttcacttgacccctgcccacctctccaacctaactggcttacttcctagtctacttgaggctgcaatcacactgaggaactcacaattccaaacatacaagaggctccctcttaacacggcacttagacacgtgctgttccaccttccctcatgctgttccacctcccctcagagtatctttcagccttctgtcagcagtaaaacttatatattttttaaaataatttcaatgtagttttccctccttcaaataaacatgtctgccctca

SEQ ID NO: 146360 - DNA, 1587 bp, Homo sapiens
  Payload ID: 8978
  Gene Symbol: KIR2DL3
  Gene Name: killer cell immunoglobulin-like receptor, two domains, long cytoplasmic tail, 3
  ENST ID: ENST00000616840
  CDS Start-End: 30-1076
cgcggccgcctgtctgcacagacagcaccatgtcgctcatggtcgtcagcatggtgtgtgttgggttcttcttgctgcagggggcctggccacatgagggagtccacagaaaaccttccctcctggcccacccaggtcccctggtgaaatcagaagagacagtcatcctgcaatgttggtcagatgtcaggtttcagcacttccttctgcacagagaagggaagtttaaggacactttgcacctcattggagagcaccatgatggggtctccaaggccaacttctccatcggtcccatgatgcaagaccttgcagggacctacagatgctacggttctgttactcactccccctatcagttgtcagctcccagtgaccctctggacatcgtcatcacaggtctatatgagaaaccttctctctcagcccagccgggccccacggttctggcaggagagagcgtgaccttgtcctgcagctcccggagctcctatgacatgtaccatctatccagggagggggaggcccatgaacgtaggttctctgcagggcccaaggtcaacggaacattccaggccgactttcctctgggccctgccacccacggaggaacctacagatgcttcggctctttccgtgactctccatacgagtggtcaaactcgagtgacccactgcttgtttctgtcacaggaaacccttcaaatagttggccttcacccactgaaccaagctccaaaaccggtaacccccgacacctgcacattctgattgggacctcagtggtcatcatcctcttcatcctcctcttctttctccttcatcgctggtgctccaacaaaaaaaatgctgcggtaatggaccaagagtctgcaggaaacagaacagcgaatagcgaggactctgatgaacaagaccctcaggaggtgacatacacacagttgaatcactgcgttttcacacagagaaaaatcactcgcccttctcagaggcccaagacacccccaacagatatcatcgtgtacacggaacttccaaatgctgagtccagatccaaagttgtctcctgcccatgagcaccacagtcaggccttgagggcgtcttctagggagacaacagccctgtctcaaaaccgggttgccagctcccatgtaccagcagctggaatctgaaggcgtgagtctgcatcttagggcatcgatcttcctcacaccacaaatctgaatgtgcctctcacttgcttacaaatgtctaaggtccccactgcctgctggagaaaaaacacactcctttgcttaacccacagttctccatttcacttgacccctgcccacctctccaacctaactggcttacttcctagtctacttgaggctgcaatcacactgaggaactcacaattccaaacatacaagaggctccctcttaacgcagcacttagacacgtgttgttccaccttccctcatgctgttccacctcccctcagactagctttcagtcttctgtcagcagtaaaacttatatattttttaaaataacttcaatgtagttttccatccttcaaataaacatgtctgcccccatg

SEQ ID NO: 146361 - DNA, 1579 bp, Homo sapiens
  Payload ID: 8978
  Gene Symbol: KIR2DL3
  Gene Name: killer cell immunoglobulin-like receptor, two domains, long cytoplasmic tail, 3
  Uniprot ID: P43628
  ENST ID: ENST00000617593
  CDS Start-End: 22-1047
cctgtctgcacagacagcaccatgtcgctcatggtcgtcagcatggtgtgtgttgggttcttcttgctgcagggggcctggccacatgagggagtccacagaaaaccttccctcctggcccacccaggtcccctggtgaaatcagaagagacagtcatcctgcaatgttggtcagatgtcaggtttcagcacttccttctgcacagagaagggaagtttaaggacactttgcacctcattggagagcaccatgatggggtctccaaggccaacttctccatcggtcccatgatgcaagaccttgcagggacctacagatgctacggttctgttactcactccccctatcagttgtcagctcccagtgaccctctggacatcgtcatcacaggtctatatgagaaaccttctctctcagcccagccgggccccacggttctggcaggagagagcgtgaccttgtcctgcagctcccggagctcctatgacatgtaccatctatccagggagggggaggcccatgaacgtaggttctctgcagggcccaaggtcaacggaacattccaggccgactttcctctgggccctgccacccacggaggaacctacagatgcttcggctctttccgtgactctccatacgagtggtcaaactcgagtgacccactgcttgtttctgtcacaggaaacccttcaaatagttggccttcacccactgaaccaagctccgaaaccggtaaccccagacacctgcatgttctgattgggacctcagtggtcatcatcctcttcatcctcctcctcttctttctccttcatcgctggtgctgcaacaaaaaaaatgctgttgtaatggaccaagagcctgcagggaacagaacagtgaacagggaggactctgatgaacaagaccctcaggaggtgacatatgcacagttgaatcactgcgttttcacacagagaaaaatcactcgcccttctcagaggcccaagacacccccaacagatatcatcgtgtacacggaacttccaaatgctgagccctgatccaaagttgtctcctgcccatgagcaccacagtcaggccttgaggggatcttctagggagacaacagccctgtctcaaaactgggttgccagctccaatgtaccagcagctggaatctgaaggcgtgagtctgcatcttagggcatcgctcttcctcacaccacaaatctgaacgtgcctctcccttgcttacaaatgtctaaggtccccactgcctgctggagagaaaacacactcctttgcttagcccacaattctccatttcacttgacccctgcccacctctccaacctaactggcttacttcctagtctacttgaggctgcaatcacactgaggaactcacaattccaaacatacaagaggctccctcttaacacggcacttagacacgtgctgttccaccttccctcatgctgttccacctcccctcagactagctttcagccttctgtcagcagtaaaacttatatattttttaaaataatttcaatgtagttttccctccttcaaataaacatgtctgccctc

SEQ ID NO: 146362 - DNA, 1601 bp, Homo sapiens; identical to SEQ ID NO: 146336
  Payload ID: 8978
  Gene Symbol: KIR2DL3
  Gene Name: killer cell immunoglobulin-like receptor, two domains, long cytoplasmic tail, 3
  ENST ID: ENST00000616745
  CDS Start-End: 39-1088

SEQ ID NO: 146363 - DNA, 1596 bp, Homo sapiens; identical to SEQ ID NO: 146348
  Payload ID: 8978
  Gene Symbol: KIR2DL3
  Gene Name: killer cell immunoglobulin-like receptor, two domains, long cytoplasmic tail, 3
  Uniprot ID: P43628
  ENST ID: ENST00000620549
  CDS Start-End: 38-1063

SEQ ID NO: 146364 - DNA, 1601 bp, Homo sapiens; identical to SEQ ID NO: 146336
  Payload ID: 8978
  Gene Symbol: KIR2DL3
  Gene Name: killer cell immunoglobulin-like receptor, two domains, long cytoplasmic tail, 3
  ENST ID: ENST00000621037
  CDS Start-End: 39-1088

SEQ ID NO: 146365 - DNA, 1601 bp, Homo sapiens; identical to SEQ ID NO: 146336
  Payload ID: 8978
  Gene Symbol: KIR2DL3
  Gene Name: killer cell immunoglobulin-like receptor, two domains, long cytoplasmic tail, 3
  ENST ID: ENST00000612295
  CDS Start-End: 39-1088

SEQ ID NO: 146366 - DNA, 1601 bp, Homo sapiens; identical to SEQ ID NO: 146336
  Payload ID: 8978
  Gene Symbol: KIR2DL3
  Gene Name: killer cell immunoglobulin-like receptor, two domains, long cytoplasmic tail, 3
  ENST ID: ENST00000618401
  CDS Start-End: 39-1088

SEQ ID NO: 146367 - DNA, 1596 bp, Homo sapiens; identical to SEQ ID NO: 146348
  Payload ID: 8978
  Gene Symbol: KIR2DL3
  Gene Name: killer cell immunoglobulin-like receptor, two domains, long cytoplasmic tail, 3
  Uniprot ID: P43628
  ENST ID: ENST00000615091
  CDS Start-End: 38-1063

SEQ ID NO: 146368 - DNA, 1601 bp, Homo sapiens; identical to SEQ ID NO: 146336
  Payload ID: 8978
  Gene Symbol: KIR2DL3
  Gene Name: killer cell immunoglobulin-like receptor, two domains, long cytoplasmic tail, 3
  ENST ID: ENST00000612755
  CDS Start-End: 39-1088

SEQ ID NO: 146369 - DNA, 1596 bp, Homo sapiens; identical to SEQ ID NO: 146348
  Payload ID: 8978
  Gene Symbol: KIR2DL3
  Gene Name: killer cell immunoglobulin-like receptor, two domains, long cytoplasmic tail, 3
  Uniprot ID: P43628
  ENST ID: ENST00000617242
  CDS Start-End: 38-1063

SEQ ID NO: 146370 - DNA, 1596 bp, Homo sapiens; identical to SEQ ID NO: 146348
  Payload ID: 8978
  Gene Symbol: KIR2DL3
  Gene Name: killer cell immunoglobulin-like receptor, two domains, long cytoplasmic tail, 3
  Uniprot ID: P43628
  ENST ID: ENST00000611369
  CDS Start-End: 38-1063

SEQ ID NO: 146371 - DNA, 1590 bp, Homo sapiens
  Payload ID: 8978
  Gene Symbol: KIR2DL3
  Gene Name: killer cell immunoglobulin-like receptor, two domains, long cytoplasmic tail, 3
  ENST ID: ENST00000617853
  CDS Start-End: 32-1081
ggcgcggccgactgtctgcacagacagcaccatgtcgctcatggtcgtcagcatggcgtgtgttgggttcttcttgctgcagggggcctggccacatgagggagtccacagaaaaccttccctccgggcccacccaggtcccctggtgaaatcagaagagacagtcatcctgcaatgttggtcagatgtcaggtttgagcacttccttctgcacagagaagggaagtttaaggacactttgcgcctcattggagagcaccatgatggggtctccaaggccaacttctccatcggtcccatgatgcaagaccttgcagggacctacagatgctacggttctgttactcactccccctatcagttgtcagctcccagtgaccctctggacatcgtcatcacaggtctatatgagaaaccttctctctcagcccagccgggccccacggttctggcaggagagagcgtgaccttgtcctgcagctcccggagctcctatgacatgtaccatctatccagggagggggaggcccatgaacgtaggttctctgcagggcccaaggtcaacggaacattccaggccgactttcctctgggccctgccacccacggagggacctacagatgcttcggctctttccgtgactctccatacgagtggtcaaactcgagtgacccactgcttgtttctgtcacaggaaacccttcaaatagttggccttcacccactgaaccaagctccaaaaccggtaaccccagacacctgcacgttctgattgggacctcagtggtcatcatcctcttcgtcctcctcctcttctttctccttcatcgctggtgctccaacaaaaaaaatgctgttgtaatggaccaagagcctgcagggaacagaacagtgaacagggaggactctgatgaacaagaccctcaggaggtgacatatgcacagttgaatcactgcgttttcacacagagaaaaatcactcgcccttctcagaggcccaagacacccccaacagatatcatcgtgtacacggaacttccaaatgctgagcccagatccaaagttgtctcctgcccatgagcaccacagtcaggccttgaggggatcttctagggagacaacagccctgtctcaaaactgggttgccagctcccatgtaccagcagctggaatctgaaggcgtcagtctgcgtcttagggcatcgctcttcctcacaccacaaatctgaatgtgcctctctcttgcttacaaatgtctaaggtccccactgcctgctggagagaaaacacactcctttgcttagcccacaattctccatttcacttgacccctgcccacctctccaacctaactggcttacttcctagtctacttgaggctgcaatcacactgaggaactcacaattccaaacatgcaagtggctccctcttaacacggcacttagacacgtgctgttccaccttccctcatgctgttccacctcccctcagactagctttcagccttctgtcagcagtaaaacttatatattttttaaaataatttcaatgtagttttcccgccttcaaataaacatgtctgccctca

SEQ ID NO: 146372 - DNA, 1377 bp, Homo sapiens; identical to SEQ ID NO: 146337
  Payload ID: 8978
  Gene Symbol: KIR2DL3
  Gene Name: killer cell immunoglobulin-like receptor, two domains, long cytoplasmic tail, 3
  ENST ID: ENST00000618446
  CDS Start-End: 39-1088

SEQ ID NO: 146373 - DNA, 1464 bp, Homo sapiens
  Payload ID: 8978
  Gene Symbol: KIR2DL3
  Gene Name: killer cell immunoglobulin-like receptor, two domains, long cytoplasmic tail, 3
  Uniprot ID: P43628
  ENST ID: ENST00000611821
  CDS Start-End: 20-1045
tgtctgcacagacagcaccatgtcgctcatggtcgtcagcatggtgtgtgttgggttcttcttgctgcagggggcctggccacatgagggagtccacagaaaaccttccctcctggcccacccaggtcccctggtgaaatcagaagagacagtcatcctgcaatgttggtcagatgtcaggtttcagcacttccttctgcacagagaagggaagtttaaggacactttgcacctcattggagagcaccatgatggggtctccaaggccaacttctccatcggtcccatgatgcaagaccttgcagggacctacagatgctacggttctgttactcactccccctatcagttgtcagctcccagtgaccctctggacatcgtcatcacaggtctatatgagaaaccttctctctcagcccagccgggccccacggttctggcaggagagagcgtgaccttgtcctgcagctcccggagctcctatgacatgtaccatctatccagggagggggaggcccatgaacgtaggttctctgcagggcccaaggtcaacggaacattccaggccgactttcctctgggccctgccacccacggaggaacctacagatgcttcggctctttccgtgactctccatacgagtggtcaaactcgagtgacccactgcttgtttctgtcacaggaaacccttcaaatagttggccttcacccactgaaccaagctccgaaaccggtaaccccagacacctgcatgttctgattgggacctcagtggtcatcatcctcttcatcctcctcctcttctttctccttcatcgctggtgctgcaacaaaaaaaatgctgttgtaatggaccaagagcctgcagggaacagaacagtgaacagggaggactctgatgaacaagaccctcaggaggtgacatatgcacagttgaatcactgcgttttcacacagagaaaaatcactcgcccttctcagaggcccaagacacccccaacagatatcatcgtgtacacggaacttccaaatgctgagccctgatccaaagttgtctcctgcccatgagcaccacagtcaggccttgaggggatcttctagggagacaacagccctgtctcaaaactgggttgccagctccaatgtaccagcagctggaatctgaaggcgtgagtctgcatcttagggcatcgctcttcctcacaccacaaatctgaacgtgcctctcccttgcttacaaatgtctaaggtccccactgcctgctggagagaaaacacactcctttgcttagcccacaattctccatttcacttgacccctgcccacctctccaacctaactggcttacttcctagtctacttgaggctgcaatcacactgaggaactcacaattccaaacatacaagaggctccctcttaacacggcacttagacacgtgctgttccaccttccctcatgct

SEQ ID NO: 146374 - DNA, 1601 bp, Homo sapiens
  Payload ID: 8978
  Gene Symbol: KIR2DL3
  Gene Name: killer cell immunoglobulin-like receptor, two domains, long cytoplasmic tail, 3
  ENST ID: ENST00000622758
  CDS Start-End: 39-1088
gagctggggcgcggccgcctgtctgcacagacagcaccatgtcgctcatggtcgtcagcatggtgtgtgttgggttcttcttgctgcagggggcctggccacatgagggagtccacagaaaaccttccctcctggcccacccaggtcccctggtgaaatcagaagagacagtcatcctgcaatgttggtcagatgtcaggtttcagcacttccttctgcacagagaagggaagtttaaggacactttgcacctcattggagagcaccatgatggggtttccaaggccaacttctccatcggtcccatgatgcaagaccttgcagggacctacagatgctacggttctgttactcactccccctatcagttgtcagctcccagtgaccctctggacatcgtcatcacaggtctatatgagaaaccttctctctcagcccagccgggccccacggttctggcaggagagagcgtgaccttgtcctgcagctcccggagctcctatgacatgtaccatctatccagggagggggaggcccatgaacgtaggttctctgcagggcccaaggtcaacggaacattccaggccgactttcctctgggccctgccacccacggaggaacctacagatgcttcggctctttccgtgactctccatacgagtggtcaaactcgagtgacccactgcttgtttctgtcacaggaaacccttcaaatagttggccttcacccactgaaccaagctccaaaaccggtagcccaagacacctgcacgttctgattgggacctcagtggtcatcatcctcttcatcctcctcctcttctttctccttcatcgctggtgctccaacaagaaaaatgctgctgtaatggaccaagagcctgcagggaacagaacagcgaatagcgaggactctgatgaacaagaccctcaggaggtgacatacgtacagttggatcactgcgttttcacacagagaaaaatcactcgcccttctcagaggcccaagacacccccaacagataccagagtgtacacggaacttccaaatgctgagtccagatccaaagttgtctcctgcccatgagcaccacagtcaggccttgaggggatcttctagggagacaacagccctgtctcaaaaccgggttgccagctcccatgtaccagcagctggaatctgaaggcgtgagtctgcatcttagggcatcgctcttcctcacaccacaaatctgaatgtgcctctctcttgcttacaaatgtctaaggtccccactgcctgctggagagaaaacacactcctttgcttagcccacaattctccatttcacttgacccctgcccacctctccaaccttactggcttacttcctagtctacttgaggctgcaatcacactgaggaactcacagttccaaacatacaagaggctccctcttaacacggcacttagacacgtcctgttccaccttccctcatgctgttccacctcccctcagagtatctttcagccttctgtcagcagtaaaacttatatattttttaaaataatttcaatgtagttttccctccttcaaataaacatgtctgccctcatggt

SEQ ID NO: 146375 - DNA, 1447 bp, Homo sapiens
  Payload ID: 8979
  Gene Symbol: KIR2DL4
  Gene Name: killer cell immunoglobulin-like receptor, two domains, long cytoplasmic tail, 4
  Uniprot ID: Q99706
  ENST ID: ENST00000345540
  CDS Start-End: 13-1041
agaagctgcaccatgtccatgtcacccacggtcatcatcctggcatgtcttgggttcttcttggaccagagtgtgtgggcacacgtgggtggtcaggacaagcccttctgctctgcctggcccagcgctgtggtgcctcaaggaggacacgtgactcttcggtgtcactatcgtcgtgggtttaacatcttcacgctgtacaagaaagatggggtccctgtccctgagctctacaacagaatattctggaacagtttcctcattagccctgtgaccccagcacacgcagggacctacagatgtcgaggttttcacccgcactcccccactgagtggtcggcacccagcaaccccctggtgatcatggtcacaggtctatatgagaaaccttcgcttacagcccggccgggccccacggttcgcgcaggagagaacgtgaccttgtcctgcagctcccagagctcctttgacatctaccatctatccagggagggggaagcccatgaacttaggctccctgcagtgcccagcatcaatggaacattccaggccgacttccctctgggtcctgccacccacggagagacctacagatgcttcggctctttccatggatctccctacgagtggtcagacccgagtgacccactgcctgtttctgtcacaggaaacccttctagtagttggccttcacccactgaaccaagcttcaaaactgatgctgctgtaatgaaccaagagcctgcgggacacagaacagtgaacagggaggactctgatgaacaagaccctcaggaggtgacatacgcacagttggatcactgcattttcacacagagaaaaatcactggcccttctcagaggagcaagagaccctcaacagataccagcgtgtgtatagaacttccaaatgctgagcccagagcgttgtctcctgcccatgagcaccacagtcaggccttgatgggatcttctagggagacaacagccctgtctcaaacccagcttgccagctctaatgtaccagcagctggaatctgaaggcgtgagtctccatcttagagcatcactcttcctcacaccacaaatctggtgcctgtctcttgcttaccaatgtctaaggtccccactgcctgctgcagagaaaacacactcctttgcttagcccacaattctctatttcacttgacccctgcccacctctccaacctaactggcttacttcctagtctacttgaggctgcaatcacactgaggaactcacaattccaaacatacaagaggctctctcttaacacggcacttagacacgtgctgttccaccttccctcgtgctgttccacctttcctcagactatttttcagccttctggcatcagcaaaccttataaaatttttttgatttcagtgtagttctctcctcttcaaataaacatgtctgccttca

SEQ ID NO: 146376 - DNA, 1026 bp, Homo sapiens
  Payload ID: 8979
  Gene Symbol: KIR2DL4
  Gene Name: killer cell immunoglobulin-like receptor, two domains, long cytoplasmic tail, 4
  ENST ID: ENST00000346587
  CDS Start-End: 1-744
atgtccatgtcacccacggtcatcatcctggcatgtcttgggttcttcttggaccagagtgtgtgggcacacgtgggtctatatgagaaaccttcgcttacagcccggccgggccccacggttcgcgcaggagagaacgtgaccttgtcctgcagctcccagagctcctttgacatctaccatctatccagggagggggaagcccatgaacttaggctccctgcagtgcccagcatcaatggaacattccaggccgacttccctctgggtcctgccacccacggagagacctacagatgcttcggctctttccatggatctccctacgagtggtcagacccgagtgacccactgcctgtttctgtcacaggaaacccttctagtagttggccttcacccactgaaccaagcttcaaaactgatgctgctgtaatgaaccaagagcctgcgggacacagaacagtgaacagggaggactctgatgaacaagaccctcaggaggtgacatacgcacagttggatcactgcattttcacacagagaaaaatcactggcccttctcagaggagcaagagaccctcaacagataccagcgtgtgtatagaacttccaaatgctgagcccagagcgttgtctcctgcccatgagcaccacagtcaggccttgatgggatcttctagggagacaacagccctgtctcaaacccagcttgccagctctaatgtaccagcagctggaatctgaaggcgtgagtctccatcttagagcatcactcttcctcacaccacaaatctggtgcctgtctcttgcttaccaatgtctaaggtccccactgcctgctgcagagaaaacacactcctttgcttagcccacaattctctatttcacttgacccctgcccacctctccaacctaactggcttacttcctagtctacttgaggctgcaatcacactgaggaactcacaattccaaacatacaagaggctctctcttaacacggcacttagacacgtgctgttccac

SEQ ID NO: 146377 - DNA, 1396 bp, Homo sapiens
  Payload ID: 8979
  Gene Symbol: KIR2DL4
  Gene Name: killer cell immunoglobulin-like receptor, two domains, long cytoplasmic tail, 4
  Uniprot ID: Q99706
  ENST ID: ENST00000357494
  CDS Start-End: 13-990
agaagctgcaccatgtccatgtcacccacggtcatcatcctggcatgtcttgggttcttcttggaccagagtgtgtgggcacacgtgggtggtcaggacaagcccttctgctctgcctggcccagcgctgtggtgcctcaaggaggacacgtgactcttcggtgtcactatcgtcgtgggtttaacatcttcacgctgtacaagaaagatggggtccctgtccctgagctctacaacagaatattctggaacagtttcctcattagccctgtgaccccagcacacgcagggacctacagatgtcgaggttttcacccgcactcccccactgagtggtcggcacccagcaaccccctggtgatcatggtcacaggtctatatgagaaaccttcgcttacagcccggccgggccccacggttcgcgcaggagagaacgtgaccttgtcctgcagctcccagagctcctttgacatctaccatctatccagggagggggaagcccatgaacttaggctccctgcagtgcccagcatcaatggaacattccaggccgacttccctctgggtcctgccacccacggagagacctacagatgcttcggctctttccatggatctccctacgagtggtcagacccgagtgacccactgcctgtttctgtcacagatgctgctgtaatgaaccaagagcctgcgggacacagaacagtgaacagggaggactctgatgaacaagaccctcaggaggtgacatacgcacagttggatcactgcattttcacacagagaaaaatcactggcccttctcagaggagcaagagaccctcaacagataccagcgtgtgtatagaacttccaaatgctgagcccagagcgttgtctcctgcccatgagcaccacagtcaggccttgatgggatcttctagggagacaacagccctgtctcaaacccagcttgccagctctaatgtaccagcagctggaatctgaaggcgtgagtctccatcttagagcatcactcttcctcacaccacaaatctggtgcctgtctcttgcttaccaatgtctaaggtccccactgcctgctgcagagaaaacacactcctttgcttagcccacaattctctatttcacttgacccctgcccacctctccaacctaactggcttacttcctagtctacttgaggctgcaatcacactgaggaactcacaattccaaacatacaagaggctctctcttaacacggcacttagacacgtgctgttccaccttccctcgtgctgttccacctttcctcagactatttttcagccttctggcatcagcaaaccttataaaatttttttgatttcagtgtagttctctcctcttcaaataaacatgtctgccttca

SEQ ID NO: 146378 - DNA, 1580 bp, Homo sapiens
  Payload ID: 8979
  Gene Symbol: KIR2DL4
  Gene Name: killer cell immunoglobulin-like receptor, two domains, long cytoplasmic tail, 4
  ENST ID: ENST00000359085
  CDS Start-End: 42-863
gtcgagccgagtcactgcgtcctggcagcagaagctgcaccatgtccatgtcacccacggtcatcatcctggcatgtcttgggttcttcttggaccagagtgtgtgggcacacgtgggtggtcaggacaagcccttctgctctgcctggcccagcgctgtggtgcctcaaggaggacacgtgactcttcggtgtcactatcgtcgtgggtttaacatcttcacgctgtacaagaaagatggggtccctgtccctgagctctacaacagaatattctggaacagtttcctcattagccctgtgaccccagcacacgcagggacctacagatgtcgaggttttcacccgcactcccccactgagtggtcggcacccagcaaccccctggtgatcatggtcacaggtctatatgagaaaccttcgcttacagcccggccgggccccacggttcgcgcaggagagaacgtgaccttgtcctgcagctcccagagctcctttgacatctaccatctatccagggagggggaagcccatgaacttaggctccctgcagtgcccagcatcaatggaacattccaggccgacttccctctgggtcctgccacccacggagagacctacagatgcttcggctctttccatggatctccctacgagtggtcagacccgagtgacccactgcctgtttctgtcacaggaaacccttctagtagttggccttcacccactgaaccaagcttcaaaactggtatcgccagacacctgcatgctgtgattaggtactcagtggccatcatcctctttaccatccttcccttctttctccttcatcgctggtgctccaaaaaaaaaatgctgctgtaatgaaccaagagcctgcgggacacagaacagtgaacagggaggactctgatgaacaagaccctcaggaggtgacatacgcacagttggatcactgcattttcacacagagaaaaatcactggcccttctcagaggagcaagagaccctcaacagataccagcgtgtgtatagaacttccaaatgctgagcccagagcgttgtctcctgcccatgagcaccacagtcaggccttgatgggatcttctagggagacaacagccctgtctcaaacccagcttgccagctctaatgtaccagcagctggaatctgaaggcgtgagtctccatcttagagcatcactcttcctcacaccacaaatctggtgcctgtctcttgcttaccaatgtctaaggtccccactgcctgctgcagagaaaacacactcctttgcttagcccacaattctctatttcacttgacccctgcccacctctccaacctaactggcttacttcctagtctacttgaggctgcaatcacactgaggaactcacaattccaaacatacaagaggctctctcttaacacggcacttagacacgtgctgttccaccttccctcgtgctgttccacctttcctcagactatttttcagccttctggcatcagcaaaccttataaaatttttttgatttcagtgtagttctctcctcttcaaataaacatgtctgccttca

SEQ ID NO: 146379 - DNA, 1656 bp, Homo sapiens
  Payload ID: 8979
  Gene Symbol: KIR2DL4
  Gene Name: killer cell immunoglobulin-like receptor, two domains, long cytoplasmic tail, 4
  ENST ID: ENST00000396284
  CDS Start-End: 1-1251
atgtccccttcacatgttgtggtcaatgtgtcaactgcacgatccgggcccctcaccacatcctctgcaccggtcagtcgagccgagtcactgcgtcctggcagcagaagctgcaccatgtccatgtcacccacggtcatcatcctggcatgtcttgggttcttcttggaccagagtgtgtgggcacacgtgggtggtcaggacaagcccttctgctctgcctggcccagcgctgtggtgcctcaaggaggacacgtgactcttcggtgtcactatcgtcgtgggtttaacatcttcacgctgtacaagaaagatggggtccctgtccctgagctctacaacagaatattctggaacagtttcctcattagccctgtgaccccagcacacgcagggacctacagatgtcgaggttttcacccgcactcccccactgagtggtcggcacccagcaaccccctggtgatcatggtcacaggtctatatgagaaaccttcgcttacagcccggccgggccccacggttcgcgcaggagagaacgtgaccttgtcctgcagctcccagagctcctttgacatctaccatctatccagggagggggaagcccatgaacttaggctccctgcagtgcccagcatcaatggaacattccaggccgacttccctctgggtcctgccacccacggagagacctacagatgcttcggctctttccatggatctccctacgagtggtcagacccgagtgacccactgcctgtttctgtcacaggaaacccttctagtagttggccttcacccactgaaccaagcttcaaaactggtatcgccagacacctgcatgctgtgattaggtactcagtggccatcatcctctttaccatccttcccttctttctccttcatcgctggtgctccaaaaaaaaagatgctgctgtaatgaaccaagagcctgcgggacacagaacagtgaacagggaggactctgatgaacaagaccctcaggaggtgacatacgcacagttggatcactgcattttcacacagagaaaaatcactggcccttctcagaggagcaagagaccctcaacagataccagcgtgtgtatagaacttccaaatgctgagcccagagcgttgtctcctgcccatgagcaccacagtcaggccttgatgggatcttctagggagacaacagccctgtctcaaacccagcttgccagctctaatgtaccagcagctggaatctgaaggcgtgagtctccatcttagagcatcactcttcctcacaccacaaatctggtgcctgtctcttgcttaccaatgtctaaggtccccactgcctgctgcagagaaaacacactcctttgcttagcccacaattctctatttcacttgacccctgcccacctctccaacctaactggcttacttcctagtctacttgaggctgcaatcacactgaggaactcacaattccaaacatacaagaggctctctcttaacacggcacttagacacgtgctgttccaccttccctcgtgctgttccacctttcctcagactatttttcagccttctggcatcagcaaaccttataaaatttttttgatttcagtgtagttctctcctcttcaaataaacatgtctgccttc

SEQ ID NO: 146380 - DNA, 1601 bp, Homo sapiens
  Payload ID: 8979
  Gene Symbol: KIR2DL4
  Gene Name: killer cell immunoglobulin-like receptor, two domains, long cytoplasmic tail, 4
  ENST ID: ENST00000396289
  CDS Start-End: 1-1195
catgtcacccacggtcatcatcctggcatgtcttgggttcttcttggaccagagtgtgtgggcacacgtgggtggtcaggacaagcccttctgctctgcctggcccagcgctgtggtgcctcaaggaggacacgtgactcttcggtgtcactatcgtcgtgggtttaacatcttcacgctgtacaagaaagatggggtccctgtccctgagctctacaacagaatattctggaacagtttcctcattagccctgtgaccccagcacacgcagggacctacagatgtcgaggttttcacccgcactcccccactgagtggtcggcacccagcaaccccctggtgatcatggtcacaggtctatatgagaaaccttcgcttacagcccggccgggccccacggttcgcgcaggagagaacgtgaccttgtcctgcagctcccagagctcctttgacatctaccatctatccagggagggggaagcccatgaacttaggctccctgcagtgcccagcatcaatggaacattccaggccgacttccctctgggtcctgccacccacggagagacctacagatgcttcggctctttccatggatctccctacgagtggtcagacccgagtgacccactgcctgtttctgtcacaggaaacccttctagtagttggccttcacccactgaaccaagcttcaaaactggtatcgccagacacctgcatgctgtgattaggtactcagtggccatcatcctctttaccatccttcccttctttctccttcatcgctggtgctccaaaaaaaaagtaagcctcacgaagcagaggccagagaactcagggccctgtgcggaagcaggatgggagcacgcagatgctgctgtaatgaaccaagagcctgcgggacacagaacagtgaacagggaggactctgatgaacaagaccctcaggaggtgacatacgcacagttggatcactgcattttcacacagagaaaaatcactggcccttctcagaggagcaagagaccctcaacagataccagcgtgtgtatagaacttccaaatgctgagcccagagcgttgtctcctgcccatgagcaccacagtcaggccttgatgggatcttctagggagacaacagccctgtctcaaacccagcttgccagctctaatgtaccagcagctggaatctgaaggcgtgagtctccatcttagagcatcactcttcctcacaccacaaatctggtgcctgtctcttgcttaccaatgtctaaggtccccactgcctgctgcagagaaaacacactcctttgcttagcccacaattctctatttcacttgacccctgcccacctctccaacctaactggcttacttcctagtctacttgaggctgcaatcacactgaggaactcacaattccaaacatacaagaggctctctcttaacacggcacttagacacgtgctgttccaccttccctcgtgctgttccacctttcctcagactatttttcagccttctggcatcagcaaaccttataaaatttttttgatttcagtgtagttctctcctcttcaaataaacatgtctgccttca

SEQ ID NO: 146381 - DNA, 715 bp, Homo sapiens
  Payload ID: 8979
  Gene Symbol: KIR2DL4
  Gene Name: killer cell immunoglobulin-like receptor, two domains, long cytoplasmic tail, 4
  Uniprot ID: Q99706
  ENST ID: ENST00000396293
  CDS Start-End: 12-704
gaagctgcaccatgtccatgtcacccacggtcatcatcctggcatgtcttgggttcttcttggaccagagtgtgtgggcacacgtgggtctatatgagaaaccttcgcttacagcccggccgggccccacggttcgcgcaggagagaacgtgaccttgtcctgcagctcccagagctcctttgacatctaccatctatccagggagggggaagcccatgaacttaggctccctgcagtgcccagcatcaatggaacattccaggccgacttccctctgggtcctgccacccacggagagacctacagatgcttcggctctttccatggatctccctacgagtggtcagacccgagtgacccactgcctgtttctgtcacagatgctgctgtaatgaaccaagagcctgcgggacacagaacagtgaacagggaggactctgatgaacaagaccctcaggaggtgacatacgcacagttggatcactgcattttcacacagagaaaaatcactggcccttctcagaggagcaagagaccctcaacagataccagcgtgtgtatagaacttccaaatgctgagcccagagcgttgtctcctgcccatgagcaccacagtcaggccttgatgggatcttctagggagacaacagccctgtctcaaacccagcttgccagctctaatgtaccagcagctggaatctgaaggcgtgagtc

SEQ ID NO: 146382 - DNA, 1191 bp, Homo sapiens
  Payload ID: 8979
  Gene Symbol: KIR2DL4
  Gene Name: killer cell immunoglobulin-like receptor, two domains, long cytoplasmic tail, 4
  ENST ID: ENST00000610662
  CDS Start-End: 203-1141
tctagtctgcagttttcagaaaccctcattcctcccttgactgactcaccacttgaacctcatatgacgtagaagaagcctacctatgtccccttcacatgttgtggtcaatgtgtcaactgcacgatccgggcccctcaccacatcctctgcaccggtcagtcgagccgagtcactgcgtcctggcagcagaagctgcaccatgtccatgtcacccacggtcatcatcctggcatgtcttgggttcttcttggaccagagtgtgtgggcacacgtgggtggtcaggacaagcccttctgctctgcctggcccagcgctgtggtgcctcaaggaggacacgtgactcttcggtgtcactatcgtcgtgggtttaacatcttcacgctgtacaagaaagatggggtccctgtccctgagctctacaacagaatattctggaacagtttcctcattagccctgtgaccccagcacacgcagggacctacagatgtcgaggttttcacccgcactcccccactgagtggtcggcacccagcaaccccctggtgatcatggtcacaggtctatatgagaaaccttcgcttacagcccggccgggccccacggttcgcacaggagagaacgtgaccttgtcctgcagctcccagagctcctttgacatctaccatctatccagggagggggaagcccatgaacttaggctccctgcagtgcccagcatcaatggaacattccaggccgacttccctctgggtcctgccacccacggagagacctacagatgcttcggctctttccatggatctccctacgagtggtcagacgcgagtgacccactgcctgtttctgtcacaggaaacccttctagtagttggccttcacccactgaaccaagcttcaaaactggtatcgccagacacctgcatgctgtgattaggtactcagtggccatcatcctcttcaccatccttcccttctttctccttcatcgctggtgctccaaaaaaaaaagtaagcctcacgaagcagaggccagagaactcagggccctgtgcggaagcaggatgggagcacgcagatgctgctgtaatgaaccaagagcctgcgggacacagaacagtgaacagggaggactctgatgaacaagaccctcaggaggtgacatacgcacagttggatcactgcattt

SEQ ID NO: 146383 - DNA, 1022 bp, Homo sapiens
  Payload ID: 8979
  Gene Symbol: KIR2DL4
  Gene Name: killer cell immunoglobulin-like receptor, two domains, long cytoplasmic tail, 4
  ENST ID: ENST00000618013
  CDS Start-End: 3-740
ccatgtcacccacggtcatcatcctggcatgtcttgggttcttcttggaccagagtgtgtgggcacacgtgggtctatatgagaaaccttcgcttacagcccggccgggccccacggttcgcacaggagagaacgtgaccttgtcctgcagctcccagagctcctttgacatctaccatctatccagggagggggaagcccatgaacttaggctccctgcagtgcccagcatcaatggaacattccaggccgacttccctctgggtcctgccacccacggagagacctacagatgcttcggctctttccatggatctccctacgagtggtcagacgcgagtgacccactgcctgtttctgtcacaggaaacccttctagtagttggccttcacccactgaaccaagcttcaaaactgatgctgctgtaatgaaccaagagcctgcgggacacagaacagtgaacagggaggactctgatgaacaagaccctcaggaggtgacatacgcacagttggatcactgcattttcacacagagaaaaatcactggcccttctcagaggagcaagagaccctcaacagataccagcgtgtgtatagaacttccaaatgctgagcccagagcgttgtctcctgcccatgagcaccacagtcaggccttgatgggatcttctagggagacaacagccctgtctcaaacccagcttgccagctctaatgtaccagcagctggaatctgaaggcgtgagtctccatcttagagcatcactcttcctcacaccacaaatctggtgcctgtctcttgcttaccaatgtctaaggtccccactgcctgctgcagagaaaacacactcctttgcttagcccacaattctctatttcacttgacccctgcccacctctccaacctaactggcttacttcctagtctacttgaggctgcaatcacactgaggaactcacaattccaaacatacaagaggctctctcttaacacggcacttagacacgtgctgttccac

SEQ ID NO: 146384 - DNA, 715 bp, Homo sapiens
  Payload ID: 8979
  Gene Symbol: KIR2DL4
  Gene Name: killer cell immunoglobulin-like receptor, two domains, long cytoplasmic tail, 4
  ENST ID: ENST00000622322
  CDS Start-End: 12-704
gaagctgcaccatgtccatgtcacccacggtcatcatcctggcatgtcttgggttcttcttggaccagagtgtgtgggcacacgtgggtctatatgagaaaccttcgcttacagcccggccgggccccacggttcgcacaggagagaacgtgaccttgtcctgcagctcccagagctcctttgacatctaccatctatccagggagggggaagcccatgaacttaggctccctgcagtgcccagcatcaatggaacattccaggccgacttccctctgggtcctgccacccacggagagacctacagatgcttcggctctttccatggatctccctacgagtggtcagacgcgagtgacccactgcctgtttctgtcacagatgctgctgtaatgaaccaagagcctgcgggacacagaacagtgaacagggaggactctgatgaacaagaccctcaggaggtgacatacgcacagttggatcactgcattttcacacagagaaaaatcactggcccttctcagaggagcaagagaccctcaacagataccagcgtgtgtatagaacttccaaatgctgagcccagagcgttgtctcctgcccatgagcaccacagtcaggccttgatgggatcttctagggagacaacagccctgtctcaaacccagcttgccagctctaatgtaccagcagctggaatctgaaggcgtgagtc

SEQ ID NO: 146385 - DNA, 1189 bp, Homo sapiens
  Payload ID: 8979
  Gene Symbol: KIR2DL4
  Gene Name: killer cell immunoglobulin-like receptor, two domains, long cytoplasmic tail, 4
  ENST ID: ENST00000612879
  CDS Start-End: 47-784
tcgagccgagtcactgcgtcctggcagcagaagctgcaccatgtccatgtcacccacggtcatcatcctggcatgtcttgggttcttcttggaccagagtgtgtgggcacacgtgggtctatatgagaaaccttcgcttacagcccggccgggccccacggttcgcgcaggagagaacgtgaccttgtcctgcagctcccagagctcctttgacatctaccatctatccagggaaggggaagcccatgaacttaggctccctgcagtgcccagcatcaatggaacattccaggccgacttccctctgggtcctgccacccacggagagacctacagatgcttcggctctttccatggatctccctacgagtggtcagacccgagtgacccactgcctgtttctgtcacaggaaacccttctagtagttggccttcacccactgaaccaagcttcaaaactgatgctgctgtaatgaaccaagagcctgcgggacacagaacagtgaacagggaggactctgatgaacaagaccctcaggaggtgacatacgcacagttggatcactgcattttcacacagagaaaaatcactggcccttctcagaggagcaagagaccctcaacagataccagcgtgtgtatagaacttccaaatgctgagcccagagcgttgtctcctgcccatgagcaccacagtcaggccttgatgggatcttctagggagacaacagccctgtctcaaacccagcttgccagctctaatgtaccagcagctggaatctgaaggcgtgagtctccatcttagagcatcactcttcctcacaccacaaatctggtgcctgtctcttgcttaccaatgtctaaggtccccactgcctgctgcagagaaaacacactcctttgcttagcccacaattctctatttcacttgacccctgcccacctctccaacctaactggcttacttcctagtctacttgaggctgcaatcacactgaggaactcacaattccaaacatacaagaggctctctcttaacacggcacttagacacgtgctgttccaccttccctcgtgctgttccacctttcctcagactatttttcagccttctggcatcagcaaaccttataaaatttttttgatttcagtgtagttctctcctcttcaaataaacatgtctgccttc

SEQ ID NO: 146386 - DNA, 1536 bp, Homo sapiens
  Payload ID: 8979
  Gene Symbol: KIR2DL4
  Gene Name: killer cell immunoglobulin-like receptor, two domains, long cytoplasmic tail, 4
  Uniprot ID: Q99706
  ENST ID: ENST00000620484
  CDS Start-End: 1-1134
atgtccatgtcacccacggtcatcatcctggcatgtcttgggttcttcttggaccagagtgtgtgggcacacgtgggtggtcaggacaagcccttctgctctgcctggcccagcgctgtggtgcctcaaggaggacacgtgactcttcggtgtcactatcgtcgtgggtttaacatcttcacgctgtacaagaaagatggggtccctgtccctgagctctacaacagaatattctggaacagtttcctcattagccctgtgaccccagcacacgcagggacctacagatgtcgaggttttcacccgcactcccccactgagtggtcggcacccagcaaccccctggtgatcatggtcacaggtctatatgagaaaccttcgcttacagcccggccgggccccacggttcgcacaggagagaacgtgaccttgtcctgcagctcccagagctcctttgacatctaccatctatccagggagggggaagcccatgaacttaggctccctgcagtgcccagcatcaatggaacattccaggccgacttccctctgggtcctgccacccacggagagacctacagatgcttcggctctttccatggatctccctacgagtggtcagacgcgagtgacccactgcctgtttctgtcacaggaaacccttctagtagttggccttcacccactgaaccaagcttcaaaactggtatcgccagacacctgcatgctgtgattaggtactcagtggccatcatcctcttcaccatccttcccttctttctccttcatcgctggtgctccaaaaaaaaaaatgctgctgtaatgaaccaagagcctgcgggacacagaacagtgaacagggaggactctgatgaacaagaccctcaggaggtgacatacgcacagttggatcactgcattttcacacagagaaaaatcactggcccttctcagaggagcaagagaccctcaacagataccagcgtgtgtatagaacttccaaatgctgagcccagagcgttgtctcctgcccatgagcaccacagtcaggccttgatgggatcttctagggagacaacagccctgtctcaaacccagcttgccagctctaatgtaccagcagctggaatctgaaggcgtgagtctccatcttagagcatcactcttcctcacaccacaaatctggtgcctgtctcttgcttaccaatgtctaaggtccccactgcctgctgcagagaaaacacactcctttgcttagcccacaattctctatttcacttgacccctgcccacctctccaacctaactggcttacttcctagtctacttgaggctgcaatcacactgaggaactcacaattccaaacatacaagaggctctctcttaagacggcacttagacacgtgctgttccaccttccctcgtgctgttccacctttcctcagactatttttcagccttctggcatcagcaaaccttataaaatttttttgatttcagtgtagttctctcctcttcaaataaacatgtctgcc

SEQ ID NO: 146387 - DNA, 1596 bp, Homo sapiens
  Payload ID: 8979
  Gene Symbol: KIR2DL4
  Gene Name: killer cell immunoglobulin-like receptor, two domains, long cytoplasmic tail, 4
  ENST ID: ENST00000618648
  CDS Start-End: 1-1194
atgtcgctcatggtcgtcagcatggcgtgtgttgggttcttcttggaccagagtgtgtgggcacacgtgggtggtcaggacaagcccttctgctctgcctggcccagcgctgtggtgcctcaaggaggacacgtgactcttcggtgtcactgtcgtcgtgggtttaacatcttcacgctgtacaagaaagatggggtccctgtccctgagctctacaacagaatattctggaacagtttcctcattagccctgtgaccccagcacacgcagggacctacagatgtcgaggttttcacccgcactcccccactgagtggtcggcacccagcaaccccctggtgatcatggtcacaggtctatatgagaaaccttcgcttacagcccggccgggccccacggttcgcgcaggagagaacgtgaccttgtcctgcagctcccagagctcctttgacatctaccatctatccagggagggggaagcccatgaacttaggctccctgcagtgcccagcatcaatggaacattccaggccgacttccctctgggtcctgccacccacggagagacctacagatgcttcggctctttccatggatctccctacgagtggtcagacccgagtgacccactgcctgtttctgtcacaggaaacccttctagtagttggccttcacccactgaaccaagcttcaaaactggtatcgccagacacctgcatgctgtgattaggtactcagtggccatcatcctcttcaccatccttcccttctttctccttcatcgctggtgctccaaaaaaaaagtaagcctcacgaagcagaggccagagaactcagggccctgtgcggaagcaggatgggagcacgcagatgctgctgtaatgaaccaagagcctgcgggacacagaacagtgaacagggaggactctgatgaacaagaccctcaggaggtgacatacgcacagttggatcactgcattttcacacagagaaaaatcactggcccttctcagaggagcaagagaccctcaacagataccagcgtgtgtatagaacttccaaatgctgagcccagagcgttgtctcctgcccatgagcaccacagtcaggccttgatgggatcttctagggagacaacagccctgtctcaaacccagcttgccagctctaatgtaccagcagctggaatctgaaggcgtgagtctccatcttagagcatcactcttcctcacaccacaaatctggtgcctgtctcttgcttaccaatgtctaaggtccccactgcctgctgcagagaaaacacactcctttgcttagcccacaattctctatttcacttgacccctgcccacctctccaacctaactggcttacttcctagtctacttgaggctgcaatcacactgaggaactcacaattccaaacatacaagaggctctctcttaacacggcacttagacacgtgctgttccaccttccctcgtgctgttccacctttcctcagactatttttcagccttctggcatcagcaaaccttataaaatttttttgatttcagtgtagttctctcctcttcaaataaacatgtctgcc

SEQ ID NO: 146388 - DNA, 1656 bp, Homo sapiens; identical to SEQ ID NO: 146379
  Payload ID: 8979
  Gene Symbol: KIR2DL4
  Gene Name: killer cell immunoglobulin-like receptor, two domains, long cytoplasmic tail, 4
  ENST ID: ENST00000619946
  CDS Start-End: 1-1251

SEQ ID NO: 146389 - DNA, 1346 bp, Homo sapiens
  Payload ID: 8979
  Gene Symbol: KIR2DL4
  Gene Name: killer cell immunoglobulin-like receptor, two domains, long cytoplasmic tail, 4
  Uniprot ID: Q99706
  ENST ID: ENST00000618297
  CDS Start-End: 19-1152
ggcagcagaagctgcaccatgtccatgtcacccacggtcatcatcctggcatgtcttgggttcttcttggaccagagtgtgtgggcacacgtgggtggtcaggacaagcccttctgctctgcctggcccagcgctgtggtgcctcaaggaggacacgtgactcttcggtgtcactatcgtcgtgggtttaacatcttcacgctgtacaagaaagatggggtccctgtccctgagctctacaacagaatattctggaacagtttcctcattagccctgtgaccccagcacacgcagggacctacagatgtcgaggttttcacccgcactcccccactgagtggtcggcacccagcaaccccctggtgatcatggtcacaggtctatatgagaaaccttcgcttacagcccggccgggccccacggttcgcacaggagagaacgtgaccttgtcctgcagctcccagagctcctttgacatctaccatctatccagggagggggaagcccatgaacttaggctccctgcagtgcccagcatcaatggaacattccaggccgacttccctctgggtcctgccacccacggagagacctacagatgcttcggctctttccatggatctccctacgagtggtcagacgcgagtgacccactgcctgtttctgtcacaggaaacccttctagtagttggccttcacccactgaaccaagcttcaaaactggtatcgccagacacctgcatgctgtgattaggtactcagtggccatcatcctcttcaccatccttcccttctttctccttcatcgctggtgctccaaaaaaaaaaatgctgctgtaatgaaccaagagcctgcgggacacagaacagtgaacagggaggactctgatgaacaagaccctcaggaggtgacatacgcacagttggatcactgcattttcacacagagaaaaatcactggcccttctcagaggagcaagagaccctcaacagataccagcgtgtgtatagaacttccaaatgctgagcccagagcgttgtctcctgcccatgagcaccacagtcaggccttgatgggatcttctagggagacaacagccctgtctcaaacccagcttgccagctctaatgtaccagcagctggaatctgaaggcgtgagtctccatcttagagcatcactcttcctcacaccacaaatctggtgcctgtctcttgcttaccaatgtctaaggtccccactgcctgctgcagagaaaacacactcctttgcttagcccacaattctctatttcacttgacccctgcccacctctccaacctaactggcttacttcctagtctact

SEQ ID NO: 146390 - DNA, 1730 bp, Homo sapiens
  Payload ID: 8979
  Gene Symbol: KIR2DL4
  Gene Name: killer cell immunoglobulin-like receptor, two domains, long cytoplasmic tail, 4
  Uniprot ID: Q99706
  ENST ID: ENST00000615970
  CDS Start-End: 191-1324
ttttcagaaaccctcattcctcccttgactgactcaccacttgaacctcatatgacgtagaagaagcctacctatgtccccttcacatgttgtggtcaatgtgtcaactgcacgatccgggcccctcaccacatcctctgcaccggtcagtcgagccgagtcactgcgtcctggcagcagaagctgcaccatgtccatgtcacccacggtcatcatcctggcatgtcttgggttcttcttggaccagagtgtgtgggcacacgtgggtggtcaggacaagcccttctgctctgcctggcccagcgctgtggtgcctcaaggaggacacgtgactcttcggtgtcactatcgtcgtgggtttaacatcttcacgctgtacaagaaagatggggtccctgtccctgagctctacaacagaatattctggaacagtttcctcattagccctgtgaccccagcacacgcagggacctacagatgtcgaggttttcacccgcactcccccactgagtggtcggcacccagcaaccccctggtgatcatggtcacaggtctatatgagaaaccttcgcttacagcccggccgggccccacggttcgcacaggagagaacgtgaccttgtcctgcagctcccagagctcctttgacatctaccatctatccagggagggggaagcccatgaacttaggctccctgcagtgcccagcatcaatggaacattccaggccgacttccctctgggtcctgccacccacggagagacctacagatgcttcggctctttccatggatctccctacgagtggtcagacgcgagtgacccactgcctgtttctgtcacaggaaacccttctagtagttggccttcacccactgaaccaagcttcaaaactggtatcgccagacacctgcatgctgtgattaggtactcagtggccatcatcctcttcaccatccttcccttctttctccttcatcgctggtgctccaaaaaaaaaaatgctgctgtaatgaaccaagagcctgcgggacacagaacagtgaacagggaggactctgatgaacaagaccctcaggaggtgacatacgcacagttggatcactgcattttcacacagagaaaaatcactggcccttctcagaggagcaagagaccctcaacagataccagcgtgtgtatagaacttccaaatgctgagcccagagcgttatctcctgcccatgagcaccacagtcaggccttgatgggatcttctagggagacaacagccctgtctcaaacccagcttgccagctctaatgtaccagcagctggaatctgaaggcgtgagtctccatcttagagcatcactcttcctcacaccacaaatctggtgcctgtctcttgcttaccaatgtctaaggtccccactgcctgctgcagagaaaacacactcctttgcttagcccacaattctctatttcacttgacccctgcccacctctccaacctaactggcttacttcctagtctacttgaggctgcaatcacactgaggaactcacaattccaaacatacaagaggctctctattaacacggcacttagacacgtgctgttccaccttccctcgtgctgttccacctttcctcagactatttttcagccttctggcatcagcaaaccttataaaatttttttgatttcagtgtagttctctcctcttcaaataaacatgtctgccttca

SEQ ID NO: 146391 - DNA, 1443 bp, Homo sapiens
  Payload ID: 8979
  Gene Symbol: KIR2DL4
  Gene Name: killer cell immunoglobulin-like receptor, two domains, long cytoplasmic tail, 4
  Uniprot ID: Q99706
  ENST ID: ENST00000614680
  CDS Start-End: 13-1041
agaagctgcaccatgtccatgtcacccacggtcatcatcctggcatgtcttgggttcttcttggaccagagtgtgtgggcacacgtgggtggtcaggacaagcccttctgctctgcctggcccagcgctgtggtgcctcaaggaggacacgtgactcttcggtgtcactatcgtcgtgggtttaacatcttcacgctgtacaagaaagatggggtccctgtccctgagctctacaacagaatattctggaacagtttcctcattagccctgtgaccccagcacacgcagggacctacagatgtcgaggttttcacccgcactcccccactgagtggtcggcacccagcaaccccctggtgatcatggtcacaggtctatatgagaaaccttcgcttacagcccggccgggccccacggttcgcgcaggagagaacgtgaccttgtcctgcagctcccagagctcctttgacatctaccatctatccagggaaggggaagcccatgaacttaggctccctgcagtgcccagcatcaatggaacattccaggccgacttccctctgggtcctgccacccacggagagacctacagatgcttcggctctttccatggatctccctacgagtggtcagacccgagtgacccactgcctgtttctgtcacaggaaacccttctagtagttggccttcacccactgaaccaagcttcaaaactgatgctgctgtaatgaaccaagagcctgcgggacacagaacagtgaacagggaggactctgatgaacaagaccctcaggaggtgacatacgcacagttggatcactgcattttcacacagagaaaaatcactggcccttctcagaggagcaagagaccctcaacagataccagcgtgtgtatagaacttccaaatgctgagcccagagcgttgtctcctgcccatgagcaccacagtcaggccttgatgggatcttctagggagacaacagccctgtctcaaacccagcttgccagctctaatgtaccagcagctggaatctgaaggcgtgagtctccatcttagagcatcactcttcctcacaccacaaatctggtgcctgtctcttgcttaccaatgtctaaggtccccactgcctgctgcagagaaaacacactcctttgcttagcccacaattctctatttcacttgacccctgcccacctctccaacctaactggcttacttcctagtctacttgaggctgcaatcacactgaggaactcacaattccaaacatacaagaggctctctcttaacacggcacttagacacgtgctgttccaccttccctcgtgctgttccacctttcctcagactatttttcagccttctggcatcagcaaaccttataaaatttttttgatttcagtgtagttctctcctcttcaaataaacatgtctgcc

SEQ ID NO: 146392 - DNA, 1447 bp, Homo sapiens
  Payload ID: 8979
  Gene Symbol: KIR2DL4
  Gene Name: killer cell immunoglobulin-like receptor, two domains, long cytoplasmic tail, 4
  ENST ID: ENST00000615139
  CDS Start-End: 13-1041
agaagctgcaccatgtccatgtcacccacggtcatcatcctggcatgtcttgggttcttcttggaccagagtgtgtgggcacacgtgggtggtcaggacaagcccttctgctctgcctggcccagcgctgtggtgcctcaaggaggacacgtgactcttcggtgtcactatcgtcgtgggtttaacatcttcacgctgtacaagaaagatggggtccctgtccctgagctctacaacagaatattctggaacagtttcctcattagccctgtgaccccagcacacgcagggacctacagatgtcgaggttttcacccgcactcccccactgagtggtcggcacccagcaaccccctggtgatcatggtcacaggtctatatgagaaaccttcgcttacagcccggccgggccccacggttcgcacaggagagaacgtgaccttgtcctgcagctcccagagctcctttgacatctaccatctatccagggagggggaagcccatgaacttaggctccctgcagtgcccagcatcaatggaacattccaggccgacttccctctgggtcctgccacccacggagagacctacagatgcttcggctctttccatggatctccctacgagtggtcagacgcgagtgacccactgcctgtttctgtcacaggaaacccttctagtagttggccttcacccactgaaccaagcttcaaaactgatgctgctgtaatgaaccaagagcctgcgggacacagaacagtgaacagggaggactctgatgaacaagaccctcaggaggtgacatacgcacagttggatcactgcattttcacacagagaaaaatcactggcccttctcagaggagcaagagaccctcaacagataccagcgtgtgtatagaacttccaaatgctgagcccagagcgttgtctcctgcccatgagcaccacagtcaggccttgatgggatcttctagggagacaacagccctgtctcaaacccagcttgccagctctaatgtaccagcagctggaatctgaaggcgtgagtctccatcttagagcatcactcttcctcacaccacaaatctggtgcctgtctcttgcttaccaatgtctaaggtccccactgcctgctgcagagaaaacacactcctttgcttagcccacaattctctatttcacttgacccctgcccacctctccaacctaactggcttacttcctagtctacttgaggctgcaatcacactgaggaactcacaattccaaacatacaagaggctctctcttaacacggcacttagacacgtgctgttccaccttccctcgtgctgttccacctttcctcagactatttttcagccttctggcatcagcaaaccttataaaatttttttgatttcagtgtagttctctcctcttcaaataaacatgtctgccttca

SEQ ID NO: 146393 - DNA, 1580 bp, Homo sapiens
  Payload ID: 8979
  Gene Symbol: KIR2DL4
  Gene Name: killer cell immunoglobulin-like receptor, two domains, long cytoplasmic tail, 4
  ENST ID: ENST00000621031
  CDS Start-End: 42-863
gtcgagccgagtcactgcgtcctggcagcagaagctgcaccatgtccatgtcacccacggtcatcatcctggcatgtcttgggttcttcttggaccagagtgtgtgggcacacgtgggtggtcaggacaagcccttctgctctgcctggcccagcgctgtggtgcctcaaggaggacacgtgactcttcggtgtcactgtcgtcgtgggtttaacatcttcacgctgtacaagaaagatggggtccctgtccctgagctctacaacagaatattctggaacagtttcctcattagccctgtgaccccagcacacgcagggacctacagatgtcgaggttttcacccgcactcccccactgagtggtcggcacccagcaaccccctggtgatcatggtcacaggtctatatgagaaaccttcgcttacagcccggccgggccccacggttcgcgcaggagagaacgtgaccttgtcctgcagctcccagagctcctttgacatctaccatctatccagggagggggaagcccatgaacttaggctccctgcagtgcccagcatcaatggaacattccaggccgacttccctctgggtcctgccacccacggagagacctacagatgcttcggctctttccatggatctccctacgagtggtcagacccgagtgacccactgcctgtttctgtcacaggaaacccttctagtagttggccttcacccactgaaccaagcttcaaaactggtatcgccagacacctgcatgctgtgattaggtactcagtggccatcatcctctttaccatccttcccttctttctccttcatcgctggtgctccaaaaaaaaaatgctgctgtaatgaaccaagagcctgcgggacacagaacagtgaacagggaggactctgatgaacaagaccctcaggaggtgacatacgcacagttggatcactgcattttcacacagagaaaaatcactggcccttctcagaggagcaagagaccctcaacagataccagcgtgtgtatagaacttccaaatgctgagcccagagcgttgtctcctgcccatgagcaccacagtcaggccttgatgggatcttctagggagacaacagccctgtctcaaacccagcttgccagctctaatgtaccagcagctggaatctgaaggcgtgagtctccatcttagagcatcactcttcctcacaccacaaatctggtgcctgtctcttgcttaccaatgtctaaggtccccactgcctgctgcagagaaaacacactcctttgcttagcccacaattctctatttcacttgacccctgcccacctctccaacctaactggcttacttcctagtctacttgaggctgcaatcacactgaggaactcacaattccaaacatacaagaggctctctcttaacacggcacttagacacgtgctgttccaccttccctcgtgctgttccacctttcctcagactatttttcagccttctggcatcagcaaaccttataaaatttttttgatttcagtgtagttctctcctcttcaaataaacatgtctgccttca

SEQ ID NO: 146394 - DNA, 1022 bp, Homo sapiens
  Payload ID: 8979
  Gene Symbol: KIR2DL4
  Gene Name: killer cell immunoglobulin-like receptor, two domains, long cytoplasmic tail, 4
  ENST ID: ENST00000622255
  CDS Start-End: 1-740
ccatgtcacccacggtcatcatcctggcatgtcttgggttcttcttggaccagagtgtgtgggcacacgtgggtctatatgagaaaccttcgcttacagcccggccgggccccacggttcgcacaggagagaacgtgaccttgtcctgcagctcccagagctcctttgacatctaccatctatccagggagggggaagcccatgaacttaggctccctgcagtgcccagcatcaatggaacattccaggccgacttccctctgggtcctgccacccacggagagacctacagatgcttcggctctttccatggatctccctacgagtggtcagacgcgagtgacccactgcctgtttctgtcacaggaaacccttctagtagttggccttcacccactgaaccaagcttcaaaactgatgctgctgtaatgaaccaagagcctgcgggacacagaacagtgaacagggaggactctgatgaacaagaccctcaggaggtgacatacgcacagttggatcactgcattttcacacagagaaaaatcactggcccttctcagaggagcaagagaccctcaacagataccagcgtgtgtatagaacttccaaatgctgagcccagagcgttgtctcctgcccatgagcaccacagtcaggccttgatgggatcttctagggagacaacagccctgtctcaaacccagcttgccagctctaatgtaccagcagctggaatctgaaggcgtgagtctccatcttagagcatcactcttcctcacaccacaaatctggtgcctgtctcttgcttaccaatgtctaaggtccccactgcctgctgcagagaaaacacactcctttgcttagcccacaattctctatttcacttgacccctgcccacctctccaacctaactggcttacttcctagtctacttgaggctgcaatcacactgaggaactcacaattccaaacatacaagaggctctctcttaagacggcacttagacacgtgctgttccac

SEQ ID NO: 146395 - DNA, 1536 bp, Homo sapiens
  Payload ID: 8979
  Gene Symbol: KIR2DL4
  Gene Name: killer cell immunoglobulin-like receptor, two domains, long cytoplasmic tail, 4
  Uniprot ID: Q99706
  ENST ID: ENST00000614653
  CDS Start-End: 1-1134
atgtccatgtcacccacggtcatcatcctggcatgtcttgggttcttcttggaccagagtgtgtgggcacacgtgggtggtcaggacaagcccttctgctctgcctggcccagcgctgtggtgcctcaaggaggacacgtgactcttcggtgtcactatcgtcgtgggtttaacatcttcacgctgtacaagaaagatggggtccctgtccctgagctctacaacagaatattctggaacagtttcctcattagccctgtgaccccagcacacgcagggacctacagatgtcgaggttttcacccgcactcccccactgagtggtcggcacccagcaaccccctggtgatcatggtcacaggtctatatgagaaaccttcgcttacagcccggccgggccccacggttcgcacaggagagaacgtgaccttgtcctgcagctcccagagctcctttgacatctaccatctatccagggagggggaagcccatgaacttaggctccctgcagtgcccagcatcaatggaacattccaggccgacttccctctgggtcctgccacccacggagagacctacagatgcttcggctctttccatggatctccctacgagtggtcagacgcgagtgacccactgcctgtttctgtcacaggaaacccttctagtagttggccttcacccactgaaccaagcttcaaaactggtatcgccagacacctgcatgctgtgattaggtactcagtggccatcatcctcttcaccatccttcccttctttctccttcatcgctggtgctccaaaaaaaaaaatgctgctgtaatgaaccaagagcctgcgggacacagaacagtgaacagggaggactctgatgaacaagaccctcaggaggtgacatacgcacagttggatcactgcattttcacacagagaaaaatcactggcccttctcagaggagcaagagaccctcaacagataccagcgtgtgtatagaacttccaaatgctgagcccagagcgttgtctcctgcccatgagcaccacagtcaggccttgatgggatcttctagggagacaacagccctgtctcaaacccagcttgccagctctaatgtaccagcagctggaatctgaaggcgtgagtctccatcttagagcatcactcttcctcacaccacaaatctggtgcctctctcttgcttaccaatgtctaaggtccccactgcctgctgcagagaaaacacactcctttgcttagcccacaattctctatttcacttgacccctgcccacctctccaacctaactggcttacttcctagtctacttgaggctgcaatcacactgaggaactcacaattccaaacatacaagaggctctctcttaacacggcacttagacacgtgctgttccaccttccctcgtgctgttccacctttcctcagactatttttcagccttctggcatcagcaaaccttataaaatttttttgatttcagtgtagttctctcctcttcaaataaacatgtctgcc

SEQ ID NO: 146396 - DNA, 1581 bp, Homo sapiens
  Payload ID: 8979
  Gene Symbol: KIR2DL4
  Gene Name: killer cell immunoglobulin-like receptor, two domains, long cytoplasmic tail, 4
  Uniprot ID: Q99706
  ENST ID: ENST00000619637
  CDS Start-End: 42-1175
gtcgagccgagtcactgcgtcctggcagcagaagctgcaccatgtccatgtcacccacggtcatcatcctggcatgtcttgggttcttcttggaccagagtgtgtgggcacacgtgggtggtcaggacaagcccttctgctctgcctggcccagcgctgtggtgcctcaaggaggacacgtgactcttcggtgtcactatcgtcgtgggtttaacatcttcacgctgtacaagaaagatggggtccctgtccctgagctctacaacagaatattctggaacagtttcctcattagccctgtgaccccagcacacgcagggacctacagatgtcgaggttttcacccgcactcccccactgagtggtcggcacccagcaaccccctggtgatcatggtcacaggtctatatgagaaaccttcgcttacagcccggccgggccccacggttcgcacaggagagaacgtgaccttgtcctgcagctcccagagctcctttgacatctaccatctatccagggagggggaagcccatgaacttaggctccctgcagtgcccagcatcaatggaacattccaggccgacttccctctgggtcctgccacccacggagagacctacagatgcttcggctctttccatggatctccctacgagtggtcagacgcgagtgacccactgcctgtttctgtcacaggaaacccttctagtagttggccttcacccactgaaccaagcttcaaaactggtatcgccagacacctgcatgctgtgattaggtactcagtggccatcatcctcttcaccatccttcccttctttctccttcatcgctggtgctccaaaaaaaaaaatgctgctgtaatgaaccaagagcctgcgggacacagaacagtgaacagggaggactctgatgaacaagaccctcaggaggtgacatacgcacagttggatcactgcattttcacacagagaaaaatcactggcccttctcagaggagcaagagaccctcaacagataccagcgtgtgtatagaacttccaaatgctgagcccagagcgttgtctcctgcccatgagcaccacagtcaggccttgatgggatcttctagggagacaacagccctgtctcaaacccagcttgccagctctaatgtaccagcagctggaatctgaaggcgtgagtctccatcttagagcatcactcttcctcacaccacaaatctggtgcctgtctcttgcttaccaatgtctaaggtccccactgcctgctgcagagaaaacacactcctttgcttagcccacaattctctatttcacttgacccctgcccacctctccaacctaactggcttacttcctagtctacttgaggctgcaatcacactgaggaactcacaattccaaacatacaagaggctctctcttaacacggcacttagacacgtgctgttccaccttccctcgtgctgttccacctttcctcagactatttttcagccttctggcatcagcaaaccttataaaatttttttgatttcagtgtagttctctcctcttcaaataaacatgtctgccttca

SEQ ID NO: 146397 - DNA, 1548 bp, Homo sapiens
  Payload ID: 8979
  Gene Symbol: KIR2DL4
  Gene Name: killer cell immunoglobulin-like receptor, two domains, long cytoplasmic tail, 4
  ENST ID: ENST00000620007
  CDS Start-End: 13-1146
agaagctgcaccatgtccatgtcacccacggtcatcatcctggcatgtcttgggttcttcttggaccagagtgtgtgggcacacgtgggtggtcaggacaagcccttctgctctgcctggcccagcgctgtggtgcctcaaggaggacacgtgactcttcggtgtcactgtcgtcgtgggtttaacatcttcacgctgtacaagaaagatggggtccctgtccctgagctctacaacagaatattctggaacagtttcctcattagccctgtgaccccagcacacgcagggacctacagatgtcgaggttttcacccgcactcccccactgagtggtcggcacccagcaaccccctggtgatcatggtcacaggtctatatgagaaaccttcgcttacagcccggccgggccccacggttcgcgcaggagagaacgtgaccttgtcctgcagctcccagagctcctttgacatctaccatctatccagggagggggaagcccatgaacttaggctccctgcagtgcccagcatcaatggaacattccaggccgacttccctctgggtcctgccacccacggagagacctacagatgcttcggctctttccatggatctccctacgagtggtcagacccgagtgacccactgcctgtttctgtcacaggaaacccttctagtagttggccttcacccactgaaccaagcttcaaaactggtatcgccagacacctgcatgctgtgattaggtactcagtggccatcatcctcttcaccatccttcccttctttctccttcatcgctggtgctccaaaaaaaaaaatgctgctgtaatgaaccaagagcctgcgggacacagaacagtgaacagggaggactctgatgaacaagaccctcaggaggtgacatacgcacagttggatcactgcattttcacacagagaaaaatcactggcccttctcagaggagcaagagaccctcaacagataccagcgtgtgtatagaacttccaaatgctgagcccagagcgttgtctcctgcccatgagcaccacagtcaggccttgatgggatcttctagggagacaacagccctgtctcaaacccagcttgccagctctaatgtaccagcagctggaatctgaaggcgtgagtctccatcttagagcatcactcttcctcacaccacaaatctggtgcctgtctcttgcttaccaatgtctaaggtccccactgcctgctgcagagaaaacacactcctttgcttagcccacaattctctatttcacttgacccctgcccacctctccaacctaactggcttacttcctagtctacttgaggctgcaatcacactgaggaactcacaattccaaacatacaagaggctctctcttaacacggcacttagacacgtgctgttccaccttccctcgtgctgttccacctttcctcagactatttttcagccttctggcatcagcaaaccttataaaatttttttgatttcagtgtagttctctcctcttcaaataaacatgtctgcc

SEQ ID NO: 146398 - DNA, 1145 bp, Homo sapiens
  Payload ID: 8979
  Gene Symbol: KIR2DL4
  Gene Name: killer cell immunoglobulin-like receptor, two domains, long cytoplasmic tail, 4
  ENST ID: ENST00000622882
  CDS Start-End: 1-1134
atgtccatgtcacccacggtcatcatcctggcatgtcttgggttcttcttggaccagagtgtgtgggcacacgtgggtggtcaggacaagcccttctgctctgcctggcccagcgctgtggtgcctcaaggaggacacgtgactcttcggtgtcactgtcgtcgtgggtttaacatcttcacgctgtacaagaaagatggggtccctgtccctgagctctacaacagaatattctggaacagtttcctcattagccctgtgaccccagcacacgcagggacctacagatgtcgaggttttcacccgcactcccccactgagtggtcggcacccagcaaccccctggtgatcatggtcacaggtctatatgagaaaccttcgcttacagcccggccgggccccacggttcgcgcaggagagaacgtgaccttgtcctgcagctcccagagctcctttgacatctaccatctatccagggagggggaagcccatgaacttaggctccctgcagtgcccagcatcaatggaacattccaggccgacttccctctgggtcctgccacccacggagagacctacagatgcttcggctctttccatggatctccctacgagtggtcagacccgagtgacccactgcctgtttctgtcacaggaaacccttctagtagttggccttcacccactgaaccaagcttcaaaactggtatcgccagacacctgcatgctgtgattaggtactcagtggccatcatcctcttcaccatccttcccttctttctccttcatcgctggtgctccaaaaaaaaaaatgctgctgtaatgaaccaagagcctgcgggacacagaacagtgaacagggaggactctgatgaacaagaccctcaggaggtgacatacgcacagttggatcactgcattttcacacagagaaaaatcactggcccttctcagaggagcaagagaccctcaacagataccagcgtgtgtatagaacttccaaatgctgagcccagagcgttgtctcctgcccatgagcaccacagtcaggccttgatgggatcttctagggagacaacagccctgtctcaaacccagcttgccagctctaatgtaccagcagctggaatctgaaggcgtgagtc

SEQ ID NO: 146399 - DNA, 1637 bp, Homo sapiens
  Payload ID: 8979
  Gene Symbol: KIR2DL4
  Gene Name: killer cell immunoglobulin-like receptor, two domains, long cytoplasmic tail, 4
  ENST ID: ENST00000622365
  CDS Start-End: 203-1231
tctagtctgcagttttcagaaaccctcattcctcccttgactgattcaccacttgaacctcatatgacgtagaagaagcctacctatgtccccttcacatgttgtggtcaatgtgtcaactgcacgatccgggcccctcaccacatcctctgcaccggtcagtcgagccgagtcactgcgtcctggcagcagaagctgcaccatgtccatgtcacccacggtcatcatcctggcatgtcttgggttcttcttggaccagagtgtgtgggcacacgtgggtggtcaggacaagcccttctgctctgcctggcccagcgctgtggtgcctcaaggaggacacgtgactcttcggtgtcactgtcgtcgtgggtttaacatcttcacgctgtacaagaaagatggggtccctgtccctgagctctacaacagaatattctggaacagtttcctcattagccctgtgaccccagcacacgcagggacctacagatgtcgaggttttcacccgcactcccccactgagtggtcggcacccagcaaccccctggtgatcatggtcacaggtctatatgagaaaccttcgcttacagcccggccgggccccacggttcgcgcaggagagaacgtgaccttgtcctgcagctcccagagctcctttgacatctaccatctatccagggagggggaagcccatgaacttaggctccctgcagtgcccagcatcaatggaacattccaggccgacttccctctgggtcctgccacccacggagagacctacagatgcttcggctctttccatggatctccctacgagtggtcagacccgagtgacccactgcctgtttctgtcacaggaaacccttctagtagttggccttcacccactgaaccaagcttcaaaactgatgctgctgtaatgaaccaagagcctgcgggacacagaacagtgaacagggaggactctgatgaacaagaccctcaggaggtgacatacgcacagttggatcactgcattttcacacagagaaaaatcactggcccttctcagaggagcaagagaccctcaacagataccagcgtgtgtatagaacttccaaatgctgagcccagagcgttgtctcctgcccatgagcaccacagtcaggccttgatgggatcttctagggagacaacagccctgtctcaaacccagcttgccagctctaatgtaccagcagctggaatctgaaggcgtgagtctccatcttagagcatcactcttcctcacaccacaaatctggtgcctgtctcttgcttaccaatgtctaaggtccccactgcctgctgcagagaaaacacactcctttgcttagcccacaattctctatttcacttgacccctgcccacctctccaacctaactggcttacttcctagtctacttgaggctgcaatcacactgaggaactcacaattccaaacatacaagaggctctctcttaacacggcacttagacacgtgctgttccaccttccctcgtgctgttccacctttcctcagactatttttcagccttctggcatcagcaaaccttataaaatttttttgatttcagtgtagttctctcctcttcaaataaacatgtctgccttca

SEQ ID NO: 146400 - DNA, 1792 bp, Homo sapiens
  Payload ID: 8979
  Gene Symbol: KIR2DL4
  Gene Name: killer cell immunoglobulin-like receptor, two domains, long cytoplasmic tail, 4
  ENST ID: ENST00000615396
  CDS Start-End: 191-1390
ttttcagaaaccctcattcctcccttgactgattcaccacttgaacctcatatgacgtagaagaagcctacctatgtccccttcacatgttgtggtcaatgtgtcaactgcacgatccgggcccctcaccacatcctctgcaccggtcagtcgagccgagtcactgcgtcctggcagcagaagctgcaccatgtccatgtcacccacggtcatcatcctggcatgtcttgggttcttcttggaccagagtgtgtgggcacacgtgggtggtcaggacaagcccttctgctctgcctggcccagcgctgtggtgcctcaaggaggacacgtgactcttcggtgtcactatcgtcgtgggtttaacatcttcacgctgtacaagaaagatggggtccctgtccctgagctctacaacagaatattctggaacagtttcctcattagccctgtgaccccagcacacgcagggacctacagatgtcgaggttttcacccgcactcccccactgagtggtcggcacccagcaaccccctggtgatcatggtcacaggtctatatgagaaaccttcgcttacagcccggccgggccccacggttcgcgcaggagagaacgtgaccttgtcctgcagctcccagagctcctttgacatctaccatctatccagggaaggggaagcccatgaacttaggctccctgcagtgcccagcatcaatggaacattccaggccgacttccctctgggtcctgccacccacggagagacctacagatgcttcggctctttccatggatctccctacgagtggtcagacccgagtgacccactgcctgtttctgtcacaggaaacccttctagtagttggccttcacccactgaaccaagcttcaaaactggtatcgccagacacctgcatgctgtgattaggtactcagtggccatcatcctctttaccatccttcccttctttctccttcatcgctggtgctccaaaaaaaaagtaagcctcacgaagcagaggccagagaactcagggccctgtgcggaagcaggatgggagcacgcagatgctgctgtaatgaaccaagagcctgcgggacacagaacagtgaacagggaggactctgatgaacaagaccctcaggaggtgacatacgcacagttggatcactgcattttcacacagagaaaaatcactggcccttctcagaggagcaagagaccctcaacagataccagcgtgtgtatagaacttccaaatgctgagcccagagcgttgtctcctgcccatgagcaccacagtcaggccttgatgggatcttctagggagacaacagccctgtctcaaacccagcttgccagctctaatgtaccagcagctggaatctgaaggcgtgagtctccatcttagagcatcactcttcctcacaccacaaatctggtgcctgtctcttgcttaccaatgtctaaggtccccactgcctgctgcagagaaaacacactcctttgcttagcccacaattctctatttcacttgacccctgcccacctctccaacctaactggcttacttcctagtctacttgaggctgcaatcacactgaggaactcacaattccaaacatacaagaggctctctcttaacacggcacttagacacgtgctgttccaccttccctcgtgctgttccacctttcctcagactatttttcagccttctggcatcagcaaaccttataaaatttttttgatttcagtgtagttctctcctcttcaaataaacatgtctgcc

SEQ ID NO: 146401 - DNA, 1566 bp, Homo sapiens
  Payload ID: 8979
  Gene Symbol: KIR2DL4
  Gene Name: killer cell immunoglobulin-like receptor, two domains, long cytoplasmic tail, 4
  ENST ID: ENST00000618607
  CDS Start-End: 28-849
ctgcgtcctggcagcagaagctgcaccatgtccatgtcacccacggtcatcatcctggcatgtcttgggttcttcttggaccagagtgtgtgggcacacgtgggtggtcaggacaagcccttctgctctgcctggcccagcgctgtggtgcctcaaggaggacacgtgactcttcggtgtcactatcgtcgtgggtttaacatcttcacgctgtacaagaaagatggggtccctgtccctgagctctacaacagaatattctggaacagtttcctcattagccctgtgaccccagcacacgcagggacctacagatgtcgaggttttcacccgcactcccccactgagtggtcggcacccagcaaccccctggtgatcatggtcacaggtctatatgagaaaccttcgcttacagcccggccgggccccacggttcgcgcaggagagaacgtgaccttgtcctgcagctcccagagctcctttgacatctaccatctatccagggagggggaagcccatgaacttaggctccctgcagtgcccagcatcaatggaacattccaggccgacttccctctgggtcctgccacccacggagagacctacagatgcttcggctctttccatggatctccctacgagtggtcagacccgagtgacccactgcctgtttctgtcacaggaaacccttctagtagttggccttcacccactgaaccaagcttcaaaactggtatcgccagacacctgcatgctgtgattaggtactcagtggccatcatcctctttaccatccttcccttctttctccttcatcgctggtgctccaaaaaaaaaatgctgctgtaatgaaccaagagcctgcgggacacagaacagtgaacagggaggactctgatgaacaagaccctcaggaggtgacatacgcacagttggatcactgcattttcacacagagaaaaatcactggcccttctcagaggagcaagagaccctcaacagataccagcgtgtgtatagaacttccaaatgctgagcccagagcgttgtctcctgcccatgagcaccacagtcaggccttgatgggatcttctagggagacaacagccctgtctcaaacccagcttgccagctctaatgtaccagcagctggaatctgaaggcgtgagtctccatcttagagcatcactcttcctcacaccacaaatctggtgcctgtctcttgcttaccaatgtctaaggtccccactgcctgctgcagagaaaacacactcctttgcttagcccacaattctctatttcacttgacccctgcccacctctccaacctaactggcttacttcctagtctacttgaggctgcaatcacactgaggaactcacaattccaaacatacaagaggctctctcttaacacggcacttagacacgtgctgttccaccttccctcgtgctgttccacctttcctcagactatttttcagccttctggcatcagcaaaccttataaaatttttttgatttcagtgtagttctctcctcttcaaataaacatgtctgccttca

SEQ ID NO: 146402 - DNA, 1191 bp, Homo sapiens
  Payload ID: 8979
  Gene Symbol: KIR2DL4
  Gene Name: killer cell immunoglobulin-like receptor, two domains, long cytoplasmic tail, 4
  ENST ID: ENST00000614619
  CDS Start-End: 203-1141
tctagtctgcagttttcagaaaccctcattcctcccttgactgattcaccacttgaacctcatatgacgtagaagaagcctacctatgtccccttcacatgttgtggtcaatgtgtcaactgcacgatccgggcccctcaccacatcctctgcaccggtcagtcgagccgagtcactgcgtcctggcagcagaagctgcaccatgtccatgtcacccacggtcatcatcctggcatgtcttgggttcttcttggaccagagtgtgtgggcacacgtgggtggtcaggacaagcccttctgctctgcctggcccagcgctgtggtgcctcaaggaggacacgtgactcttcggtgtcactatcgtcgtgggtttaacatcttcacgctgtacaagaaagatggggtccctgtccctgagctctacaacagaatattctggaacagtttcctcattagccctgtgaccccagcacacgcagggacctacagatgtcgaggttttcacccgcactcccccactgagtggtcggcacccagcaaccccctggtgatcatggtcacaggtctatatgagaaaccttcgcttacagcccggctgggccccacggttcgcgcaggagagaacgtgaccttgtcctgcagctcccagagctcctttgacatctaccatctatccagggagggggaagcccatgaacttaggctccctgcagtgcccagcatcaatggaacattccaggccgacttccctctgggtcctgccacccacggagagacctacagatgcttcggctctttccatggatctccctacgagtggtcagacccgagtgacccactgcctgtttctgtcacaggaaacccttctagtagttggccttcacccactgaaccaagcttcaaaactggtatcgccagacacctgcatgctgtgattaggtactcagtggccatcatcctcttcaccatccttcccttctttctccttcatcgctggtgctccaaaaaaaaaagtaagcctcacgaagcagaggccagagaactcagggccctgtgcggaagcaggatgggagcacgcagatgctgctgtaatgaaccaagagcctgcgggacacagaacagtgaacagggaggactctgatgaacaagaccctcaggaggtgacatacgcacagttggatcactgcattt

SEQ ID NO: 146403 - DNA, 1474 bp, Homo sapiens
  Payload ID: 8979
  Gene Symbol: KIR2DL4
  Gene Name: killer cell immunoglobulin-like receptor, two domains, long cytoplasmic tail, 4
  Uniprot ID: Q99706
  ENST ID: ENST00000621182
  CDS Start-End: 41-1069
tcgagccgagtcactgcgtcctggcagcagaagctgcaccatgtccatgtcacccacggtcatcatcctggcatgtcttgggttcttcttggaccagagtgtgtgggcacacgtgggtggtcaggacaagcccttctgctctgcctggcccagcgctgtggtgcctcaaggaggacacgtgactcttcggtgtcactatcgtcgtgggtttaacatcttcacgctgtacaagaaagatggggtccctgtccctgagctctacaacagaatattctggaacagtttcctcattagccctgtgaccccagcacacgcagggacctacagatgtcgaggttttcacccgcactcccccactgagtggtcggcacccagcaaccccctggtgatcatggtcacaggtctatatgagaaaccttcgcttacagcccggccgggccccacggttcgcgcaggagagaacgtgaccttgtcctgcagctcccagagctcctttgacatctaccatctatccagggagggggaagcccatgaacttaggctccctgcagtgcccagcatcaatggaacattccaggccgacttccctctgggtcctgccacccacggagagacctacagatgcttcggctctttccatggatctccctacgagtggtcagacccgagtgacccactgcctgtttctgtcacaggaaacccttctagtagttggccttcacccactgaaccaagcttcaaaactgatgctgctgtaatgaaccaagagcctgcgggacacagaacagtgaacagggaggactctgatgaacaagaccctcaggaggtgacatacgcacagttggatcactgcattttcacacagagaaaaatcactggcccttctcagaggagcaagagaccctcaacagataccagcgtgtgtatagaacttccaaatgctgagcccagagcgttgtctcctgcccatgagcaccacagtcaggccttgatgggatcttctagggagacaacagccctgtctcaaacccagcttgccagctctaatgtaccagcagctggaatctgaaggcgtgagtctccatcttagagcatcactcttcctcacaccacaaatctggtgcctgtctcttgcttaccaatgtctaaggtccccactgcctgctgcagagaaaacacactcctttgcttagcccacaattctctatttcacttgacccctgcccacctctccaacctaactggcttacttcctagtctacttgaggctgcaatcacactgaggaactcacaattccaaacatacaagaggctctctcttaacacggcacttagacacgtgctgttccaccttccctcgtgctgttccacctttcctcagactatttttcagccttctggcatcagcaaaccttataaaatttttttgatttcagtgtagttctctcctcttcaaataaacatgtctgccttc

SEQ ID NO: 146404 - DNA, 1497 bp, Homo sapiens
  Payload ID: 8979
  Gene Symbol: KIR2DL4
  Gene Name: killer cell immunoglobulin-like receptor, two domains, long cytoplasmic tail, 4
  Uniprot ID: Q99706
  ENST ID: ENST00000612660
  CDS Start-End: 13-1095
agaagctgcaccatgtccatgtcacccacggtcatcatcctggcatgtcttgggttcttcttggaccagagtgtgtgggcacacgtgggtggtcaggacaagcccttctgctctgcctggcccagcgctgtggtgcctcaaggaggacacgtgactcttcggtgtcactatcgtcgtgggtttaacatcttcacgctgtacaagaaagatggggtccctgtccctgagctctacaacagaatattctggaacagtttcctcattagccctgtgaccccagcacacgcagggacctacagatgtcgaggttttcacccgcactcccccactgagtggtcggcacccagcaaccccctggtgatcatggtcacaggtctatatgagaaaccttcgcttacagcccggccgggccccacggttcgcacaggagagaacgtgaccttgtcctgcagctcccagagctcctttgacatctaccatctatccagggagggggaagcccatgaacttaggctccctgcagtgcccagcatcaatggaacattccaggccgacttccctctgggtcctgccacccacggagagacctacagatgcttcggctctttccatggatctccctacgagtggtcagacgcgagtgacccactgcctgtttctgtcacaggtatcgccagacacctgcatgctgtgattaggtactcagtggccatcatcctcttcaccatccttcccttctttctccttcatcgctggtgctccaaaaaaaaaaatgctgctgtaatgaaccaagagcctgcgggacacagaacagtgaacagggaggactctgatgaacaagaccctcaggaggtgacatacgcacagttggatcactgcattttcacacagagaaaaatcactggcccttctcagaggagcaagagaccctcaacagataccagcgtgtgtatagaacttccaaatgctgagcccagagcgttgtctcctgcccatgagcaccacagtcaggccttgatgggatcttctagggagacaacagccctgtctcaaacccagcttgccagctctaatgtaccagcagctggaatctgaaggcgtgagtctccatcttagagcatcactcttcctcacaccacaaatctggtgcctgtctcttgcttaccaatgtctaaggtccccactgcctgctgcagagaaaacacactcctttgcttagcccacaattctctatttcacttgacccctgcccacctctccaacctaactggcttacttcctagtctacttgaggctgcaatcacactgaggaactcacaattccaaacatacaagaggctctctcttaagacggcacttagacacgtgctgttccaccttccctcgtgctgttccacctttcctcagactatttttcagccttctggcatcagcaaaccttataaaatttttttgatttcagtgtagttctctcctcttcaaataaacatgtctgcc

SEQ ID NO: 146405 - DNA, 1581 bp, Homo sapiens
  Payload ID: 8979
  Gene Symbol: KIR2DL4
  Gene Name: killer cell immunoglobulin-like receptor, two domains, long cytoplasmic tail, 4
  ENST ID: ENST00000619868
  CDS Start-End: 42-1175
gtcgagccgagtcactgcgtcctggcagcagaagctgcaccatgtccatgtcacccacggtcatcatcctggcatgtcttgggttcttcttggaccagagtgtgtgggcacacgtgggtggtcaggacaagcccttctgctctgcctggcccagcgctgtggtgcctcaaggaggacacgtgactcttcggtgtcactgtcgtcgtgggtttaacatcttcacgctgtacaagaaagatggggtccctgtccctgagctctacaacagaatattctggaacagtttcctcattagccctgtgaccccagcacacgcagggacctacagatgtcgaggttttcacccgcactcccccactgagtggtcggcacccagcaaccccctggtgatcatggtcacaggtctatatgagaaaccttcgcttacagcccggccgggccccacggttcgcgcaggagagaacgtgaccttgtcctgcagctcccagagctcctttgacatctaccatctatccagggagggggaagcccatgaacttaggctccctgcagtgcccagcatcaatggaacattccaggccgacttccctctgggtcctgccacccacggagagacctacagatgcttcggctctttccatggatctccctacgagtggtcagacccgagtgacccactgcctgtttctgtcacaggaaacccttctagtagttggccttcacccactgaaccaagcttcaaaactggtatcgccagacacctgcatgctgtgattaggtactcagtggccatcatcctcttcaccatccttcccttctttctccttcatcgctggtgctccaaaaaaaaaaatgctgctgtaatgaaccaagagcctgcgggacacagaacagtgaacagggaggactctgatgaacaagaccctcaggaggtgacatacgcacagttggatcactgcattttcacacagagaaaaatcactggcccttctcagaggagcaagagaccctcaacagataccagcgtgtgtatagaacttccaaatgctgagcccagagcgttgtctcctgcccatgagcaccacagtcaggccttgatgggatcttctagggagacaacagccctgtctcaaacccagcttgccagctctaatgtaccagcagctggaatctgaaggcgtgagtctccatcttagagcatcactcttcctcacaccacaaatctggtgcctgtctcttgcttaccaatgtctaaggtccccactgcctgctgcagagaaaacacactcctttgcttagcccacaattctctatttcacttgacccctgcccacctctccaacctaactggcttacttcctagtctacttgaggctgcaatcacactgaggaactcacaattccaaacatacaagaggctctctcttaacacggcacttagacacgtgctgttccaccttccctcgtgctgttccacctttcctcagactatttttcagccttctggcatcagcaaaccttataaaatttttttgatttcagtgtagttctctcctcttcaaataaacatgtctgccttca

SEQ ID NO: 146406 - DNA, 1637 bp, Homo sapiens; identical to SEQ ID NO: 146399
  Payload ID: 8979
  Gene Symbol: KIR2DL4
  Gene Name: killer cell immunoglobulin-like receptor, two domains, long cytoplasmic tail, 4
  ENST ID: ENST00000614599
  CDS Start-End: 203-1231

SEQ ID NO: 146407 - DNA, 1474 bp, Homo sapiens
  Payload ID: 8979
  Gene Symbol: KIR2DL4
  Gene Name: killer cell immunoglobulin-like receptor, two domains, long cytoplasmic tail, 4
  Uniprot ID: Q99706
  ENST ID: ENST00000616384
  CDS Start-End: 41-1069
tcgagccgagtcactgcgtcctggcagcagaagctgcaccatgtccatgtcacccacggtcatcatcctggcatgtcttgggttcttcttggaccagagtgtgtgggcacacgtgggtggtcaggacaagcccttctgctctgcctggcccagcgctgtggtgcctcaaggaggacacgtgactcttcggtgtcactatcgtcgtgggtttaacatcttcacgctgtacaagaaagatggggtccctgtccctgagctctacaacagaatattctggaacagtttcctcattagccctgtgaccccagcacacgcagggacctacagatgtcgaggttttcacccgcactcccccactgagtggtcggcacccagcaaccccctggtgatcatggtcacaggtctatatgagaaaccttcgcttacagcccggccgggccccacggttcgcgcaggagagaacgtgaccttgtcctgcagctcccagagctcctttgacatctaccatctatccagggaaggggaagcccatgaacttaggctccctgcagtgcccagcatcaatggaacattccaggccgacttccctctgggtcctgccacccacggagagacctacagatgcttcggctctttccatggatctccctacgagtggtcagacccgagtgacccactgcctgtttctgtcacaggaaacccttctagtagttggccttcacccactgaaccaagcttcaaaactgatgctgctgtaatgaaccaagagcctgcgggacacagaacagtgaacagggaggactctgatgaacaagaccctcaggaggtgacatacgcacagttggatcactgcattttcacacagagaaaaatcactggcccttctcagaggagcaagagaccctcaacagataccagcgtgtgtatagaacttccaaatgctgagcccagagcgttgtctcctgcccatgagcaccacagtcaggccttgatgggatcttctagggagacaacagccctgtctcaaacccagcttgccagctctaatgtaccagcagctggaatctgaaggcgtgagtctccatcttagagcatcactcttcctcacaccacaaatctggtgcctgtctcttgcttaccaatgtctaaggtccccactgcctgctgcagagaaaacacactcctttgcttagcccacaattctctatttcacttgacccctgcccacctctccaacctaactggcttacttcctagtctacttgaggctgcaatcacactgaggaactcacaattccaaacatacaagaggctctctcttaacacggcacttagacacgtgctgttccaccttccctcgtgctgttccacctttcctcagactatttttcagccttctggcatcagcaaaccttataaaatttttttgatttcagtgtagttctctcctcttcaaataaacatgtctgccttc

SEQ ID NO: 146408 - DNA, 1392 bp, Homo sapiens
  Payload ID: 8979
  Gene Symbol: KIR2DL4
  Gene Name: killer cell immunoglobulin-like receptor, two domains, long cytoplasmic tail, 4
  ENST ID: ENST00000619882
  CDS Start-End: 13-990
agaagctgcaccatgtccatgtcacccacggtcatcatcctggcatgtcttgggttcttcttggaccagagtgtgtgggcacacgtgggtggtcaggacaagcccttctgctctgcctggcccagcgctgtggtgcctcaaggaggacacgtgactcttcggtgtcactgtcgtcgtgggtttaacatcttcacgctgtacaagaaagatggggtccctgtccctgagctctacaacagaatattctggaacagtttcctcattagccctgtgaccccagcacacgcagggacctacagatgtcgaggttttcacccgcactcccccactgagtggtcggcacccagcaaccccctggtgatcatggtcacaggtctatatgagaaaccttcgcttacagcccggccgggccccacggttcgcgcaggagagaacgtgaccttgtcctgcagctcccagagctcctttgacatctaccatctatccagggagggggaagcccatgaacttaggctccctgcagtgcccagcatcaatggaacattccaggccgacttccctctgggtcctgccacccacggagagacctacagatgcttcggctctttccatggatctccctacgagtggtcagacccgagtgacccactgcctgtttctgtcacagatgctgctgtaatgaaccaagagcctgcgggacacagaacagtgaacagggaggactctgatgaacaagaccctcaggaggtgacatacgcacagttggatcactgcattttcacacagagaaaaatcactggcccttctcagaggagcaagagaccctcaacagataccagcgtgtgtatagaacttccaaatgctgagcccagagcgttgtctcctgcccatgagcaccacagtcaggccttgatgggatcttctagggagacaacagccctgtctcaaacccagcttgccagctctaatgtaccagcagctggaatctgaaggcgtgagtctccatcttagagcatcactcttcctcacaccacaaatctggtgcctgtctcttgcttaccaatgtctaaggtccccactgcctgctgcagagaaaacacactcctttgcttagcccacaattctctatttcacttgacccctgcccacctctccaacctaactggcttacttcctagtctacttgaggctgcaatcacactgaggaactcacaattccaaacatacaagaggctctctcttaacacggcacttagacacgtgctgttccaccttccctcgtgctgttccacctttcctcagactatttttcagccttctggcatcagcaaaccttataaaatttttttgatttcagtgtagttctctcctcttcaaataaacatgtctgcc

SEQ ID NO: 146409 - DNA, 715 bp, Homo sapiens; identical to SEQ ID NO: 146381
  Payload ID: 8979
  Gene Symbol: KIR2DL4
  Gene Name: killer cell immunoglobulin-like receptor, two domains, long cytoplasmic tail, 4
  Uniprot ID: Q99706
  ENST ID: ENST00000615232
  CDS Start-End: 12-704

SEQ ID NO: 146410 - DNA, 1443 bp, Homo sapiens
  Payload ID: 8979
  Gene Symbol: KIR2DL4
  Gene Name: killer cell immunoglobulin-like receptor, two domains, long cytoplasmic tail, 4
  ENST ID: ENST00000611437
  CDS Start-End: 13-1041
agaagctgcaccatgtccatgtcacccacggtcatcatcctggcatgtcttgggttcttcttggaccagagtgtgtgggcacacgtgggtggtcaggacaagcccttctgctctgcctggcccagcgctgtggtgcctcaaggaggacacgtgactcttcggtgtcactgtcgtcgtgggtttaacatcttcacgctgtacaagaaagatggggtccctgtccctgagctctacaacagaatattctggaacagtttcctcattagccctgtgaccccagcacacgcagggacctacagatgtcgaggttttcacccgcactcccccactgagtggtcggcacccagcaaccccctggtgatcatggtcacaggtctatatgagaaaccttcgcttacagcccggccgggccccacggttcgcgcaggagagaacgtgaccttgtcctgcagctcccagagctcctttgacatctaccatctatccagggagggggaagcccatgaacttaggctccctgcagtgcccagcatcaatggaacattccaggccgacttccctctgggtcctgccacccacggagagacctacagatgcttcggctctttccatggatctccctacgagtggtcagacccgagtgacccactgcctgtttctgtcacaggaaacccttctagtagttggccttcacccactgaaccaagcttcaaaactgatgctgctgtaatgaaccaagagcctgcgggacacagaacagtgaacagggaggactctgatgaacaagaccctcaggaggtgacatacgcacagttggatcactgcattttcacacagagaaaaatcactggcccttctcagaggagcaagagaccctcaacagataccagcgtgtgtatagaacttccaaatgctgagcccagagcgttgtctcctgcccatgagcaccacagtcaggccttgatgggatcttctagggagacaacagccctgtctcaaacccagcttgccagctctaatgtaccagcagctggaatctgaaggcgtgagtctccatcttagagcatcactcttcctcacaccacaaatctggtgcctgtctcttgcttaccaatgtctaaggtccccactgcctgctgcagagaaaacacactcctttgcttagcccacaattctctatttcacttgacccctgcccacctctccaacctaactggcttacttcctagtctacttgaggctgcaatcacactgaggaactcacaattccaaacatacaagaggctctctcttaacacggcacttagacacgtgctgttccaccttccctcgtgctgttccacctttcctcagactatttttcagccttctggcatcagcaaaccttataaaatttttttgatttcagtgtagttctctcctcttcaaataaacatgtctgcc

SEQ ID NO: 146411 - DNA, 1566 bp, Homo sapiens; identical to SEQ ID NO: 146401
  Payload ID: 8979
  Gene Symbol: KIR2DL4
  Gene Name: killer cell immunoglobulin-like receptor, two domains, long cytoplasmic tail, 4
  ENST ID: ENST00000622437
  CDS Start-End: 28-849

SEQ ID NO: 146412 - DNA, 1489 bp, Homo sapiens
  Payload ID: 8979
  Gene Symbol: KIR2DL4
  Gene Name: killer cell immunoglobulin-like receptor, two domains, long cytoplasmic tail, 4
  ENST ID: ENST00000621932
  CDS Start-End: 1-1083
atgtccatgtcacccacggtcatcatcctggcatgtcttgggttcttcttggaccagagtgtgtgggcacacgtgggtggtcaggacaagcccttctgctctgcctggcccagcgctgtggtgcctcaaggaggacacgtgactcttcggtgtcactatcgtcgtgggtttaacatcttcacgctgtacaagaaagatggggtccctgtccctgagctctacaacagaatattctggaacagtttcctcattagccctgtgaccccagcacacgcagggacctacagatgtcgaggttttcacccgcactcccccactgagtggtcggcacccagcaaccccctggtgatcatggtcacaggtctatatgagaaaccttcgcttacagcccggctgggccccacggttcgcgcaggagagaacgtgaccttgtcctgcagctcccagagctcctttgacatctaccatctatccagggagggggaagcccatgaacttaggctccctgcagtgcccagcatcaatggaacattccaggccgacttccctctgggtcctgccacccacggagagacctacagatgcttcggctctttccatggatctccctacgagtggtcagacccgagtgacccactgcctgtttctgtcacaggtatcgccagacacctgcatgctgtgattaggtactcagtggccatcatcctcttcaccatccttcccttctttctccttcatcgctggtgctccaaaaaaaaaaatgctgctgtaatgaaccaagagcctgcgggacacagaacagtgaacagggaggactctgatgaacaagaccctcaggaggtgacatacgcacagttggatcactgcattttcacacagagaaaaatcactggcccttctcagaggagcaagagaccctcaacagataccagcgtgtgtatagaacttccaaatgctgagcccagagcgttgtctcctgcccatgagcaccacagtcaggccttgatgggatcttctagggagacaacagccctgtctcaaacccagcttgccagctctaatgtaccagcagctggaatctgaaggcgtgagtctccatcttagagcatcactcttcctcacaccacaaatctggtgcctgtctcttgcttaccaatgtctaaggtccccactgcctgctgcagagaaaacacactcctttgcttagcccacaattctctatttcacttgacccctgcccacctctccaacctaactggcttacttcctagtctacttgaggctgcaatcacactgaggaactcacaattccaaacatacaagaggctctctcttaacacggcacttagacacgtgctgttccaccttccctcgtgctgttccacctttcctcagactatttttcagccttctggcatcagcaaaccttataaaatttttttgatttcagtgtagttctctcctcttcaaataaacatgtctgccttca

SEQ ID NO: 146413 - DNA, 1656 bp, Homo sapiens; identical to SEQ ID NO: 146379
  Payload ID: 8979
  Gene Symbol: KIR2DL4
  Gene Name: killer cell immunoglobulin-like receptor, two domains, long cytoplasmic tail, 4
  ENST ID: ENST00000621258
  CDS Start-End: 1-1251

SEQ ID NO: 146414 - DNA, 1637 bp, Homo sapiens; identical to SEQ ID NO: 146399
  Payload ID: 8979
  Gene Symbol: KIR2DL4
  Gene Name: killer cell immunoglobulin-like receptor, two domains, long cytoplasmic tail, 4
  ENST ID: ENST00000620369
  CDS Start-End: 203-1231

SEQ ID NO: 146415 - DNA, 1656 bp, Homo sapiens
  Payload ID: 8979
  Gene Symbol: KIR2DL4
  Gene Name: killer cell immunoglobulin-like receptor, two domains, long cytoplasmic tail, 4
  ENST ID: ENST00000613824
  CDS Start-End: 1-1251
atgtccccttcacatgttgtggtcaatgtgtcaactgcacgatccgggcccctcaccacatcctctgcaccggtcagtcgagccgagtcactgcgtcctggcagcagaagctgcaccatgtccatgtcacccacggtcatcatcctggcatgtcttgggttcttcttggaccagagtgtgtgggcacacgtgggtggtcaggacaagcccttctgctctgcctggcccagcgctgtggtgcctcaaggaggacacgtgactcttcggtgtcactgtcgtcgtgggtttaacatcttcacgctgtacaagaaagatggggtccctgtccctgagctctacaacagaatattctggaacagtttcctcattagccctgtgaccccagcacacgcagggacctacagatgtcgaggttttcacccgcactcccccactgagtggtcggcacccagcaaccccctggtgatcatggtcacaggtctatatgagaaaccttcgcttacagcccggccgggccccacggttcgcgcaggagagaacgtgaccttgtcctgcagctcccagagctcctttgacatctaccatctatccagggagggggaagcccatgaacttaggctccctgcagtgcccagcatcaatggaacattccaggccgacttccctctgggtcctgccacccacggagagacctacagatgcttcggctctttccatggatctccctacgagtggtcagacccgagtgacccactgcctgtttctgtcacaggaaacccttctagtagttggccttcacccactgaaccaagcttcaaaactggtatcgccagacacctgcatgctgtgattaggtactcagtggccatcatcctctttaccatccttcccttctttctccttcatcgctggtgctccaaaaaaaaagatgctgctgtaatgaaccaagagcctgcgggacacagaacagtgaacagggaggactctgatgaacaagaccctcaggaggtgacatacgcacagttggatcactgcattttcacacagagaaaaatcactggcccttctcagaggagcaagagaccctcaacagataccagcgtgtgtatagaacttccaaatgctgagcccagagcgttgtctcctgcccatgagcaccacagtcaggccttgatgggatcttctagggagacaacagccctgtctcaaacccagcttgccagctctaatgtaccagcagctggaatctgaaggcgtgagtctccatcttagagcatcactcttcctcacaccacaaatctggtgcctgtctcttgcttaccaatgtctaaggtccccactgcctgctgcagagaaaacacactcctttgcttagcccacaattctctatttcacttgacccctgcccacctctccaacctaactggcttacttcctagtctacttgaggctgcaatcacactgaggaactcacaattccaaacatacaagaggctctctcttaacacggcacttagacacgtgctgttccaccttccctcgtgctgttccacctttcctcagactatttttcagccttctggcatcagcaaaccttataaaatttttttgatttcagtgtagttctctcctcttcaaataaacatgtctgccttc

SEQ ID NO: 146416 - DNA, 1548 bp, Homo sapiens
  Payload ID: 8979
  Gene Symbol: KIR2DL4
  Gene Name: killer cell immunoglobulin-like receptor, two domains, long cytoplasmic tail, 4
  Uniprot ID: Q99706
  ENST ID: ENST00000619848
  CDS Start-End: 13-1146
agaagctgcaccatgtccatgtcacccacggtcatcatcctggcatgtcttgggttcttcttggaccagagtgtgtgggcacacgtgggtggtcaggacaagcccttctgctctgcctggcccagcgctgtggtgcctcaaggaggacacgtgactcttcggtgtcactatcgtcgtgggtttaacatcttcacgctgtacaagaaagatggggtccctgtccctgagctctacaacagaatattctggaacagtttcctcattagccctgtgaccccagcacacgcagggacctacagatgtcgaggttttcacccgcactcccccactgagtggtcggcacccagcaaccccctggtgatcatggtcacaggtctatatgagaaaccttcgcttacagcccggccgggccccacggttcgcacaggagagaacgtgaccttgtcctgcagctcccagagctcctttgacatctaccatctatccagggagggggaagcccatgaacttaggctccctgcagtgcccagcatcaatggaacattccaggccgacttccctctgggtcctgccacccacggagagacctacagatgcttcggctctttccatggatctccctacgagtggtcagacgcgagtgacccactgcctgtttctgtcacaggaaacccttctagtagttggccttcacccactgaaccaagcttcaaaactggtatcgccagacacctgcatgctgtgattaggtactcagtggccatcatcctcttcaccatccttcccttctttctccttcatcgctggtgctccaaaaaaaaaaatgctgctgtaatgaaccaagagcctgcgggacacagaacagtgaacagggaggactctgatgaacaagaccctcaggaggtgacatacgcacagttggatcactgcattttcacacagagaaaaatcactggcccttctcagaggagcaagagaccctcaacagataccagcgtgtgtatagaacttccaaatgctgagcccagagcgttatctcctgcccatgagcaccacagtcaggccttgatgggatcttctagggagacaacagccctgtctcaaacccagcttgccagctctaatgtaccagcagctggaatctgaaggcgtgagtctccatcttagagcatcactcttcctcacaccacaaatctggtgcctgtctcttgcttaccaatgtctaaggtccccactgcctgctgcagagaaaacacactcctttgcttagcccacaattctctatttcacttgacccctgcccacctctccaacctaactggcttacttcctagtctacttgaggctgcaatcacactgaggaactcacaattccaaacatacaagaggctctctattaacacggcacttagacacgtgctgttccaccttccctcgtgctgttccacctttcctcagactatttttcagccttctggcatcagcaaaccttataaaatttttttgatttcagtgtagttctctcctcttcaaataaacatgtctgcc

SEQ ID NO: 146417 - DNA, 1567 bp, Homo sapiens
  Payload ID: 8979
  Gene Symbol: KIR2DL4
  Gene Name: killer cell immunoglobulin-like receptor, two domains, long cytoplasmic tail, 4
  ENST ID: ENST00000614379
  CDS Start-End: 28-1161
ctgcgtcctggcagcagaagctgcaccatgtccatgtcacccacggtcatcatcctggcatgtcttgggttcttcttggaccagagtgtgtgggcacacgtgggtggtcaggacaagcccttctgctctgcctggcccagcgctgtggtgcctcaaggaggacacgtgactcttcggtgtcactatcgtcgtgggtttaacatcttcacgctgtacaagaaagatggggtccctgtccctgagctctacaacagaatattctggaacagtttcctcattagccctgtgaccccagcacacgcagggacctacagatgtcgaggttttcacccgcactcccccactgagtggtcggcacccagcaaccccctggtgatcatggtcacaggtctatatgagaaaccttcgcttacagcccggctgggccccacggttcgcgcaggagagaacgtgaccttgtcctgcagctcccagagctcctttgacatctaccatctatccagggagggggaagcccatgaacttaggctccctgcagtgcccagcatcaatggaacattccaggccgacttccctctgggtcctgccacccacggagagacctacagatgcttcggctctttccatggatctccctacgagtggtcagacccgagtgacccactgcctgtttctgtcacaggaaacccttctagtagttggccttcacccactgaaccaagcttcaaaactggtatcgccagacacctgcatgctgtgattaggtactcagtggccatcatcctcttcaccatccttcccttctttctccttcatcgctggtgctccaaaaaaaaaaatgctgctgtaatgaaccaagagcctgcgggacacagaacagtgaacagggaggactctgatgaacaagaccctcaggaggtgacatacgcacagttggatcactgcattttcacacagagaaaaatcactggcccttctcagaggagcaagagaccctcaacagataccagcgtgtgtatagaacttccaaatgctgagcccagagcgttgtctcctgcccatgagcaccacagtcaggccttgatgggatcttctagggagacaacagccctgtctcaaacccagcttgccagctctaatgtaccagcagctggaatctgaaggcgtgagtctccatcttagagcatcactcttcctcacaccacaaatctggtgcctgtctcttgcttaccaatgtctaaggtccccactgcctgctgcagagaaaacacactcctttgcttagcccacaattctctatttcacttgacccctgcccacctctccaacctaactggcttacttcctagtctacttgaggctgcaatcacactgaggaactcacaattccaaacatacaagaggctctctcttaacacggcacttagacacgtgctgttccaccttccctcgtgctgttccacctttcctcagactatttttcagccttctggcatcagcaaaccttataaaatttttttgatttcagtgtagttctctcctcttcaaataaacatgtctgccttca

SEQ ID NO: 146418 - DNA, 1575 bp, Homo sapiens
  Payload ID: 8979
  Gene Symbol: KIR2DL4
  Gene Name: killer cell immunoglobulin-like receptor, two domains, long cytoplasmic tail, 4
  ENST ID: ENST00000610911
  CDS Start-End: 33-854
agtcactgcgtcctggcagcagaagctgcaccatgtccatgtcacccacggtcatcatcctggcatgtcttgggttcttcttggaccagagtgtgtgggcacacgtgggtggtcaggacaagcccttctgctctgcctggcccagcgctgtggtgcctcaaggaggacacgtgactcttcggtgtcactgtcgtcgtgggtttaacatcttcacgctgtacaagaaagatggggtccctgtccctgagctctacaacagaatattctggaacagtttcctcattagccctgtgaccccagcacacgcagggacctacagatgtcgaggttttcacccgcactcccccactgagtggtcggcacccagcaaccccctggtgatcatggtcacaggtctatatgagaaaccttcgcttacagcccggccgggccccacggttcgcgcaggagagaacgtgaccttgtcctgcagctcccagagctcctttgacatctaccatctatccagggagggggaagcccatgaacttaggctccctgcagtgcccagcatcaatggaacattccaggccgacttccctctgggtcctgccacccacggagagacctacagatgcttcggctctttccatggatctccctacgagtggtcagacccgagtgacccactgcctgtttctgtcacaggaaacccttctagtagttggccttcacccactgaaccaagcttcaaaactggtatcgccagacacctgcatgctgtgattaggtactcagtggccatcatcctctttaccatccttcccttctttctccttcatcgctggtgctccaaaaaaaaaatgctgctgtaatgaaccaagagcctgcgggacacagaacagtgaacagggaggactctgatgaacaagaccctcaggaggtgacatacgcacagttggatcactgcattttcacacagagaaaaatcactggcccttctcagaggagcaagagaccctcaacagataccagcgtgtgtatagaacttccaaatgctgagcccagagcgttgtctcctgcccatgagcaccacagtcaggccttgatgggatcttctagggagacaacagccctgtctcaaacccagcttgccagctctaatgtaccagcagctggaatctgaaggcgtgagtctccatcttagagcatcactcttcctcacaccacaaatctggtgcctgtctcttgcttaccaatgtctaaggtccccactgcctgctgcagagaaaacacactcctttgcttagcccacaattctctatttcacttgacccctgcccacctctccaacctaactggcttacttcctagtctacttgaggctgcaatcacactgaggaactcacaattccaaacatacaagaggctctctcttaacacggcacttagacacgtgctgttccaccttccctcgtgctgttccacctttcctcagactatttttcagccttctggcatcagcaaaccttataaaatttttttgatttcagtgtagttctctcctcttcaaataaacatgtctgccttcattct

SEQ ID NO: 146419 - DNA, 1474 bp, Homo sapiens
  Payload ID: 8979
  Gene Symbol: KIR2DL4
  Gene Name: killer cell immunoglobulin-like receptor, two domains, long cytoplasmic tail, 4
  ENST ID: ENST00000618955
  CDS Start-End: 41-1069
tcgagccgagtcactgcgtcctggcagcagaagctgcaccatgtccatgtcacccacggtcatcatcctggcatgtcttgggttcttcttggaccagagtgtgtgggcacacgtgggtggtcaggacaagcccttctgctctgcctggcccagcgctgtggtgcctcaaggaggacacgtgactcttcggtgtcactatcgtcgtgggtttaacatcttcacgctgtacaagaaagatggggtccctgtccctgagctctacaacagaatattctggaacagtttcctcattagccctgtgaccccagcacacgcagggacctacagatgtcgaggttttcacccgcactcccccactgagtggtcggcacccagcaaccccctggtgatcatggtcacaggtctatatgagaaaccttcgcttacagcccggccgggccccacggttcgcacaggagagaacgtgaccttgtcctgcagctcccagagctcctttgacatctaccatctatccagggagggggaagcccatgaacttaggctccctgcagtgcccagcatcaatggaacattccaggccgacttccctctgggtcctgccacccacggagagacctacagatgcttcggctctttccatggatctccctacgagtggtcagacgcgagtgacccactgcctgtttctgtcacaggaaacccttctagtagttggccttcacccactgaaccaagcttcaaaactgatgctgctgtaatgaaccaagagcctgcgggacacagaacagtgaacagggaggactctgatgaacaagaccctcaggaggtgacatacgcacagttggatcactgcattttcacacagagaaaaatcactggcccttctcagaggagcaagagaccctcaacagataccagcgtgtgtatagaacttccaaatgctgagcccagagcgttgtctcctgcccatgagcaccacagtcaggccttgatgggatcttctagggagacaacagccctgtctcaaacccagcttgccagctctaatgtaccagcagctggaatctgaaggcgtgagtctccatcttagagcatcactcttcctcacaccacaaatctggtgcctgtctcttgcttaccaatgtctaaggtccccactgcctgctgcagagaaaacacactcctttgcttagcccacaattctctatttcacttgacccctgcccacctctccaacctaactggcttacttcctagtctacttgaggctgcaatcacactgaggaactcacaattccaaacatacaagaggctctctcttaacacggcacttagacacgtgctgttccaccttccctcgtgctgttccacctttcctcagactatttttcagccttctggcatcagcaaaccttataaaatttttttgatttcagtgtagttctctcctcttcaaataaacatgtctgccttc

SEQ ID NO: 146420 - DNA, 1742 bp, Homo sapiens
  Payload ID: 8979
  Gene Symbol: KIR2DL4
  Gene Name: killer cell immunoglobulin-like receptor, two domains, long cytoplasmic tail, 4
  ENST ID: ENST00000619802
  CDS Start-End: 203-1336
tctagtctgcagttttcagaaaccctcattcctcccttgactgactcaccacttgaacctcatatgacgtagaagaagcctacctatgtccccttcacatgttgtggtcaatgtgtcaactgcacgatccgggcccctcaccacatcctctgcaccggtcagtcgagccgagtcactgcgtcctggcagcagaagctgcaccatgtccatgtcacccacggtcatcatcctggcatgtcttgggttcttcttggaccagagtgtgtgggcacacgtgggtggtcaggacaagcccttctgctctgcctggcccagcgctgtggtgcctcaaggaggacacgtgactcttcggtgtcactatcgtcgtgggtttaacatcttcacgctgtacaagaaagatggggtccctgtccctgagctctacaacagaatattctggaacagtttcctcattagccctgtgaccccagcacacgcagggacctacagatgtcgaggttttcacccgcactcccccactgagtggtcggcacccagcaaccccctggtgatcatggtcacaggtctatatgagaaaccttcgcttacagcccggccgggccccacggttcgcacaggagagaacgtgaccttgtcctgcagctcccagagctcctttgacatctaccatctatccagggagggggaagcccatgaacttaggctccctgcagtgcccagcatcaatggaacattccaggccgacttccctctgggtcctgccacccacggagagacctacagatgcttcggctctttccatggatctccctacgagtggtcagacgcgagtgacccactgcctgtttctgtcacaggaaacccttctagtagttggccttcacccactgaaccaagcttcaaaactggtatcgccagacacctgcatgctgtgattaggtactcagtggccatcatcctcttcaccatccttcccttctttctccttcatcgctggtgctccaaaaaaaaaaatgctgctgtaatgaaccaagagcctgcgggacacagaacagtgaacagggaggactctgatgaacaagaccctcaggaggtgacatacgcacagttggatcactgcattttcacacagagaaaaatcactggcccttctcagaggagcaagagaccctcaacagataccagcgtgtgtatagaacttccaaatgctgagcccagagcgttgtctcctgcccatgagcaccacagtcaggccttgatgggatcttctagggagacaacagccctgtctcaaacccagcttgccagctctaatgtaccagcagctggaatctgaaggcgtgagtctccatcttagagcatcactcttcctcacaccacaaatctggtgcctgtctcttgcttaccaatgtctaaggtccccactgcctgctgcagagaaaacacactcctttgcttagcccacaattctctatttcacttgacccctgcccacctctccaacctaactggcttacttcctagtctacttgaggctgcaatcacactgaggaactcacaattccaaacatacaagaggctctctcttaacacggcacttagacacgtgctgttccaccttccctcgtgctgttccacctttcctcagactatttttcagccttctggcatcagcaaaccttataaaatttttttgatttcagtgtagttctctcctcttcaaataaacatgtctgccttca

SEQ ID NO: 146421 - DNA, 1637 bp, Homo sapiens; identical to SEQ ID NO: 146399
  Payload ID: 8979
  Gene Symbol: KIR2DL4
  Gene Name: killer cell immunoglobulin-like receptor, two domains, long cytoplasmic tail, 4
  ENST ID: ENST00000617052
  CDS Start-End: 203-1231

SEQ ID NO: 146422 - DNA, 1597 bp, Homo sapiens
  Payload ID: 8979
  Gene Symbol: KIR2DL4
  Gene Name: killer cell immunoglobulin-like receptor, two domains, long cytoplasmic tail, 4
  ENST ID: ENST00000619195
  CDS Start-End: 1-933
atgtcacccacggtcatcatcctggcatgtcttgggttcttcttggaccagagtgtgtgggcacacgtgggtggtcaggacaagcccttctgctctgcctggcccagcgctgtggtgcctcaaggaggacacgtgactcttcggtgtcactatcgtcgtgggtttaacatcttcacgctgtacaagaaagatggggtccctgtccctgagctctacaacagaatattctggaacagtttcctcattagccctgtgaccccagcacacgcagggacctacagatgtcgaggttttcacccgcactcccccactgagtggtcggcacccagcaaccccctggtgatcatggtcacaggtctatatgagaaaccttcgcttacagcccggccgggccccacggttcgcacaggagagaacgtgaccttgtcctgcagctcccagagctcctttgacatctaccatctatccagggagggggaagcccatgaacttaggctccctgcagtgcccagcatcaatggaacattccaggccgacttccctctgggtcctgccacccacggagagacctacagatgcttcggctctttccatggatctccctacgagtggtcagacgcgagtgacccactgcctgtttctgtcacaggaaacccttctagtagttggccttcacccactgaaccaagcttcaaaactggtatcgccagacacctgcatgctgtgattaggtactcagtggccatcatcctcttcaccatccttcccttctttctccttcatcgctggtgctccaaaaaaaaaagtaagcctcacgaagcagaggccagagaactcagggccctgtgcggaagcaggatgggagcacgcagatgctgctgtaatgaaccaagagcctgcgggacacagaacagtgaacagggaggactctgatgaacaagaccctcaggaggtgacatacgcacagttggatcactgcattttcacacagagaaaaatcactggcccttctcagaggagcaagagaccctcaacagataccagcgtgtgtatagaacttccaaatgctgagcccagagcgttgtctcctgcccatgagcaccacagtcaggccttgatgggatcttctagggagacaacagccctgtctcaaacccagcttgccagctctaatgtaccagcagctggaatctgaaggcgtgagtctccatcttagagcatcactcttcctcacaccacaaatctggtgcctgtctcttgcttaccaatgtctaaggtccccactgcctgctgcagagaaaacacactcctttgcttagcccacaattctctatttcacttgacccctgcccacctctccaacctaactggcttacttcctagtctacttgaggctgcaatcacactgaggaactcacaattccaaacatacaagaggctctctcttaagacggcacttagacacgtgctgttccaccttccctcgtgctgttccacctttcctcagactatttttcagccttctggcatcagcaaaccttataaaatttttttgatttcagtgtagttctctcctcttcaaataaacatgtctgcc

SEQ ID NO: 146423 - DNA, 1642 bp, Homo sapiens
  Payload ID: 8979
  Gene Symbol: KIR2DL4
  Gene Name: killer cell immunoglobulin-like receptor, two domains, long cytoplasmic tail, 4
  ENST ID: ENST00000619980
  CDS Start-End: 33-1232
agtcactgcgtcctggcagcagaagctgcaccatgtccatgtcacccacggtcatcatcctggcatgtcttgggttcttcttggaccagagtgtgtgggcacacgtgggtggtcaggacaagcccttctgctctgcctggcccagcgctgtggtgcctcaaggaggacacgtgactcttcggtgtcactgtcgtcgtgggtttaacatcttcacgctgtacaagaaagatggggtccctgtccctgagctctacaacagaatattctggaacagtttcctcattagccctgtgaccccagcacacgcagggacctacagatgtcgaggttttcacccgcactcccccactgagtggtcggcacccagcaaccccctggtgatcatggtcacaggtctatatgagaaaccttcgcttacagcccggccgggccccacggttcgcgcaggagagaacgtgaccttgtcctgcagctcccagagctcctttgacatctaccatctatccagggagggggaagcccatgaacttaggctccctgcagtgcccagcatcaatggaacattccaggccgacttccctctgggtcctgccacccacggagagacctacagatgcttcggctctttccatggatctccctacgagtggtcagacccgagtgacccactgcctgtttctgtcacaggaaacccttctagtagttggccttcacccactgaaccaagcttcaaaactggtatcgccagacacctgcatgctgtgattaggtactcagtggccatcatcctctttaccatccttcccttctttctccttcatcgctggtgctccaaaaaaaaagtaagcctcacgaagcagaggccagagaactcagggccctgtgcggaagcaggatgggagcacgcagatgctgctgtaatgaaccaagagcctgcgggacacagaacagtgaacagggaggactctgatgaacaagaccctcaggaggtgacatacgcacagttggatcactgcattttcacacagagaaaaatcactggcccttctcagaggagcaagagaccctcaacagataccagcgtgtgtatagaacttccaaatgctgagcccagagcgttgtctcctgcccatgagcaccacagtcaggccttgatgggatcttctagggagacaacagccctgtctcaaacccagcttgccagctctaatgtaccagcagctggaatctgaaggcgtgagtctccatcttagagcatcactcttcctcacaccacaaatctggtgcctgtctcttgcttaccaatgtctaaggtccccactgcctgctgcagagaaaacacactcctttgcttagcccacaattctctatttcacttgacccctgcccacctctccaacctaactggcttacttcctagtctacttgaggctgcaatcacactgaggaactcacaattccaaacatacaagaggctctctcttaacacggcacttagacacgtgctgttccaccttccctcgtgctgttccacctttcctcagactatttttcagccttctggcatcagcaaaccttataaaatttttttgatttcagtgtagttctctcctcttcaaataaacatgtctgccttcattct

SEQ ID NO: 146424 - DNA, 1265 bp, Homo sapiens
  Payload ID: 8979
  Gene Symbol: KIR2DL4
  Gene Name: killer cell immunoglobulin-like receptor, two domains, long cytoplasmic tail, 4
  ENST ID: ENST00000612389
  CDS Start-End: 277-1215
agttctgtttctttcctgcgttgatcttggacagtaactgtactatgtaaggaattgtcggtggctggcgacggtatcttagctggttttcagaaaccctcattcctcccttgactgattcaccacttgaacctcatatgacgtagaagaagcctacctatgtccccttcacatgttgtggtcaatgtgtcaactgcacgatccgggcccctcaccacatcctctgcaccggtcagtcgagccgagtcactgcgtcctggcagcagaagctgcaccatgtccatgtcacccacggtcatcatcctggcatgtcttgggttcttcttggaccagagtgtgtgggcacacgtgggtggtcaggacaagcccttctgctctgcctggcccagcgctgtggtgcctcaaggaggacacgtgactcttcggtgtcactgtcgtcgtgggtttaacatcttcacgctgtacaagaaagatggggtccctgtccctgagctctacaacagaatattctggaacagtttcctcattagccctgtgaccccagcacacgcagggacctacagatgtcgaggttttcacccgcactcccccactgagtggtcggcacccagcaaccccctggtgatcatggtcacaggtctatatgagaaaccttcgcttacagcccggccgggccccacggttcgcgcaggagagaacgtgaccttgtcctgcagctcccagagctcctttgacatctaccatctatccagggagggggaagcccatgaacttaggctccctgcagtgcccagcatcaatggaacattccaggccgacttccctctgggtcctgccacccacggagagacctacagatgcttcggctctttccatggatctccctacgagtggtcagacccgagtgacccactgcctgtttctgtcacaggaaacccttctagtagttggccttcacccactgaaccaagcttcaaaactggtatcgccagacacctgcatgctgtgattaggtactcagtggccatcatcctcttcaccatccttcccttctttctccttcatcgctggtgctccaaaaaaaaaagtaagcctcacgaagcagaggccagagaactcagggccctgtgcggaagcaggatgggagcacgcagatgctgctgtaatgaaccaagagcctgcgggacacagaacagtgaacagggaggactctgatgaacaagaccctcaggaggtgacatacgcacagttggatcactgcattt

SEQ ID NO: 146425 - DNA, 1656 bp, Homo sapiens; identical to SEQ ID NO: 146415
  Payload ID: 8979
  Gene Symbol: KIR2DL4
  Gene Name: killer cell immunoglobulin-like receptor, two domains, long cytoplasmic tail, 4
  ENST ID: ENST00000614427
  CDS Start-End: 1-1251

SEQ ID NO: 146426 - DNA, 1656 bp, Homo sapiens; identical to SEQ ID NO: 146415
  Payload ID: 8979
  Gene Symbol: KIR2DL4
  Gene Name: killer cell immunoglobulin-like receptor, two domains, long cytoplasmic tail, 4
  ENST ID: ENST00000618640
  CDS Start-End: 1-1251

SEQ ID NO: 146427 - DNA, 1189 bp, Homo sapiens
  Payload ID: 8979
  Gene Symbol: KIR2DL4
  Gene Name: killer cell immunoglobulin-like receptor, two domains, long cytoplasmic tail, 4
  ENST ID: ENST00000621773
  CDS Start-End: 47-784
tcgagccgagtcactgcgtcctggcagcagaagctgcaccatgtccatgtcacccacggtcatcatcctggcatgtcttgggttcttcttggaccagagtgtgtgggcacacgtgggtctatatgagaaaccttcgcttacagcccggccgggccccacggttcgcgcaggagagaacgtgaccttgtcctgcagctcccagagctcctttgacatctaccatctatccagggagggggaagcccatgaacttaggctccctgcagtgcccagcatcaatggaacattccaggccgacttccctctgggtcctgccacccacggagagacctacagatgcttcggctctttccatggatctccctacgagtggtcagacccgagtgacccactgcctgtttctgtcacaggaaacccttctagtagttggccttcacccactgaaccaagcttcaaaactgatgctgctgtaatgaaccaagagcctgcgggacacagaacagtgaacagggaggactctgatgaacaagaccctcaggaggtgacatacgcacagttggatcactgcattttcacacagagaaaaatcactggcccttctcagaggagcaagagaccctcaacagataccagcgtgtgtatagaacttccaaatgctgagcccagagcgttgtctcctgcccatgagcaccacagtcaggccttgatgggatcttctagggagacaacagccctgtctcaaacccagcttgccagctctaatgtaccagcagctggaatctgaaggcgtgagtctccatcttagagcatcactcttcctcacaccacaaatctggtgcctgtctcttgcttaccaatgtctaaggtccccactgcctgctgcagagaaaacacactcctttgcttagcccacaattctctatttcacttgacccctgcccacctctccaacctaactggcttacttcctagtctacttgaggctgcaatcacactgaggaactcacaattccaaacatacaagaggctctctcttaacacggcacttagacacgtgctgttccaccttccctcgtgctgttccacctttcctcagactatttttcagccttctggcatcagcaaaccttataaaatttttttgatttcagtgtagttctctcctcttcaaataaacatgtctgccttc

SEQ ID NO: 146428 - DNA, 1637 bp, Homo sapiens; identical to SEQ ID NO: 146399
  Payload ID: 8979
  Gene Symbol: KIR2DL4
  Gene Name: killer cell immunoglobulin-like receptor, two domains, long cytoplasmic tail, 4
  ENST ID: ENST00000620905
  CDS Start-End: 203-1231

SEQ ID NO: 146429 - DNA, 1539 bp, Homo sapiens
  Payload ID: 8979
  Gene Symbol: KIR2DL4
  Gene Name: killer cell immunoglobulin-like receptor, two domains, long cytoplasmic tail, 4
  Uniprot ID: Q99706
  ENST ID: ENST00000612573
  CDS Start-End: 1-1134
atgtccatgtcacccacggtcatcatcctggcatgtcttgggttcttcttggaccagagtgtgtgggcacacgtgggtggtcaggacaagcccttctgctctgcctggcccagcgctgtggtgcctcaaggaggacacgtgactcttcggtgtcactatcgtcgtgggtttaacatcttcacgctgtacaagaaagatggggtccctgtccctgagctctacaacagaatattctggaacagtttcctcattagccctgtgaccccagcacacgcagggacctacagatgtcgaggttttcacccgcactcccccactgagtggtcggcacccagcaaccccctggtgatcatggtcacaggtctatatgagaaaccttcgcttacagcccggccgggccccacggttcgcacaggagagaacgtgaccttgtcctgcagctcccagagctcctttgacatctaccatctatccagggagggggaagcccatgaacttaggctccctgcagtgcccagcatcaatggaacattccaggccgacttccctctgggtcctgccacccacggagagacctacagatgcttcggctctttccatggatctccctacgagtggtcagacgcgagtgacccactgcctgtttctgtcacaggaaacccttctagtagttggccttcacccactgaaccaagcttcaaaactggtatcgccagacacctgcatgctgtgattaggtactcagtggccatcatcctcttcaccatccttcccttctttctccttcatcgctggtgctccaaaaaaaaaaatgctgctgtaatgaaccaagagcctgcgggacacagaacagtgaacagggaggactctgatgaacaagaccctcaggaggtgacatacgcacagttggatcactgcattttcacacagagaaaaatcactggcccttctcagaggagcaagagaccctcaacagataccagcgtgtgtatagaacttccaaatgctgagcccagagcgttatctcctgcccatgagcaccacagtcaggccttgatgggatcttctagggagacaacagccctgtctcaaacccagcttgccagctctaatgtaccagcagctggaatctgaaggcgtgagtctccatcttagagcatcactcttcctcacaccacaaatctggtgcctgtctcttgcttaccaatgtctaaggtccccactgcctgctgcagagaaaacacactcctttgcttagcccacaattctctatttcacttgacccctgcccacctctccaacctaactggcttacttcctagtctacttgaggctgcaatcacactgaggaactcacaattccaaacatacaagaggctctctattaacacggcacttagacacgtgctgttccaccttccctcgtgctgttccacctttcctcagactatttttcagccttctggcatcagcaaaccttataaaatttttttgatttcagtgtagttctctcctcttcaaataaacatgtctgccttc

SEQ ID NO: 146430 - DNA, 1637 bp, Homo sapiens; identical to SEQ ID NO: 146399
  Payload ID: 8979
  Gene Symbol: KIR2DL4
  Gene Name: killer cell immunoglobulin-like receptor, two domains, long cytoplasmic tail, 4
  ENST ID: ENST00000620961
  CDS Start-End: 203-1231

SEQ ID NO: 146431 - DNA, 1581 bp, Homo sapiens; identical to SEQ ID NO: 146396
  Payload ID: 8979
  Gene Symbol: KIR2DL4
  Gene Name: killer cell immunoglobulin-like receptor, two domains, long cytoplasmic tail, 4
  Uniprot ID: Q99706
  ENST ID: ENST00000618567
  CDS Start-End: 42-1175

SEQ ID NO: 146432 - DNA, 1396 bp, Homo sapiens
  Payload ID: 8979
  Gene Symbol: KIR2DL4
  Gene Name: killer cell immunoglobulin-like receptor, two domains, long cytoplasmic tail, 4
  ENST ID: ENST00000612364
  CDS Start-End: 13-990
agaagctgcaccatgtccatgtcacccacggtcatcatcctggcatgtcttgggttcttcttggaccagagtgtgtgggcacacgtgggtggtcaggacaagcccttctgctctgcctggcccagcgctgtggtgcctcaaggaggacacgtgactcttcggtgtcactatcgtcgtgggtttaacatcttcacgctgtacaagaaagatggggtccctgtccctgagctctacaacagaatattctggaacagtttcctcattagccctgtgaccccagcacacgcagggacctacagatgtcgaggttttcacccgcactcccccactgagtggtcggcacccagcaaccccctggtgatcatggtcacaggtctatatgagaaaccttcgcttacagcccggccgggccccacggttcgcacaggagagaacgtgaccttgtcctgcagctcccagagctcctttgacatctaccatctatccagggagggggaagcccatgaacttaggctccctgcagtgcccagcatcaatggaacattccaggccgacttccctctgggtcctgccacccacggagagacctacagatgcttcggctctttccatggatctccctacgagtggtcagacgcgagtgacccactgcctgtttctgtcacagatgctgctgtaatgaaccaagagcctgcgggacacagaacagtgaacagggaggactctgatgaacaagaccctcaggaggtgacatacgcacagttggatcactgcattttcacacagagaaaaatcactggcccttctcagaggagcaagagaccctcaacagataccagcgtgtgtatagaacttccaaatgctgagcccagagcgttgtctcctgcccatgagcaccacagtcaggccttgatgggatcttctagggagacaacagccctgtctcaaacccagcttgccagctctaatgtaccagcagctggaatctgaaggcgtgagtctccatcttagagcatcactcttcctcacaccacaaatctggtgcctgtctcttgcttaccaatgtctaaggtccccactgcctgctgcagagaaaacacactcctttgcttagcccacaattctctatttcacttgacccctgcccacctctccaacctaactggcttacttcctagtctacttgaggctgcaatcacactgaggaactcacaattccaaacatacaagaggctctctcttaacacggcacttagacacgtgctgttccaccttccctcgtgctgttccacctttcctcagactatttttcagccttctggcatcagcaaaccttataaaatttttttgatttcagtgtagttctctcctcttcaaataaacatgtctgccttca

SEQ ID NO: 146433 - DNA, 1497 bp, Homo sapiens
  Payload ID: 8979
  Gene Symbol: KIR2DL4
  Gene Name: killer cell immunoglobulin-like receptor, two domains, long cytoplasmic tail, 4
  Uniprot ID: Q99706
  ENST ID: ENST00000620486
  CDS Start-End: 13-1095
agaagctgcaccatgtccatgtcacccacggtcatcatcctggcatgtcttgggttcttcttggaccagagtgtgtgggcacacgtgggtggtcaggacaagcccttctgctctgcctggcccagcgctgtggtgcctcaaggaggacacgtgactcttcggtgtcactatcgtcgtgggtttaacatcttcacgctgtacaagaaagatggggtccctgtccctgagctctacaacagaatattctggaacagtttcctcattagccctgtgaccccagcacacgcagggacctacagatgtcgaggttttcacccgcactcccccactgagtggtcggcacccagcaaccccctggtgatcatggtcacaggtctatatgagaaaccttcgcttacagcccggccgggccccacggttcgcacaggagagaacgtgaccttgtcctgcagctcccagagctcctttgacatctaccatctatccagggagggggaagcccatgaacttaggctccctgcagtgcccagcatcaatggaacattccaggccgacttccctctgggtcctgccacccacggagagacctacagatgcttcggctctttccatggatctccctacgagtggtcagacgcgagtgacccactgcctgtttctgtcacaggtatcgccagacacctgcatgctgtgattaggtactcagtggccatcatcctcttcaccatccttcccttctttctccttcatcgctggtgctccaaaaaaaaaaatgctgctgtaatgaaccaagagcctgcgggacacagaacagtgaacagggaggactctgatgaacaagaccctcaggaggtgacatacgcacagttggatcactgcattttcacacagagaaaaatcactggcccttctcagaggagcaagagaccctcaacagataccagcgtgtgtatagaacttccaaatgctgagcccagagcgttatctcctgcccatgagcaccacagtcaggccttgatgggatcttctagggagacaacagccctgtctcaaacccagcttgccagctctaatgtaccagcagctggaatctgaaggcgtgagtctccatcttagagcatcactcttcctcacaccacaaatctggtgcctgtctcttgcttaccaatgtctaaggtccccactgcctgctgcagagaaaacacactcctttgcttagcccacaattctctatttcacttgacccctgcccacctctccaacctaactggcttacttcctagtctacttgaggctgcaatcacactgaggaactcacaattccaaacatacaagaggctctctattaacacggcacttagacacgtgctgttccaccttccctcgtgctgttccacctttcctcagactatttttcagccttctggcatcagcaaaccttataaaatttttttgatttcagtgtagttctctcctcttcaaataaacatgtctgcc

SEQ ID NO: 146434 - DNA, 1392 bp, Homo sapiens
  Payload ID: 8979
  Gene Symbol: KIR2DL4
  Gene Name: killer cell immunoglobulin-like receptor, two domains, long cytoplasmic tail, 4
  Uniprot ID: Q99706
  ENST ID: ENST00000615243
  CDS Start-End: 13-990
agaagctgcaccatgtccatgtcacccacggtcatcatcctggcatgtcttgggttcttcttggaccagagtgtgtgggcacacgtgggtggtcaggacaagcccttctgctctgcctggcccagcgctgtggtgcctcaaggaggacacgtgactcttcggtgtcactatcgtcgtgggtttaacatcttcacgctgtacaagaaagatggggtccctgtccctgagctctacaacagaatattctggaacagtttcctcattagccctgtgaccccagcacacgcagggacctacagatgtcgaggttttcacccgcactcccccactgagtggtcggcacccagcaaccccctggtgatcatggtcacaggtctatatgagaaaccttcgcttacagcccggccgggccccacggttcgcgcaggagagaacgtgaccttgtcctgcagctcccagagctcctttgacatctaccatctatccagggagggggaagcccatgaacttaggctccctgcagtgcccagcatcaatggaacattccaggccgacttccctctgggtcctgccacccacggagagacctacagatgcttcggctctttccatggatctccctacgagtggtcagacccgagtgacccactgcctgtttctgtcacagatgctgctgtaatgaaccaagagcctgcgggacacagaacagtgaacagggaggactctgatgaacaagaccctcaggaggtgacatacgcacagttggatcactgcattttcacacagagaaaaatcactggcccttctcagaggagcaagagaccctcaacagataccagcgtgtgtatagaacttccaaatgctgagcccagagcgttgtctcctgcccatgagcaccacagtcaggccttgatgggatcttctagggagacaacagccctgtctcaaacccagcttgccagctctaatgtaccagcagctggaatctgaaggcgtgagtctccatcttagagcatcactcttcctcacaccacaaatctggtgcctgtctcttgcttaccaatgtctaaggtccccactgcctgctgcagagaaaacacactcctttgcttagcccacaattctctatttcacttgacccctgcccacctctccaacctaactggcttacttcctagtctacttgaggctgcaatcacactgaggaactcacaattccaaacatacaagaggctctctcttaacacggcacttagacacgtgctgttccaccttccctcgtgctgttccacctttcctcagactatttttcagccttctggcatcagcaaaccttataaaatttttttgatttcagtgtagttctctcctcttcaaataaacatgtctgcc

SEQ ID NO: 146435 - DNA, 1580 bp, Homo sapiens
  Payload ID: 8979
  Gene Symbol: KIR2DL4
  Gene Name: killer cell immunoglobulin-like receptor, two domains, long cytoplasmic tail, 4
  ENST ID: ENST00000620455
  CDS Start-End: 42-863
gtcgagccgagtcactgcgtcctggcagcagaagctgcaccatgtccatgtcacccacggtcatcatcctggcatgtcttgggttcttcttggaccagagtgtgtgggcacacgtgggtggtcaggacaagcccttctgctctgcctggcccagcgctgtggtgcctcaaggaggacacgtgactcttcggtgtcactatcgtcgtgggtttaacatcttcacgctgtacaagaaagatggggtccctgtccctgagctctacaacagaatattctggaacagtttcctcattagccctgtgaccccagcacacgcagggacctacagatgtcgaggttttcacccgcactcccccactgagtggtcggcacccagcaaccccctggtgatcatggtcacaggtctatatgagaaaccttcgcttacagcccggccgggccccacggttcgcacaggagagaacgtgaccttgtcctgcagctcccagagctcctttgacatctaccatctatccagggagggggaagcccatgaacttaggctccctgcagtgcccagcatcaatggaacattccaggccgacttccctctgggtcctgccacccacggagagacctacagatgcttcggctctttccatggatctccctacgagtggtcagacgcgagtgacccactgcctgtttctgtcacaggaaacccttctagtagttggccttcacccactgaaccaagcttcaaaactggtatcgccagacacctgcatgctgtgattaggtactcagtggccatcatcctcttcaccatccttcccttctttctccttcatcgctggtgctccaaaaaaaaaatgctgctgtaatgaaccaagagcctgcgggacacagaacagtgaacagggaggactctgatgaacaagaccctcaggaggtgacatacgcacagttggatcactgcattttcacacagagaaaaatcactggcccttctcagaggagcaagagaccctcaacagataccagcgtgtgtatagaacttccaaatgctgagcccagagcgttgtctcctgcccatgagcaccacagtcaggccttgatgggatcttctagggagacaacagccctgtctcaaacccagcttgccagctctaatgtaccagcagctggaatctgaaggcgtgagtctccatcttagagcatcactcttcctcacaccacaaatctggtgcctgtctcttgcttaccaatgtctaaggtccccactgcctgctgcagagaaaacacactcctttgcttagcccacaattctctatttcacttgacccctgcccacctctccaacctaactggcttacttcctagtctacttgaggctgcaatcacactgaggaactcacaattccaaacatacaagaggctctctcttaacacggcacttagacacgtgctgttccaccttccctcgtgctgttccacctttcctcagactatttttcagccttctggcatcagcaaaccttataaaatttttttgatttcagtgtagttctctcctcttcaaataaacatgtctgccttca

SEQ ID NO: 146436 - DNA, 1536 bp, Homo sapiens
  Payload ID: 8979
  Gene Symbol: KIR2DL4
  Gene Name: killer cell immunoglobulin-like receptor, two domains, long cytoplasmic tail, 4
  ENST ID: ENST00000611434
  CDS Start-End: 1-1134
atgtccatgtcacccacggtcatcatcctggcatgtcttgggttcttcttggaccagagtgtgtgggcacacgtgggtggtcaggacaagcccttctgctctgcctggcccagcgctgtggtgcctcaaggaggacacgtgactcttcggtgtcactgtcgtcgtgggtttaacatcttcacgctgtacaagaaagatggggtccctgtccctgagctctacaacagaatattctggaacagtttcctcattagccctgtgaccccagcacacgcagggacctacagatgtcgaggttttcacccgcactcccccactgagtggtcggcacccagcaaccccctggtgatcatggtcacaggtctatatgagaaaccttcgcttacagcccggccgggccccacggttcgcgcaggagagaacgtgaccttgtcctgcagctcccagagctcctttgacatctaccatctatccagggagggggaagcccatgaacttaggctccctgcagtgcccagcatcaatggaacattccaggccgacttccctctgggtcctgccacccacggagagacctacagatgcttcggctctttccatggatctccctacgagtggtcagacccgagtgacccactgcctgtttctgtcacaggaaacccttctagtagttggccttcacccactgaaccaagcttcaaaactggtatcgccagacacctgcatgctgtgattaggtactcagtggccatcatcctcttcaccatccttcccttctttctccttcatcgctggtgctccaaaaaaaaaaatgctgctgtaatgaaccaagagcctgcgggacacagaacagtgaacagggaggactctgatgaacaagaccctcaggaggtgacatacgcacagttggatcactgcattttcacacagagaaaaatcactggcccttctcagaggagcaagagaccctcaacagataccagcgtgtgtatagaacttccaaatgctgagcccagagcgttgtctcctgcccatgagcaccacagtcaggccttgatgggatcttctagggagacaacagccctgtctcaaacccagcttgccagctctaatgtaccagcagctggaatctgaaggcgtgagtctccatcttagagcatcactcttcctcacaccacaaatctggtgcctgtctcttgcttaccaatgtctaaggtccccactgcctgctgcagagaaaacacactcctttgcttagcccacaattctctatttcacttgacccctgcccacctctccaacctaactggcttacttcctagtctacttgaggctgcaatcacactgaggaactcacaattccaaacatacaagaggctctctcttaacacggcacttagacacgtgctgttccaccttccctcgtgctgttccacctttcctcagactatttttcagccttctggcatcagcaaaccttataaaatttttttgatttcagtgtagttctctcctcttcaaataaacatgtctgcc

SEQ ID NO: 146437 - DNA, 1392 bp, Homo sapiens; identical to SEQ ID NO: 146408
  Payload ID: 8979
  Gene Symbol: KIR2DL4
  Gene Name: killer cell immunoglobulin-like receptor, two domains, long cytoplasmic tail, 4
  ENST ID: ENST00000610492
  CDS Start-End: 13-990

SEQ ID NO: 146438 - DNA, 1581 bp, Homo sapiens
  Payload ID: 8979
  Gene Symbol: KIR2DL4
  Gene Name: killer cell immunoglobulin-like receptor, two domains, long cytoplasmic tail, 4
  Uniprot ID: Q99706
  ENST ID: ENST00000618358
  CDS Start-End: 42-1175
gtcgagccgagtcactgcgtcctggcagcagaagctgcaccatgtccatgtcacccacggtcatcatcctggcatgtcttgggttcttcttggaccagagtgtgtgggcacacgtgggtggtcaggacaagcccttctgctctgcctggcccagcgctgtggtgcctcaaggaggacacgtgactcttcggtgtcactatcgtcgtgggtttaacatcttcacgctgtacaagaaagatggggtccctgtccctgagctctacaacagaatattctggaacagtttcctcattagccctgtgaccccagcacacgcagggacctacagatgtcgaggttttcacccgcactcccccactgagtggtcggcacccagcaaccccctggtgatcatggtcacaggtctatatgagaaaccttcgcttacagcccggccgggccccacggttcgcacaggagagaacgtgaccttgtcctgcagctcccagagctcctttgacatctaccatctatccagggagggggaagcccatgaacttaggctccctgcagtgcccagcatcaatggaacattccaggccgacttccctctgggtcctgccacccacggagagacctacagatgcttcggctctttccatggatctccctacgagtggtcagacgcgagtgacccactgcctgtttctgtcacaggaaacccttctagtagttggccttcacccactgaaccaagcttcaaaactggtatcgccagacacctgcatgctgtgattaggtactcagtggccatcatcctcttcaccatccttcccttctttctccttcatcgctggtgctccaaaaaaaaaaatgctgctgtaatgaaccaagagcctgcgggacacagaacagtgaacagggaggactctgatgaacaagaccctcaggaggtgacatacgcacagttggatcactgcattttcacacagagaaaaatcactggcccttctcagaggagcaagagaccctcaacagataccagcgtgtgtatagaacttccaaatgctgagcccagagcgttatctcctgcccatgagcaccacagtcaggccttgatgggatcttctagggagacaacagccctgtctcaaacccagcttgccagctctaatgtaccagcagctggaatctgaaggcgtgagtctccatcttagagcatcactcttcctcacaccacaaatctggtgcctgtctcttgcttaccaatgtctaaggtccccactgcctgctgcagagaaaacacactcctttgcttagcccacaattctctatttcacttgacccctgcccacctctccaacctaactggcttacttcctagtctacttgaggctgcaatcacactgaggaactcacaattccaaacatacaagaggctctctattaacacggcacttagacacgtgctgttccaccttccctcgtgctgttccacctttcctcagactatttttcagccttctggcatcagcaaaccttataaaatttttttgatttcagtgtagttctctcctcttcaaataaacatgtctgccttca

SEQ ID NO: 146439 - DNA, 1548 bp, Homo sapiens; identical to SEQ ID NO: 146397
  Payload ID: 8979
  Gene Symbol: KIR2DL4
  Gene Name: killer cell immunoglobulin-like receptor, two domains, long cytoplasmic tail, 4
  ENST ID: ENST00000613442
  CDS Start-End: 13-1146

SEQ ID NO: 146440 - DNA, 1474 bp, Homo sapiens
  Payload ID: 8979
  Gene Symbol: KIR2DL4
  Gene Name: killer cell immunoglobulin-like receptor, two domains, long cytoplasmic tail, 4
  ENST ID: ENST00000616667
  CDS Start-End: 41-1069
tcgagccgagtcactgcgtcctggcagcagaagctgcaccatgtccatgtcacccacggtcatcatcctggcatgtcttgggttcttcttggaccagagtgtgtgggcacacgtgggtggtcaggacaagcccttctgctctgcctggcccagcgctgtggtgcctcaaggaggacacgtgactcttcggtgtcactatcgtcgtgggtttaacatcttcacgctgtacaagaaagatggggtccctgtccctgagctctacaacagaatattctggaacagtttcctcattagccctgtgaccccagcacacgcagggacctacagatgtcgaggttttcacccgcactcccccactgagtggtcggcacccagcaaccccctggtgatcatggtcacaggtctatatgagaaaccttcgcttacagcccggctgggccccacggttcgcgcaggagagaacgtgaccttgtcctgcagctcccagagctcctttgacatctaccatctatccagggagggggaagcccatgaacttaggctccctgcagtgcccagcatcaatggaacattccaggccgacttccctctgggtcctgccacccacggagagacctacagatgcttcggctctttccatggatctccctacgagtggtcagacccgagtgacccactgcctgtttctgtcacaggaaacccttctagtagttggccttcacccactgaaccaagcttcaaaactgatgctgctgtaatgaaccaagagcctgcgggacacagaacagtgaacagggaggactctgatgaacaagaccctcaggaggtgacatacgcacagttggatcactgcattttcacacagagaaaaatcactggcccttctcagaggagcaagagaccctcaacagataccagcgtgtgtatagaacttccaaatgctgagcccagagcgttgtctcctgcccatgagcaccacagtcaggccttgatgggatcttctagggagacaacagccctgtctcaaacccagcttgccagctctaatgtaccagcagctggaatctgaaggcgtgagtctccatcttagagcatcactcttcctcacaccacaaatctggtgcctgtctcttgcttaccaatgtctaaggtccccactgcctgctgcagagaaaacacactcctttgcttagcccacaattctctatttcacttgacccctgcccacctctccaacctaactggcttacttcctagtctacttgaggctgcaatcacactgaggaactcacaattccaaacatacaagaggctctctcttaacacggcacttagacacgtgctgttccaccttccctcgtgctgttccacctttcctcagactatttttcagccttctggcatcagcaaaccttataaaatttttttgatttcagtgtagttctctcctcttcaaataaacatgtctgccttc

SEQ ID NO: 146441 - DNA, 1742 bp, Homo sapiens
  Payload ID: 8979
  Gene Symbol: KIR2DL4
  Gene Name: killer cell immunoglobulin-like receptor, two domains, long cytoplasmic tail, 4
  ENST ID: ENST00000611244
  CDS Start-End: 86-1336
tctagtctgcagttttcagaaaccctcattcctcccttgactgattcaccacttgaacctcatatgacgtagaagaagcctacctatgtccccttcacatgttgtggtcaatgtgtcaactgcacgatccgggcccctcaccacatcctctgcaccggtcagtcgagccgagtcactgcgtcctggcagcagaagctgcaccatgtccatgtcacccacggtcatcatcctggcatgtcttgggttcttcttggaccagagtgtgtgggcacacgtgggtggtcaggacaagcccttctgctctgcctggcccagcgctgtggtgcctcaaggaggacacgtgactcttcggtgtcactgtcgtcgtgggtttaacatcttcacgctgtacaagaaagatggggtccctgtccctgagctctacaacagaatattctggaacagtttcctcattagccctgtgaccccagcacacgcagggacctacagatgtcgaggttttcacccgcactcccccactgagtggtcggcacccagcaaccccctggtgatcatggtcacaggtctatatgagaaaccttcgcttacagcccggccgggccccacggttcgcgcaggagagaacgtgaccttgtcctgcagctcccagagctcctttgacatctaccatctatccagggagggggaagcccatgaacttaggctccctgcagtgcccagcatcaatggaacattccaggccgacttccctctgggtcctgccacccacggagagacctacagatgcttcggctctttccatggatctccctacgagtggtcagacccgagtgacccactgcctgtttctgtcacaggaaacccttctagtagttggccttcacccactgaaccaagcttcaaaactggtatcgccagacacctgcatgctgtgattaggtactcagtggccatcatcctcttcaccatccttcccttctttctccttcatcgctggtgctccaaaaaaaaaaatgctgctgtaatgaaccaagagcctgcgggacacagaacagtgaacagggaggactctgatgaacaagaccctcaggaggtgacatacgcacagttggatcactgcattttcacacagagaaaaatcactggcccttctcagaggagcaagagaccctcaacagataccagcgtgtgtatagaacttccaaatgctgagcccagagcgttgtctcctgcccatgagcaccacagtcaggccttgatgggatcttctagggagacaacagccctgtctcaaacccagcttgccagctctaatgtaccagcagctggaatctgaaggcgtgagtctccatcttagagcatcactcttcctcacaccacaaatctggtgcctgtctcttgcttaccaatgtctaaggtccccactgcctgctgcagagaaaacacactcctttgcttagcccacaattctctatttcacttgacccctgcccacctctccaacctaactggcttacttcctagtctacttgaggctgcaatcacactgaggaactcacaattccaaacatacaagaggctctctcttaacacggcacttagacacgtgctgttccaccttccctcgtgctgttccacctttcctcagactatttttcagccttctggcatcagcaaaccttataaaatttttttgatttcagtgtagttctctcctcttcaaataaacatgtctgccttca

SEQ ID NO: 146442 - DNA, 1581 bp, Homo sapiens; identical to SEQ ID NO: 146438
  Payload ID: 8979
  Gene Symbol: KIR2DL4
  Gene Name: killer cell immunoglobulin-like receptor, two domains, long cytoplasmic tail, 4
  Uniprot ID: Q99706
  ENST ID: ENST00000616354
  CDS Start-End: 42-1175

SEQ ID NO: 146443 - DNA, 1637 bp, Homo sapiens; identical to SEQ ID NO: 146399
  Payload ID: 8979
  Gene Symbol: KIR2DL4
  Gene Name: killer cell immunoglobulin-like receptor, two domains, long cytoplasmic tail, 4
  ENST ID: ENST00000619877
  CDS Start-End: 203-1231

SEQ ID NO: 146444 - DNA, 1656 bp, Homo sapiens
  Payload ID: 8979
  Gene Symbol: KIR2DL4
  Gene Name: killer cell immunoglobulin-like receptor, two domains, long cytoplasmic tail, 4
  ENST ID: ENST00000622350
  CDS Start-End: 1-1251
atgtccccttcacatgttgtggtcaatgtgtcaactgcacgatccgggcccctcaccacatcctctgcaccggtcagtcgagccgagtcactgcgtcctggcagcagaagctgcaccatgtccatgtcacccacggtcatcatcctggcatgtcttgggttcttcttggaccagagtgtgtgggcacacgtgggtggtcaggacaagcccttctgctctgcctggcccagcgctgtggtgcctcaaggaggacacgtgactcttcggtgtcactatcgtcgtgggtttaacatcttcacgctgtacaagaaagatggggtccctgtccctgagctctacaacagaatattctggaacagtttcctcattagccctgtgaccccagcacacgcagggacctacagatgtcgaggttttcacccgcactcccccactgagtggtcggcacccagcaaccccctggtgatcatggtcacaggtctatatgagaaaccttcgcttacagcccggccgggccccacggttcgcgcaggagagaacgtgaccttgtcctgcagctcccagagctcctttgacatctaccatctatccagggaaggggaagcccatgaacttaggctccctgcagtgcccagcatcaatggaacattccaggccgacttccctctgggtcctgccacccacggagagacctacagatgcttcggctctttccatggatctccctacgagtggtcagacccgagtgacccactgcctgtttctgtcacaggaaacccttctagtagttggccttcacccactgaaccaagcttcaaaactggtatcgccagacacctgcatgctgtgattaggtactcagtggccatcatcctctttaccatccttcccttctttctccttcatcgctggtgctccaaaaaaaaagatgctgctgtaatgaaccaagagcctgcgggacacagaacagtgaacagggaggactctgatgaacaagaccctcaggaggtgacatacgcacagttggatcactgcattttcacacagagaaaaatcactggcccttctcagaggagcaagagaccctcaacagataccagcgtgtgtatagaacttccaaatgctgagcccagagcgttgtctcctgcccatgagcaccacagtcaggccttgatgggatcttctagggagacaacagccctgtctcaaacccagcttgccagctctaatgtaccagcagctggaatctgaaggcgtgagtctccatcttagagcatcactcttcctcacaccacaaatctggtgcctgtctcttgcttaccaatgtctaaggtccccactgcctgctgcagagaaaacacactcctttgcttagcccacaattctctatttcacttgacccctgcccacctctccaacctaactggcttacttcctagtctacttgaggctgcaatcacactgaggaactcacaattccaaacatacaagaggctctctcttaacacggcacttagacacgtgctgttccaccttccctcgtgctgttccacctttcctcagactatttttcagccttctggcatcagcaaaccttataaaatttttttgatttcagtgtagttctctcctcttcaaataaacatgtctgccttc

SEQ ID NO: 146445 - DNA, 1580 bp, Homo sapiens; identical to SEQ ID NO: 146393
  Payload ID: 8979
  Gene Symbol: KIR2DL4
  Gene Name: killer cell immunoglobulin-like receptor, two domains, long cytoplasmic tail, 4
  ENST ID: ENST00000612865
  CDS Start-End: 42-863

SEQ ID NO: 146446 - DNA, 1392 bp, Homo sapiens
  Payload ID: 8979
  Gene Symbol: KIR2DL4
  Gene Name: killer cell immunoglobulin-like receptor, two domains, long cytoplasmic tail, 4
  ENST ID: ENST00000613629
  CDS Start-End: 13-990
agaagctgcaccatgtccatgtcacccacggtcatcatcctggcatgtcttgggttcttcttggaccagagtgtgtgggcacacgtgggtggtcaggacaagcccttctgctctgcctggcccagcgctgtggtgcctcaaggaggacacgtgactcttcggtgtcactatcgtcgtgggtttaacatcttcacgctgtacaagaaagatggggtccctgtccctgagctctacaacagaatattctggaacagtttcctcattagccctgtgaccccagcacacgcagggacctacagatgtcgaggttttcacccgcactcccccactgagtggtcggcacccagcaaccccctggtgatcatggtcacaggtctatatgagaaaccttcgcttacagcccggctgggccccacggttcgcgcaggagagaacgtgaccttgtcctgcagctcccagagctcctttgacatctaccatctatccagggagggggaagcccatgaacttaggctccctgcagtgcccagcatcaatggaacattccaggccgacttccctctgggtcctgccacccacggagagacctacagatgcttcggctctttccatggatctccctacgagtggtcagacccgagtgacccactgcctgtttctgtcacagatgctgctgtaatgaaccaagagcctgcgggacacagaacagtgaacagggaggactctgatgaacaagaccctcaggaggtgacatacgcacagttggatcactgcattttcacacagagaaaaatcactggcccttctcagaggagcaagagaccctcaacagataccagcgtgtgtatagaacttccaaatgctgagcccagagcgttgtctcctgcccatgagcaccacagtcaggccttgatgggatcttctagggagacaacagccctgtctcaaacccagcttgccagctctaatgtaccagcagctggaatctgaaggcgtgagtctccatcttagagcatcactcttcctcacaccacaaatctggtgcctgtctcttgcttaccaatgtctaaggtccccactgcctgctgcagagaaaacacactcctttgcttagcccacaattctctatttcacttgacccctgcccacctctccaacctaactggcttacttcctagtctacttgaggctgcaatcacactgaggaactcacaattccaaacatacaagaggctctctcttaacacggcacttagacacgtgctgttccaccttccctcgtgctgttccacctttcctcagactatttttcagccttctggcatcagcaaaccttataaaatttttttgatttcagtgtagttctctcctcttcaaataaacatgtctgcc

SEQ ID NO: 146447 - DNA, 1566 bp, Homo sapiens
  Payload ID: 8979
  Gene Symbol: KIR2DL4
  Gene Name: killer cell immunoglobulin-like receptor, two domains, long cytoplasmic tail, 4
  ENST ID: ENST00000621484
  CDS Start-End: 28-849
ctgcgtcctggcagcagaagctgcaccatgtccatgtcacccacggtcatcatcctggcatgtcttgggttcttcttggaccagagtgtgtgggcacacgtgggtggtcaggacaagcccttctgctctgcctggcccagcgctgtggtgcctcaaggaggacacgtgactcttcggtgtcactatcgtcgtgggtttaacatcttcacgctgtacaagaaagatggggtccctgtccctgagctctacaacagaatattctggaacagtttcctcattagccctgtgaccccagcacacgcagggacctacagatgtcgaggttttcacccgcactcccccactgagtggtcggcacccagcaaccccctggtgatcatggtcacaggtctatatgagaaaccttcgcttacagcccggccgggccccacggttcgcgcaggagagaacgtgaccttgtcctgcagctcccagagctcctttgacatctaccatctatccagggaaggggaagcccatgaacttaggctccctgcagtgcccagcatcaatggaacattccaggccgacttccctctgggtcctgccacccacggagagacctacagatgcttcggctctttccatggatctccctacgagtggtcagacccgagtgacccactgcctgtttctgtcacaggaaacccttctagtagttggccttcacccactgaaccaagcttcaaaactggtatcgccagacacctgcatgctgtgattaggtactcagtggccatcatcctctttaccatccttcccttctttctccttcatcgctggtgctccaaaaaaaaaatgctgctgtaatgaaccaagagcctgcgggacacagaacagtgaacagggaggactctgatgaacaagaccctcaggaggtgacatacgcacagttggatcactgcattttcacacagagaaaaatcactggcccttctcagaggagcaagagaccctcaacagataccagcgtgtgtatagaacttccaaatgctgagcccagagcgttgtctcctgcccatgagcaccacagtcaggccttgatgggatcttctagggagacaacagccctgtctcaaacccagcttgccagctctaatgtaccagcagctggaatctgaaggcgtgagtctccatcttagagcatcactcttcctcacaccacaaatctggtgcctgtctcttgcttaccaatgtctaaggtccccactgcctgctgcagagaaaacacactcctttgcttagcccacaattctctatttcacttgacccctgcccacctctccaacctaactggcttacttcctagtctacttgaggctgcaatcacactgaggaactcacaattccaaacatacaagaggctctctcttaacacggcacttagacacgtgctgttccaccttccctcgtgctgttccacctttcctcagactatttttcagccttctggcatcagcaaaccttataaaatttttttgatttcagtgtagttctctcctcttcaaataaacatgtctgccttca

SEQ ID NO: 146448 - DNA, 1656 bp, Homo sapiens; identical to SEQ ID NO: 146379
  Payload ID: 8979
  Gene Symbol: KIR2DL4
  Gene Name: killer cell immunoglobulin-like receptor, two domains, long cytoplasmic tail, 4
  ENST ID: ENST00000614253
  CDS Start-End: 1-1251

SEQ ID NO: 146449 - DNA, 1581 bp, Homo sapiens
  Payload ID: 8979
  Gene Symbol: KIR2DL4
  Gene Name: killer cell immunoglobulin-like receptor, two domains, long cytoplasmic tail, 4
  ENST ID: ENST00000621636
  CDS Start-End: 42-1175
gtcgagccgagtcactgcgtcctggcagcagaagctgcaccatgtccatgtcacccacggtcatcatcctggcatgtcttgggttcttcttggaccagagtgtgtgggcacacgtgggtggtcaggacaagcccttctgctctgcctggcccagcgctgtggtgcctcaaggaggacacgtgactcttcggtgtcactatcgtcgtgggtttaacatcttcacgctgtacaagaaagatggggtccctgtccctgagctctacaacagaatattctggaacagtttcctcattagccctgtgaccccagcacacgcagggacctacagatgtcgaggttttcacccgcactcccccactgagtggtcggcacccagcaaccccctggtgatcatggtcacaggtctatatgagaaaccttcgcttacagcccggctgggccccacggttcgcgcaggagagaacgtgaccttgtcctgcagctcccagagctcctttgacatctaccatctatccagggagggggaagcccatgaacttaggctccctgcagtgcccagcatcaatggaacattccaggccgacttccctctgggtcctgccacccacggagagacctacagatgcttcggctctttccatggatctccctacgagtggtcagacccgagtgacccactgcctgtttctgtcacaggaaacccttctagtagttggccttcacccactgaaccaagcttcaaaactggtatcgccagacacctgcatgctgtgattaggtactcagtggccatcatcctcttcaccatccttcccttctttctccttcatcgctggtgctccaaaaaaaaaaatgctgctgtaatgaaccaagagcctgcgggacacagaacagtgaacagggaggactctgatgaacaagaccctcaggaggtgacatacgcacagttggatcactgcattttcacacagagaaaaatcactggcccttctcagaggagcaagagaccctcaacagataccagcgtgtgtatagaacttccaaatgctgagcccagagcgttgtctcctgcccatgagcaccacagtcaggccttgatgggatcttctagggagacaacagccctgtctcaaacccagcttgccagctctaatgtaccagcagctggaatctgaaggcgtgagtctccatcttagagcatcactcttcctcacaccacaaatctggtgcctgtctcttgcttaccaatgtctaaggtccccactgcctgctgcagagaaaacacactcctttgcttagcccacaattctctatttcacttgacccctgcccacctctccaacctaactggcttacttcctagtctacttgaggctgcaatcacactgaggaactcacaattccaaacatacaagaggctctctcttaacacggcacttagacacgtgctgttccaccttccctcgtgctgttccacctttcctcagactatttttcagccttctggcatcagcaaaccttataaaatttttttgatttcagtgtagttctctcctcttcaaataaacatgtctgccttca

SEQ ID NO: 146450 - DNA, 1536 bp, Homo sapiens; identical to SEQ ID NO: 146436
  Payload ID: 8979
  Gene Symbol: KIR2DL4
  Gene Name: killer cell immunoglobulin-like receptor, two domains, long cytoplasmic tail, 4
  ENST ID: ENST00000616375
  CDS Start-End: 1-1134

SEQ ID NO: 146451 - DNA, 1040 bp, Homo sapiens
  Payload ID: 8979
  Gene Symbol: KIR2DL4
  Gene Name: killer cell immunoglobulin-like receptor, two domains, long cytoplasmic tail, 4
  ENST ID: ENST00000619043
  CDS Start-End: 1-1029
atgtccatgtcacccacggtcatcatcctggcatgtcttgggttcttcttggaccagagtgtgtgggcacacgtgggtggtcaggacaagcccttctgctctgcctggcccagcgctgtggtgcctcaaggaggacacgtgactcttcggtgtcactatcgtcgtgggtttaacatcttcacgctgtacaagaaagatggggtccctgtccctgagctctacaacagaatattctggaacagtttcctcattagccctgtgaccccagcacacgcagggacctacagatgtcgaggttttcacccgcactcccccactgagtggtcggcacccagcaaccccctggtgatcatggtcacaggtctatatgagaaaccttcgcttacagcccggccgggccccacggttcgcacaggagagaacgtgaccttgtcctgcagctcccagagctcctttgacatctaccatctatccagggagggggaagcccatgaacttaggctccctgcagtgcccagcatcaatggaacattccaggccgacttccctctgggtcctgccacccacggagagacctacagatgcttcggctctttccatggatctccctacgagtggtcagacgcgagtgacccactgcctgtttctgtcacaggaaacccttctagtagttggccttcacccactgaaccaagcttcaaaactgatgctgctgtaatgaaccaagagcctgcgggacacagaacagtgaacagggaggactctgatgaacaagaccctcaggaggtgacatacgcacagttggatcactgcattttcacacagagaaaaatcactggcccttctcagaggagcaagagaccctcaacagataccagcgtgtgtatagaacttccaaatgctgagcccagagcgttatctcctgcccatgagcaccacagtcaggccttgatgggatcttctagggagacaacagccctgtctcaaacccagcttgccagctctaatgtaccagcagctggaatctgaaggcgtgagtc

SEQ ID NO: 146452 - DNA, 1547 bp, Homo sapiens
  Payload ID: 8979
  Gene Symbol: KIR2DL4
  Gene Name: killer cell immunoglobulin-like receptor, two domains, long cytoplasmic tail, 4
  ENST ID: ENST00000621002
  CDS Start-End: 13-834
agaagctgcaccatgtccatgtcacccacggtcatcatcctggcatgtcttgggttcttcttggaccagagtgtgtgggcacacgtgggtggtcaggacaagcccttctgctctgcctggcccagcgctgtggtgcctcaaggaggacacgtgactcttcggtgtcactatcgtcgtgggtttaacatcttcacgctgtacaagaaagatggggtccctgtccctgagctctacaacagaatattctggaacagtttcctcattagccctgtgaccccagcacacgcagggacctacagatgtcgaggttttcacccgcactcccccactgagtggtcggcacccagcaaccccctggtgatcatggtcacaggtctatatgagaaaccttcgcttacagcccggccgggccccacggttcgcgcaggagagaacgtgaccttgtcctgcagctcccagagctcctttgacatctaccatctatccagggaaggggaagcccatgaacttaggctccctgcagtgcccagcatcaatggaacattccaggccgacttccctctgggtcctgccacccacggagagacctacagatgcttcggctctttccatggatctccctacgagtggtcagacccgagtgacccactgcctgtttctgtcacaggaaacccttctagtagttggccttcacccactgaaccaagcttcaaaactggtatcgccagacacctgcatgctgtgattaggtactcagtggccatcatcctctttaccatccttcccttctttctccttcatcgctggtgctccaaaaaaaaaatgctgctgtaatgaaccaagagcctgcgggacacagaacagtgaacagggaggactctgatgaacaagaccctcaggaggtgacatacgcacagttggatcactgcattttcacacagagaaaaatcactggcccttctcagaggagcaagagaccctcaacagataccagcgtgtgtatagaacttccaaatgctgagcccagagcgttgtctcctgcccatgagcaccacagtcaggccttgatgggatcttctagggagacaacagccctgtctcaaacccagcttgccagctctaatgtaccagcagctggaatctgaaggcgtgagtctccatcttagagcatcactcttcctcacaccacaaatctggtgcctgtctcttgcttaccaatgtctaaggtccccactgcctgctgcagagaaaacacactcctttgcttagcccacaattctctatttcacttgacccctgcccacctctccaacctaactggcttacttcctagtctacttgaggctgcaatcacactgaggaactcacaattccaaacatacaagaggctctctcttaacacggcacttagacacgtgctgttccaccttccctcgtgctgttccacctttcctcagactatttttcagccttctggcatcagcaaaccttataaaatttttttgatttcagtgtagttctctcctcttcaaataaacatgtctgcc

SEQ ID NO: 146453 - DNA, 1804 bp, Homo sapiens
  Payload ID: 8979
  Gene Symbol: KIR2DL4
  Gene Name: killer cell immunoglobulin-like receptor, two domains, long cytoplasmic tail, 4
  ENST ID: ENST00000618501
  CDS Start-End: 203-1402
tctagtctgcagttttcagaaaccctcattcctcccttgactgattcaccacttgaacctcatatgacgtagaagaagcctacctatgtccccttcacatgttgtggtcaatgtgtcaactgcacgatccgggcccctcaccacatcctctgcaccggtcagtcgagccgagtcactgcgtcctggcagcagaagctgcaccatgtccatgtcacccacggtcatcatcctggcatgtcttgggttcttcttggaccagagtgtgtgggcacacgtgggtggtcaggacaagcccttctgctctgcctggcccagcgctgtggtgcctcaaggaggacacgtgactcttcggtgtcactgtcgtcgtgggtttaacatcttcacgctgtacaagaaagatggggtccctgtccctgagctctacaacagaatattctggaacagtttcctcattagccctgtgaccccagcacacgcagggacctacagatgtcgaggttttcacccgcactcccccactgagtggtcggcacccagcaaccccctggtgatcatggtcacaggtctatatgagaaaccttcgcttacagcccggccgggccccacggttcgcgcaggagagaacgtgaccttgtcctgcagctcccagagctcctttgacatctaccatctatccagggagggggaagcccatgaacttaggctccctgcagtgcccagcatcaatggaacattccaggccgacttccctctgggtcctgccacccacggagagacctacagatgcttcggctctttccatggatctccctacgagtggtcagacccgagtgacccactgcctgtttctgtcacaggaaacccttctagtagttggccttcacccactgaaccaagcttcaaaactggtatcgccagacacctgcatgctgtgattaggtactcagtggccatcatcctctttaccatccttcccttctttctccttcatcgctggtgctccaaaaaaaaagtaagcctcacgaagcagaggccagagaactcagggccctgtgcggaagcaggatgggagcacgcagatgctgctgtaatgaaccaagagcctgcgggacacagaacagtgaacagggaggactctgatgaacaagaccctcaggaggtgacatacgcacagttggatcactgcattttcacacagagaaaaatcactggcccttctcagaggagcaagagaccctcaacagataccagcgtgtgtatagaacttccaaatgctgagcccagagcgttgtctcctgcccatgagcaccacagtcaggccttgatgggatcttctagggagacaacagccctgtctcaaacccagcttgccagctctaatgtaccagcagctggaatctgaaggcgtgagtctccatcttagagcatcactcttcctcacaccacaaatctggtgcctgtctcttgcttaccaatgtctaaggtccccactgcctgctgcagagaaaacacactcctttgcttagcccacaattctctatttcacttgacccctgcccacctctccaacctaactggcttacttcctagtctacttgaggctgcaatcacactgaggaactcacaattccaaacatacaagaggctctctcttaacacggcacttagacacgtgctgttccaccttccctcgtgctgttccacctttcctcagactatttttcagccttctggcatcagcaaaccttataaaatttttttgatttcagtgtagttctctcctcttcaaataaacatgtctgcc

SEQ ID NO: 146454 - DNA, 1535 bp, Homo sapiens
  Payload ID: 8979
  Gene Symbol: KIR2DL4
  Gene Name: killer cell immunoglobulin-like receptor, two domains, long cytoplasmic tail, 4
  ENST ID: ENST00000622348
  CDS Start-End: 1-822
atgtccatgtcacccacggtcatcatcctggcatgtcttgggttcttcttggaccagagtgtgtgggcacacgtgggtggtcaggacaagcccttctgctctgcctggcccagcgctgtggtgcctcaaggaggacacgtgactcttcggtgtcactatcgtcgtgggtttaacatcttcacgctgtacaagaaagatggggtccctgtccctgagctctacaacagaatattctggaacagtttcctcattagccctgtgaccccagcacacgcagggacctacagatgtcgaggttttcacccgcactcccccactgagtggtcggcacccagcaaccccctggtgatcatggtcacaggtctatatgagaaaccttcgcttacagcccggccgggccccacggttcgcgcaggagagaacgtgaccttgtcctgcagctcccagagctcctttgacatctaccatctatccagggagggggaagcccatgaacttaggctccctgcagtgcccagcatcaatggaacattccaggccgacttccctctgggtcctgccacccacggagagacctacagatgcttcggctctttccatggatctccctacgagtggtcagacccgagtgacccactgcctgtttctgtcacaggaaacccttctagtagttggccttcacccactgaaccaagcttcaaaactggtatcgccagacacctgcatgctgtgattaggtactcagtggccatcatcctctttaccatccttcccttctttctccttcatcgctggtgctccaaaaaaaaaatgctgctgtaatgaaccaagagcctgcgggacacagaacagtgaacagggaggactctgatgaacaagaccctcaggaggtgacatacgcacagttggatcactgcattttcacacagagaaaaatcactggcccttctcagaggagcaagagaccctcaacagataccagcgtgtgtatagaacttccaaatgctgagcccagagcgttgtctcctgcccatgagcaccacagtcaggccttgatgggatcttctagggagacaacagccctgtctcaaacccagcttgccagctctaatgtaccagcagctggaatctgaaggcgtgagtctccatcttagagcatcactcttcctcacaccacaaatctggtgcctgtctcttgcttaccaatgtctaaggtccccactgcctgctgcagagaaaacacactcctttgcttagcccacaattctctatttcacttgacccctgcccacctctccaacctaactggcttacttcctagtctacttgaggctgcaatcacactgaggaactcacaattccaaacatacaagaggctctctcttaacacggcacttagacacgtgctgttccaccttccctcgtgctgttccacctttcctcagactatttttcagccttctggcatcagcaaaccttataaaatttttttgatttcagtgtagttctctcctcttcaaataaacatgtctgcc

SEQ ID NO: 146455 - DNA, 1581 bp, Homo sapiens; identical to SEQ ID NO: 146396
  Payload ID: 8979
  Gene Symbol: KIR2DL4
  Gene Name: killer cell immunoglobulin-like receptor, two domains, long cytoplasmic tail, 4
  Uniprot ID: Q99706
  ENST ID: ENST00000613053
  CDS Start-End: 42-1175

SEQ ID NO: 146456 - DNA, 1443 bp, Homo sapiens
  Payload ID: 8979
  Gene Symbol: KIR2DL4
  Gene Name: killer cell immunoglobulin-like receptor, two domains, long cytoplasmic tail, 4
  Uniprot ID: Q99706
  ENST ID: ENST00000611022
  CDS Start-End: 13-1041
agaagctgcaccatgtccatgtcacccacggtcatcatcctggcatgtcttgggttcttcttggaccagagtgtgtgggcacacgtgggtggtcaggacaagcccttctgctctgcctggcccagcgctgtggtgcctcaaggaggacacgtgactcttcggtgtcactatcgtcgtgggtttaacatcttcacgctgtacaagaaagatggggtccctgtccctgagctctacaacagaatattctggaacagtttcctcattagccctgtgaccccagcacacgcagggacctacagatgtcgaggttttcacccgcactcccccactgagtggtcggcacccagcaaccccctggtgatcatggtcacaggtctatatgagaaaccttcgcttacagcccggccgggccccacggttcgcgcaggagagaacgtgaccttgtcctgcagctcccagagctcctttgacatctaccatctatccagggagggggaagcccatgaacttaggctccctgcagtgcccagcatcaatggaacattccaggccgacttccctctgggtcctgccacccacggagagacctacagatgcttcggctctttccatggatctccctacgagtggtcagacccgagtgacccactgcctgtttctgtcacaggaaacccttctagtagttggccttcacccactgaaccaagcttcaaaactgatgctgctgtaatgaaccaagagcctgcgggacacagaacagtgaacagggaggactctgatgaacaagaccctcaggaggtgacatacgcacagttggatcactgcattttcacacagagaaaaatcactggcccttctcagaggagcaagagaccctcaacagataccagcgtgtgtatagaacttccaaatgctgagcccagagcgttgtctcctgcccatgagcaccacagtcaggccttgatgggatcttctagggagacaacagccctgtctcaaacccagcttgccagctctaatgtaccagcagctggaatctgaaggcgtgagtctccatcttagagcatcactcttcctcacaccacaaatctggtgcctgtctcttgcttaccaatgtctaaggtccccactgcctgctgcagagaaaacacactcctttgcttagcccacaattctctatttcacttgacccctgcccacctctccaacctaactggcttacttcctagtctacttgaggctgcaatcacactgaggaactcacaattccaaacatacaagaggctctctcttaacacggcacttagacacgtgctgttccaccttccctcgtgctgttccacctttcctcagactatttttcagccttctggcatcagcaaaccttataaaatttttttgatttcagtgtagttctctcctcttcaaataaacatgtctgcc

SEQ ID NO: 146457 - DNA, 715 bp, Homo sapiens; identical to SEQ ID NO: 146384
  Payload ID: 8979
  Gene Symbol: KIR2DL4
  Gene Name: killer cell immunoglobulin-like receptor, two domains, long cytoplasmic tail, 4
  ENST ID: ENST00000614339
  CDS Start-End: 12-704

SEQ ID NO: 146458 - DNA, 1656 bp, Homo sapiens; identical to SEQ ID NO: 146444
  Payload ID: 8979
  Gene Symbol: KIR2DL4
  Gene Name: killer cell immunoglobulin-like receptor, two domains, long cytoplasmic tail, 4
  ENST ID: ENST00000610608
  CDS Start-End: 1-1251

SEQ ID NO: 146459 - DNA, 1496 bp, Homo sapiens
  Payload ID: 8979
  Gene Symbol: KIR2DL4
  Gene Name: killer cell immunoglobulin-like receptor, two domains, long cytoplasmic tail, 4
  ENST ID: ENST00000613149
  CDS Start-End: 13-783
agaagctgcaccatgtccatgtcacccacggtcatcatcctggcatgtcttgggttcttcttggaccagagtgtgtgggcacacgtgggtggtcaggacaagcccttctgctctgcctggcccagcgctgtggtgcctcaaggaggacacgtgactcttcggtgtcactatcgtcgtgggtttaacatcttcacgctgtacaagaaagatggggtccctgtccctgagctctacaacagaatattctggaacagtttcctcattagccctgtgaccccagcacacgcagggacctacagatgtcgaggttttcacccgcactcccccactgagtggtcggcacccagcaaccccctggtgatcatggtcacaggtctatatgagaaaccttcgcttacagcccggccgggccccacggttcgcgcaggagagaacgtgaccttgtcctgcagctcccagagctcctttgacatctaccatctatccagggaaggggaagcccatgaacttaggctccctgcagtgcccagcatcaatggaacattccaggccgacttccctctgggtcctgccacccacggagagacctacagatgcttcggctctttccatggatctccctacgagtggtcagacccgagtgacccactgcctgtttctgtcacaggtatcgccagacacctgcatgctgtgattaggtactcagtggccatcatcctctttaccatccttcccttctttctccttcatcgctggtgctccaaaaaaaaaatgctgctgtaatgaaccaagagcctgcgggacacagaacagtgaacagggaggactctgatgaacaagaccctcaggaggtgacatacgcacagttggatcactgcattttcacacagagaaaaatcactggcccttctcagaggagcaagagaccctcaacagataccagcgtgtgtatagaacttccaaatgctgagcccagagcgttgtctcctgcccatgagcaccacagtcaggccttgatgggatcttctagggagacaacagccctgtctcaaacccagcttgccagctctaatgtaccagcagctggaatctgaaggcgtgagtctccatcttagagcatcactcttcctcacaccacaaatctggtgcctgtctcttgcttaccaatgtctaaggtccccactgcctgctgcagagaaaacacactcctttgcttagcccacaattctctatttcacttgacccctgcccacctctccaacctaactggcttacttcctagtctacttgaggctgcaatcacactgaggaactcacaattccaaacatacaagaggctctctcttaacacggcacttagacacgtgctgttccaccttccctcgtgctgttccacctttcctcagactatttttcagccttctggcatcagcaaaccttataaaatttttttgatttcagtgtagttctctcctcttcaaataaacatgtctgcc

SEQ ID NO: 146460 - DNA, 1596 bp, Homo sapiens
  Payload ID: 8980
  Gene Symbol: KIR2DL5A
  Gene Name: killer cell immunoglobulin-like receptor, two domains, long cytoplasmic tail, 5A
  ENST ID: ENST00000620281
  CDS Start-End: 56-1183
ctgtgcgctgctgagctgagctggggcgcggctgcctgtctgcaccggcagcaccatgtcgctcatggtcgtcagcatggcgtgtgttgggttcttcttgctgcagggggcctggacacatgagggtggacaggacaagcccttgctgtctgcctggcccagcgctgtggtgcctcgaggaggacatgtgactcttctgtgtcgctctcgtcttgggtttaccatcttcagtctgtacaaagaagatggggtgcctgtccctgagctctacaacaaaatattctggaagagcatcctcatgggccctgtgacccctgcacacgcagggacctacagatgtcggggttcacacccgcgctcccccattgagtggtcggcacccagcaaccccctggtgatcgtggtcacaggtctatttgggaaaccttcactctcagcccagccgggccccacggttcgcacaggagagaacgtgaccttgtcctgcagctccaggagctcatttgacatgtaccatctatccagggaggggagggcccatgaacctaggctccctgcagtgcccagcgtcgatggaacattccaggctgactttcctctgggccctgccacccacggagggacctacacatgcttcagctctctccatgactcaccctatgagtggtcagacccgagtgacccactgcttgtttctgtcacaggaaactcttcaagtagttcatcttcacccactgaaccaagctccaaaactggtatccgcagacacctgcacattctgattgggacctcagtggctatcatcctcttcatcatcctcttcttctttctccttcattgctgctgctccaacaaaaagaatgctgctgtaatggaccaagagcctgccggggacagaacagtgaacagggaggactctgatgatcaagaccctcaggaggtgacatatgcacagttggatcactgcgttttcacacagacaaaaatcacttccccttctcagaggcccaagacacctccaacagataccaccatgtacatggaacttccaaatgctaagccaagatcattgtctcctgcccataagcaccacagtcaggccttgaggggatcttctagggagacaacagccctgtctcaaaaccgggttgctagctcccatgtaccagcagctggaatctgaaggcatcagtcttcatcttaggggatcgctcttcctcacaccacaaatctgaacatgcctctctcttgcttacaaatgtctaaggtccccactgcctgctggagagaagacacacacctttgcttagcccacaattctctatttcacttgacccctgcccacctctccaactgaactggcttacttcctagtctacttgaggctgcaatcacactgaggaactcacaattccagacatacaagaggctccctcttaacatggcactgagacacgtgctgttccaccttccctcatgctgtttcacctttcctcagactattttccagccttctgtcagtcagcagtgaaacttataaaattttttgtgatttcaatgtagctgtctccttttcaaataaacatgtctgccctc

SEQ ID NO: 146461 - DNA, 1596 bp, Homo sapiens
  Payload ID: 8980
  Gene Symbol: KIR2DL5A
  Gene Name: killer cell immunoglobulin-like receptor, two domains, long cytoplasmic tail, 5A
  Uniprot ID: Q8N109
  ENST ID: ENST00000611422
  CDS Start-End: 56-1183
ctgtgcgctgctgagctgagctggggcgcggccgcctgtctgcaccggcagcaccatgtcgctcatggtcatcagcatggcgtgtgttgggttcttcttgctgcagggggcctggacacatgagggtggtcaggacaagcccttgctgtctgcctggcccagcgctgtggtgcctcgaggaggacatgtgactcttctgtgtcgctctcgtcttgggtttaccatcttcagtctgtacaaagaagatggggtgcctgtccctgagctctacaacaaaatattctggaagagcatcctcatgggccctgtgacccctgcacacgcagggacctacagatgtcggggttcacacccacgctcccccattgagtggtcagcacccagcaaccccctggtgatcgtggtcacaggtctatttgggaaaccttcactctcagcccagccgggccccacggttcgcacaggagagaacgtgaccttgtcctgcagctccaggagctcatttgacatgtaccatctatccagggaggggagggcccatgaacctaggctccctgcagtgcccagcgtcaatggaacattccaggctgactttcctctgggccctgccacccacggagggacctacacatgcttcggctctctccatgactcaccctatgagtggtcagacccgagtgacccactgcttgtttctgtcacaggaaactcttcaagtagttcatcttcacccactgaaccaagctccaaaactggtatccgcagacacctgcacattctgattgggacctcagtggctatcatcctcttcatcatcctcttcttctttctccttcattgctgctgctccaacaaaaagaatgctgctgtaatggaccaagagcctgccggggacagaacagtgaacagggaggactctgatgatcaagaccctcaggaggtgacatatgcacagttggatcactgcgttttcacacagacaaaaatcacttccccttctcagaggcccaagacacctccaacagataccaccatgtacatggaacttccaaatgctaagccaagatcattgtctcctgcccataagcaccacagtcaggccttgaggggatcttctagggagacaacagccctgtctcaaaaccgggttgctagctcccatgtaccagcagctggaatctgaaggcatcagtcttcatcttaggggatcgctcttcctcacaccacaaatctgaacatgcctctctcttgcttacaaatgtctaaggtccccactgcctgctggagagaagacacactcctttgcttagcccacaattctctatttcacttgacccctgcccacctctccaactgaactggcttacttcctagtctacttgaggctgcaatcacactgaggaactcacaattccagacatacaagaggctccctcttaacatggcactgagacacgtgctgttccaccttccctcatgctgtttcacctttcctcagactattttccagccttctgtcagtcagcagtgaaacttataaaattttttgtgatttcaatgtagctgtctccttttcaaataaacatgtctgccctc

SEQ ID NO: 146462 - DNA, 1687 bp, Homo sapiens
  Payload ID: 8980
  Gene Symbol: KIR2DL5A
  Gene Name: killer cell immunoglobulin-like receptor, two domains, long cytoplasmic tail, 5A
  ENST ID: ENST00000620638
  CDS Start-End: 56-1183
ctgtgcgctgctgagctgagctggggcgcggccgcctgtctgcaccggcagcaccatgtcgctcatggtcatcagcatggcgtgtgttgggttcttcttgctgcagggggcctggacacatgagggtggacaggacaagcccttgctgtctgcctggcccagcgctgtggtgcctcgaggaggacatgtgactcttctgtgtcgctctcgtcttgggtttaccatcttcagtctgtacaaagaagatggggtgcctgtccctgagctctacaacaaaatattctggaagagcatcctcatgggccctgtgacccctgcacacgcagggacctacagatgtcggggttcacacccgcgctcccccattgagtggtcggcacccagcaaccccctggtgatcgtggtcacaggtctatttgggaaaccttcactctcagcccagccgggccccacggttcgcacaggagagaacgtgaccttgtcctgcagctccaggagctcatttgacatgtaccatctatccagggaggggagggcccatgaacctaggctccctgcagtgcccagcgtcgatggaacattccaggctgactttcctctgggccctgccacccacggagggacctacacatgcttcagctctctccatgactcaccctatgagtggtcagacccgagtgacccactgcttgtttctgtcacaggaaactcttcaagtagttcatcttcacccactgaaccaagctccaaaactggtatccgcagacacctgcacattctgattgggacctcagtggctatcatcctcttcatcatcctcttcttctttctccttcattgctgctgctccaacaaaaagaatgctgctgtaatggaccaagagcctgccggggacagaacagtgaacagggaggactctgatgatcaagaccctcaggaggtgacatatgcacagttggatcactgcgttttcacacagacaaaaatcacttccccttctcagaggcccaagacacctccaacagataccaccatgtacatggaacttccaaatgctaagccaagatcattgtctcctgcccataagcaccacagtcaggccttgaggggatcttctagggagacaacagccctgtctcaaaaccgggttgctagctcccatgtaccagcagctggaatctgaaggcatcagtcttcatcttaggggatcgctcttcctcacaccacaaatctgaacatgcctctctcttgcttacaaatgtctaaggtccccactgcctgctggagagaagacacacacctttgcttagcccacaattctctatttcacttgacccctgcccacctctccaactgaactggcttacttcctagtctacttgaggctgcaatcacactgaggaactcacaattccagacatacaagaggctccctcttaacatggcactgagacacgtgctgttccaccttccctcatgctgtttcacctttcctcagactattttccagccttctgtcagtcagcagtgaaacttataaaattttttgtgatttcaatgtagctgtctccttttcaaataaacatgtctgccctcattgctttaggtaatgtgacactattcgctgaaagaaaccgctgttatcattaccatgtccacataaccccatctgttatccactgggttc

SEQ ID NO: 146463 - DNA, 1473 bp, Homo sapiens
  Payload ID: 8980
  Gene Symbol: KIR2DL5A
  Gene Name: killer cell immunoglobulin-like receptor, two domains, long cytoplasmic tail, 5A
  Uniprot ID: Q8N109
  ENST ID: ENST00000612730
  CDS Start-End: 56-1183
ctgtgcgctgctgagctgagctggggcgcggccgcctgtctgcaccggcagcaccatgtcgctcatggtcatcagcatggcgtgtgttgggttcttcttgctgcagggggcctggacacatgagggtggtcaggacaagcccttgctgtctgcctggcccagcgctgtggtgcctcgaggaggacatgtgactcttctgtgtcgctctcgtcttgggtttaccatcttcagtctgtacaaagaagatggggtgcctgtccctgagctctacaacaaaatattctggaagagcatcctcatgggccctgtgacccctgcacacgcagggacctacagatgtcggggttcacacccacgctcccccattgagtggtcagcacccagcaaccccctggtgatcgtggtcacaggtctatttgggaaaccttcactctcagcccagccgggccccacggttcgcacaggagagaacgtgaccttgtcctgcagctccaggagctcatttgacatgtaccatctatccagggaggggagggcccatgaacctaggctccctgcagtgcccagcgtcaatggaacattccaggctgactttcctctgggccctgccacccacggagggacctacacatgcttcggctctctccatgactcaccctatgagtggtcagacccgagtgacccactgcttgtttctgtcacaggaaactcttcaagtagttcatcttcacccactgaaccaagctccaaaactggtatccgcagacacctgcacattctgattgggacctcagtggctatcatcctcttcatcatcctcttcttctttctccttcattgctgctgctccaacaaaaagaatgctgctgtaatggaccaagagcctgccggggacagaacagtgaacagggaggactctgatgatcaagaccctcaggaggtgacatatgcacagttggatcactgcgttttcacacagacaaaaatcacttccccttctcagaggcccaagacacctccaacagataccaccatgtacatggaacttccaaatgctaagccaagatcattgtctcctgcccataagcaccacagtcaggccttgaggggatcttctagggagacaacagccctgtctcaaaaccgggttgctagctcccatgtaccagcagctggaatctgaaggcatcagtcttcatcttaggggatcgctcttcctcacaccacaaatctgaacatgcctctctcttgcttacaaatgtctaaggtccccactgcctgctggagagaagacacactcctttgcttagcccacaattctctatttcacttgacccctgcccacctctccaactgaactggcttacttcctagtctacttgaggctgcaatcacactgaggaactcacaattccagacatacaagaggctccctcttaacatggcactgagacacgtgctgttccaccttcc

SEQ ID NO: 146464 - DNA, 1632 bp, Homo sapiens
  Payload ID: 8980
  Gene Symbol: KIR2DL5A
  Gene Name: killer cell immunoglobulin-like receptor, two domains, long cytoplasmic tail, 5A
  ENST ID: ENST00000617974
  CDS Start-End: 1-1128
atgtcgctcatggtcatcagcatggcgtgtgttgggttcttcttgctgcagggggcctggacacatgagggtggacaggacaagcccttgctgtctgcctggcccagcgctgtggtgcctcgaggaggacatgtgactcttctgtgtcgctctcgtcttgggtttaccatcttcagtctgtacaaagaagatggggtgcctgtccctgagctctacaacaaaatattctggaagagcatcctcatgggccctgtgacccctgcacacgcagggacctacagatgtcggggttcacacccgcgctcccccattgagtggtcggcacccagcaaccccctggtgatcgtggtcacaggtctatttgggaaaccttcactctcagcccagccgggccccacggttcgcacaggagagaacgtgaccttgtcctgcagctccaggagctcatttgacatgtaccatctatccagggaggggagggcccatgaacctaggctccctgcagtgcccagcgtcgatggaacattccaggctgactttcctctgggccctgccacccacggagggacctacacatgcttcagctctctccatgactcaccctatgagtggtcagacccgagtgacccactgcttgtttctgtcacaggaaactcttcaagtagttcatcttcacccactgaaccaagctccaaaactggtatccgcagacacctgcacattctgattgggacctcagtggctatcatcctcttcatcatcctcttcttctttctccttcattgctgctgctccaacaaaaagaatgctgctgtaatggaccaagagcctgccggggacagaacagtgaacagggaggactctgatgatcaagaccctcaggaggtgacatatgcacagttggatcactgcgttttcacacagacaaaaatcacttccccttctcagaggcccaagacacctccaacagataccaccatgtacatggaacttccaaatgctaagccaagatcattgtctcctgcccataagcaccacagtcaggccttgaggggatcttctagggagacaacagccctgtctcaaaaccgggttgctagctcccatgtaccagcagctggaatctgaaggcatcagtcttcatcttaggggatcgctcttcctcacaccacaaatctgaacatgcctctctcttgcttacaaatgtctaaggtccccactgcctgctggagagaagacacacacctttgcttagcccacaattctctatttcacttgacccctgcccacctctccaactgaactggcttacttcctagtctacttgaggctgcaatcacactgaggaactcacaattccagacatacaagaggctccctcttaacatggcactgagacacgtgctgttccaccttccctcatgctgtttcacctttcctcagactattttccagccttctgtcagtcagcagtgaaacttataaaattttttgtgatttcaatgtagctgtctccttttcaaataaacatgtctgccctcattgctttaggtaatgtgacactattcgctgaaagaaaccgctgttatcattaccatgtccacataaccccatctgttatccactgggttc

SEQ ID NO: 146465 - DNA, 1632 bp, Homo sapiens; identical to SEQ ID NO: 146464
  Payload ID: 8980
  Gene Symbol: KIR2DL5A
  Gene Name: killer cell immunoglobulin-like receptor, two domains, long cytoplasmic tail, 5A
  ENST ID: ENST00000621273
  CDS Start-End: 1-1128

SEQ ID NO: 146466 - DNA, 1632 bp, Homo sapiens
  Payload ID: 8980
  Gene Symbol: KIR2DL5A
  Gene Name: killer cell immunoglobulin-like receptor, two domains, long cytoplasmic tail, 5A
  ENST ID: ENST00000618017
  CDS Start-End: 1-1128
atgtcgctcatggtcgtcagcatggcgtgtgttgggttcttcttgctgcagggggcctggacacatgagggtggacaggacaagcccttgctgtctgcctggcccagcgctgtggtgcctcgaggaggacatgtgactcttctgtgtcgctctcgtcttgggtttaccatcttcagtctgtacaaagaagatggggtgcctgtccctgagctctacaacaaaatattctggaagagcatcctcatgggccctgtgacccctgcacacgcagggacctacagatgtcggggttcacacccgcgctcccccattgagtggtcggcacccagcaaccccctggtgatcgtggtcacaggtctatttgggaaaccttcactctcagcccagccgggccccacggttcgcacaggagagaacgtgaccttgtcctgcagctccaggagctcatttgacatgtaccatctatccagggaggggagggcccatgaacctaggctccctgcagtgcccagcgtcgatggaacattccaggctgactttcctctgggccctgccacccacggagggacctacacatgcttcagctctctccatgactcaccctatgagtggtcagacccgagtgacccactgcttgtttctgtcacaggaaactcttcaagtagttcatcttcacccactgaaccaagctccaaaactggtatccgcagacacctgcacattctgattgggacctcagtggctatcatcctcttcatcatcctcttcttctttctccttcattgctgctgctccaacaaaaagaatgctgctgtaatggaccaagagcctgccggggacagaacagtgaacagggaggactctgatgatcaagaccctcaggaggtgacatatgcacagttggatcactgcgttttcacacagacaaaaatcacttccccttctcagaggcccaagacacctccaacagataccaccatgtacatggaacttccaaatgctaagccaagatcattgtctcctgcccataagcaccacagtcaggccttgaggggatcttctagggagacaacagccctgtctcaaaaccgggttgctagctcccatgtaccagcagctggaatctgaaggcatcagtcttcatcttaggggatcgctcttcctcacaccacaaatctgaacatgcctctctcttgcttacaaatgtctaaggtccccactgcctgctggagagaagacacacacctttgcttagcccacaattctctatttcacttgacccctgcccacctctccaactgaactggcttacttcctagtctacttgaggctgcaatcacactgaggaactcacaattccagacatacaagaggctccctcttaacatggcactgagacacgtgctgttccaccttccctcatgctgtttcacctttcctcagactattttccagccttctgtcagtcagcagtgaaacttataaaattttttgtgatttcaatgtagctgtctccttttcaaataaacatgtctgccctcattgctttaggtaatgtgacactattcgctgaaagaaaccgctgttatcattaccatgtccacataaccccatctgttatccactgggttc

SEQ ID NO: 146467 - DNA, 1596 bp, Homo sapiens; identical to SEQ ID NO: 146461
  Payload ID: 8980
  Gene Symbol: KIR2DL5A
  Gene Name: killer cell immunoglobulin-like receptor, two domains, long cytoplasmic tail, 5A
  Uniprot ID: Q8N109
  ENST ID: ENST00000613155
  CDS Start-End: 56-1183

SEQ ID NO: 146468 - DNA, 1632 bp, Homo sapiens; identical to SEQ ID NO: 146464
  Payload ID: 8980
  Gene Symbol: KIR2DL5A
  Gene Name: killer cell immunoglobulin-like receptor, two domains, long cytoplasmic tail, 5A
  ENST ID: ENST00000621304
  CDS Start-End: 1-1128

SEQ ID NO: 146469 - DNA, 1632 bp, Homo sapiens
  Payload ID: 8981
  Gene Symbol: KIR2DL5B
  Gene Name: killer cell immunoglobulin-like receptor, two domains, long cytoplasmic tail, 5B
  ENST ID: ENST00000619593
  CDS Start-End: 1-1128
atgtcgctcatggtcgtcagcatggcgtgtgttgggttcttcttgctgcagggggcctggccacatgagggtggtcaggacaagcccttgctgtctgcctggcccagcgctgtggtgcctcgaggaggacatgtgactcttctgtgtcgctctcgtcttgggtttaccatcttcagtctgtacaaagaagatggggtgcctgtccctgagctctacaacaaaatattctggaagagcatcctcatgggccctgtgacccctgcacacgcagggacctacagatgtcggggttcacacccacgctcccccattgagtggtcagcacccagcaaccccctggtgatcgtggtcacaggtctatttgggaaaccttcactctcagcccagccgggccccacggttcgcacaggagagaacgtgaccttgtcctgcagctccaggagctcatttgacatgtaccatctatccagggaggggagggcccatgaacctaggctccctgcagtgcccagcgtcaatggaacattccaggctgactttcctctgggccctgccacccacggagggacctacacatgcttcggctctctccatgactcaccctatgagtggtcagacccgagtgacccactgcttgtttctgtcacaggaaactcttcaagtagttcatcttcacccactgaaccaagctccaaaactggtatccgcagacacctgcacattctgattgggacctcagtggctatcatcctcttcatcatcctcttcttctttctccttcattgctgctgctccaacaaaaagaatgctgctgtaatggaccaagagcctgccggggacagaacagtgaacagggaggactctgatgatcaagaccctcaggaggtgacatatgcacagttggatcactgcgttttcacacagacaaaaatcacttccccttctcagaggcccaagacacctccaacagataccaccatgtacatggaacttccaaatgctaagccaagatcattgtctcctgcccataagcaccacagtcaggccttgaggggatcttctagggagacaacagccctgtctcaaaaccgggttgctagctcccatgtaccagcagctggaatctgaaggcatcagtcttcatcttaggggatcgctcttcctcacaccacaaatctgaacatgcctctctcttgcttacaaatgtctaaggtccccactgcctgctggagagaagacacactcctttgcttagcccacaattctctatttcacttgacccctgcccacctctccaactgaactggcttacttcctagtctacttgaggctgcaatcacactgaggaactcacaattccagacatacaagaggctccctcttaacatggcactgagacacgtgctgttccaccttccctcatgctgtttcacctttcctcagactattttccagccttctgtcagtcagcagtgaaacttataaaattttttgtgatttcaatgtagctgtctccttttcaaataaacatgtctgccctcattgctttaggtaatgtgacactattcgctgaaagaaaccgctgttatcattaccatgtccacataaccccatctgttatccactgggttc

SEQ ID NO: 146470 - DNA, 1395 bp, Homo sapiens
  Payload ID: 8981
  Gene Symbol: KIR2DL5B
  Gene Name: killer cell immunoglobulin-like receptor, two domains, long cytoplasmic tail, 5B
  ENST ID: ENST00000615969
  CDS Start-End: 2-1129
catgtcgctcatggtcgtcagcatggcgtgtgttgggttcttcttgctgcagggggcctggacacatgagggtggacaggacaagcccttgctgtctgcctggcccagcgctgtggtgcctcgaggaggacatgtgactcttctgtgtcgctctcgtcttgggtttaccatcttcagtctgtacaaagaagatggggtgcctgtccctgagctctacaacaaaatattctggaagagcatcctcatgggccctgtgacccctgcacacgcagggacctacagatgtcggggttcacacccgcgctcccccattgagtggtcggcacccagcaaccccctggtgatcgtggtcacaggtctatttgggaaaccttcactctcagcccagccgggccccacggttcgcacaggagagaacgtgaccttgtcctgcagctccaggagctcatttgacatgtaccatctatccagggaggggagggcccatgaacctaggctccctgcagtgcccagcgtcgatggaacattccaggctgactttcctctgggccctgccacccacggagggacctacacatgcttcagctctctccatgactcaccctatgagtggtcagacccgagtgacccactgcttgtttctgtcacaggaaactcttcaagtagttcatcttcacccactgaaccaagctccaaaactggtatccgcagacacctgcacattctgattgggacctcagtggctatcatcctcttcatcatcctcttcttctttctccttcattgctgctgctccaacaaaaagaatgctgctgtaatggaccaagagcctgccggggacagaacagtgaacagggaggactctgatgatcaagaccctcaggaggtgacatatgcacagttggatcactgcgttttcacacagacaaaaatcacttccccttctcagaggcccaagacacctccaacagataccaccatgtacatggaacttccaaatgctaagccaagatcattgtctcctgcccataagcaccacagtcaggccttgaggggatcttctagggagacaacagccctgtctcaaaaccgggttgctagctcccatgtaccagcagctggaatctgaaggcatcagtcttcatcttaggggatcgctcttcctcacaccacaaatctgaacatgcctctctcttgcttacaaatgtctaaggtccccactgcctgctggagagaagacacacacctttgcttagcccacaattctctatttcacttgacccctgcccacctctccaactgaactggcttacttcctagtctacttgaggctgcaatcacactgaggaactcacaattccagacatacaagaggctccctcttaacatggcact

SEQ ID NO: 146471 - DNA, 1632 bp, Homo sapiens
  Payload ID: 8981
  Gene Symbol: KIR2DL5B
  Gene Name: killer cell immunoglobulin-like receptor, two domains, long cytoplasmic tail, 5B
  ENST ID: ENST00000618413
  CDS Start-End: 1-1128
atgtcgctcatggtcgtcagcatggcgtgtgttgggttcttcttgctgcagggggcctggacacatgagggtggtcaggacaagcccttgctgtctgcctggcccagcactgtggtgcctcgaggaggacatgtgactcttctgtgtcgctctcgtcttgggtttaccatcttcagtctgtacaaagaagatggggtgcctgtccctgagctctacaacaaaatattctggaagagcatcctcatgggccctgtgacccctgcacacgcagggacctacagatgtcggggttcacacccacgctcccccattgagtggtcagcacccagcaaccccctggtgatcgtggtcacaggtctatttgggaaaccttcactctcagcccagccgggccccacggttcgcacaggagagaacgtgaccttgtcctgcagctccaggagctcatttgacatgtaccatctatccagggaggggagggcccatgaacctaggctccctgcagtgcccagcgtcaatggaacattccaggctgactttcctctgggccctgccacccacggagggacctacacatgcttcggctctctccatgactcaccctatgagtggtcagacccgagtgacccactgcttgtttctgtcacaggaaactcttcaagtagttcatcttcacccactgaaccaagctccaaaactggtatccgcagacacctgcacattctgattgggacctcagtggctatcatcctcttcatcatcctcttcttctttctccttcattgctgctgctccaacaaaaagaatgctgctgtaatggaccaagagcctgccggggacagaacagtgaacagggaggactctgatgatcaagaccctcaggaggtgacatatgcacagttggatcactgcgttttcacacagacaaaaatcacttccccttctcagaggcccaagacacctccaacagataccaccatgtacatggaacttccaaatgctaagccaagatcattgtctcctgcccataagcaccacagtcaggccttgaggggatcttctagggagacaacagccctgtctcaaaaccgggttgccagctcccatgtaccagcagctggaatctgaaggcatcagtcttcatcttaggggatcgctcttcctcacaccacaaatctgaacatgcctctctcttgcttacaaatgtctaaggtccccactgcctgctggagagaagacacactcctttgcttagcccacaattctctatttcacttgacccctgcccacctctccaactgaactggcttacttcctagtctacttgaggctgcaatcacactgaggaactcacaattccagacatacaagaggctccctcttaacatggcactgagacacgtgctgttccaccttccctcatgctgtttcacctttcctcagactattttccagacttctgtcagtcagcagtgaaacttataaaattttttgtgatttcaatgtagctgtctccttttcaaataaacatgtctgccctcattgctttaggtaatgtgacgctattcgctgaaagaaaccgctgttatcattaccatgtccacataaccccatctgttatccactgggttc

SEQ ID NO: 146472 - DNA, 1632 bp, Homo sapiens; identical to SEQ ID NO: 146466
  Payload ID: 8981
  Gene Symbol: KIR2DL5B
  Gene Name: killer cell immunoglobulin-like receptor, two domains, long cytoplasmic tail, 5B
  ENST ID: ENST00000615475
  CDS Start-End: 1-1128

SEQ ID NO: 146473 - DNA, 1632 bp, Homo sapiens
  Payload ID: 8981
  Gene Symbol: KIR2DL5B
  Gene Name: killer cell immunoglobulin-like receptor, two domains, long cytoplasmic tail, 5B
  ENST ID: ENST00000617104
  CDS Start-End: 1-1128
atgtcgctcatggtcgtcagcatggcgtgtgttgggttcttcttgctgcagggggcctggacacatgagggtggtcaggacaagcccttgctgtctgcctggcccagcgctgtggtgcctcgaggaggacatgtgactcttctgtgtcgctctcgtcttgggtttaccatcttcagtctgtacaaagaagatggggtgcctgtccctgagctctacaacaaaatattctggaagagcatcctcatgggccctgtgacccctgcacacgcagggacctacagatgtcggggttcacacccacgctcccccattgagtggtcagcacccagcaaccccctggtgatcgtggtcacaggtctatttgggaaaccttcactctcagcccagccgggccccacggttcgcacaggagagaacgtgaccttgtcctgcagctccaggagctcatttgacatgtaccatctatccagggaggggagggcccatgaacctaggctccctgcagtgcccagcgtcaatggaacattccaggctgactttcctctgggccctgccacccacggagggacctacacatgcttcggctctctccatgactcaccctatgagtggtcagacccgagtgacccactgcttgtttctgtcacaggaaactcttcaagtagttcatcttcacccactgaaccaagctccaaaactggtatccgcagacacctgcacattctgattgggacctcagtggctatcatcctcttcatcatcctcttcttctttctccttcattgctgctgctccaacaaaaagaatgctgctgtaatggaccaagagcctgccggggacagaacagtgaacagggaggactctgatgatcaagaccctcaggaggtgacatatgcacagttggatcactgcgttttcacacagacaaaaatcacttccccttctcagaggcccaagacacctccaacagataccaccatgtacatggaacttccaaatgctaagccaagatcattgtctcctgcccataagcaccacagtcaggccttgaggggatcttctagggagacaacagccctgtctcaaaaccgggttgctagctcccatgtaccagcagctggaatctgaaggcatcagtcttcatcttaggggatcgctcttcctcacaccacaaatctgaacatgcctctctcttgcttacaaatgtctaaggtccccactgcctgctggagagaagacacactcctttgcttagcccacaattctctatttcacttgacccctgcccacctctccaactgaactggcttacttcctagtctacttgaggctgcaatcacactgaggaactcacaattccagacatacaagaggctccctcttaacatggcactgagacacgtgctgttccaccttccctcatgctgtttcacctttcctcagactattttccagccttctgtcagtcagcagtgaaacttataaaattttttgtgatttcaatgtagctgtctccttttcaaataaacatgtctgccctcattgctttaggtaatgtgacactattcgctgaaagaaaccgctgttatcattaccatgtccacataaccccatctgttatccactgggttc

SEQ ID NO: 146474 - DNA, 1632 bp, Homo sapiens; identical to SEQ ID NO: 146469
  Payload ID: 8981
  Gene Symbol: KIR2DL5B
  Gene Name: killer cell immunoglobulin-like receptor, two domains, long cytoplasmic tail, 5B
  ENST ID: ENST00000611411
  CDS Start-End: 1-1128

SEQ ID NO: 146475 - DNA, 1596 bp, Homo sapiens
  Payload ID: 8981
  Gene Symbol: KIR2DL5B
  Gene Name: killer cell immunoglobulin-like receptor, two domains, long cytoplasmic tail, 5B
  ENST ID: ENST00000610920
  CDS Start-End: 56-1183
ctgtgcgctgctgagctgagctggggcgcggctgcctgtctgcaccggcagcaccatgtcgctcatggtcgtcagcatggcgtgtgttgggttcttcttgctgcagggggcctggacacatgagggtggtcaggacaagcccttgctgtctgcctggcccagcactgtggtgcctcgaggaggacatgtgactcttctgtgtcgctctcgtcttgggtttaccatcttcagtctgtacaaagaagatggggtgcctgtccctgagctctacaacaaaatattctggaagagcatcctcatgggccctgtgacccctgcacacgcagggacctacagatgtcggggttcacacccacgctcccccattgagtggtcagcacccagcaaccccctggtgatcgtggtcacaggtctatttgggaaaccttcactctcagcccagccgggccccacggttcgcacaggagagaacgtgaccttgtcctgcagctccaggagctcatttgacatgtaccatctatccagggaggggagggcccatgaacctaggctccctgcagtgcccagcgtcaatggaacattccaggctgactttcctctgggccctgccacccacggagggacctacacatgcttcggctctctccatgactcaccctatgagtggtcagacccgagtgacccactgcttgtttctgtcacaggaaactcttcaagtagttcatcttcacccactgaaccaagctccaaaactggtatccgcagacacctgcacattctgattgggacctcagtggctatcatcctcttcatcatcctcttcttctttctccttcattgctgctgctccaacaaaaagaatgctgctgtaatggaccaagagcctgccggggacagaacagtgaacagggaggactctgatgatcaagaccctcaggaggtgacatatgcacagttggatcactgcgttttcacacagacaaaaatcacttccccttctcagaggcccaagacacctccaacagataccaccatgtacatggaacttccaaatgctaagccaagatcattgtctcctgcccataagcaccacagtcaggccttgaggggatcttctagggagacaacagccctgtctcaaaaccgggttgccagctcccatgtaccagcagctggaatctgaaggcatcagtcttcatcttaggggatcgctcttcctcacaccacaaatctgaacatgcctctctcttgcttacaaatgtctaaggtccccactgcctgctggagagaagacacactcctttgcttagcccacaattctctatttcacttgacccctgcccacctctccaactgaactggcttacttcctagtctacttgaggctgcaatcacactgaggaactcacaattccagacatacaagaggctccctcttaacatggcactgagacacgtgctgttccaccttccctcatgctgtttcacctttcctcagactattttccagacttctgtcagtcagcagtgaaacttataaaattttttgtgatttcaatgtagctgtctccttttcaaataaacatgtctgccctc

SEQ ID NO: 146476 - DNA, 1596 bp, Homo sapiens
  Payload ID: 8981
  Gene Symbol: KIR2DL5B
  Gene Name: killer cell immunoglobulin-like receptor, two domains, long cytoplasmic tail, 5B
  ENST ID: ENST00000614018
  CDS Start-End: 56-1183
ctgtgcgctgctgagctgagctggggcgcggctgcctgtctgcaccggcagcaccatgtcgctcatggtcgtcagcatggcgtgtgttgggttcttcttgctgcagggggcctggacacatgagggtggtcaggacaagcccttgctgtctgcctggcccagcgctgtggtgcctcgaggaggacatgtgactcttctgtgtcgctctcgtcttgggtttaccatcttcagtctgtacaaagaagatggggtgcctgtccctgagctctacaacaaaatattctggaagagcatcctcatgggccctgtgacccctgcacacgcagggacctacagatgtcggggttcacacccacgctcccccattgagtggtcagcacccagcaaccccctggtgatcgtggtcacaggtctatttgggaaaccttcactctcagcccagccgggccccacggttcgcacaggagagaacgtgaccttgtcctgcagctccaggagctcatttgacatgtaccatctatccagggaggggagggcccatgaacctaggctccctgcagtgcccagcgtcaatggaacattccaggctgactttcctctgggccctgccacccacggagggacctacacatgcttcggctctctccatgactcaccctatgagtggtcagacccgagtgacccactgcttgtttctgtcacaggaaactcttcaagtagttcatcttcacccactgaaccaagctccaaaactggtatccgcagacacctgcacattctgattgggacctcagtggctatcatcctcttcatcatcctcttcttctttctccttcattgctgctgctccaacaaaaagaatgctgctgtaatggaccaagagcctgccggggacagaacagtgaacagggaggactctgatgatcaagaccctcaggaggtgacatatgcacagttggatcactgcgttttcacacagacaaaaatcacttccccttctcagaggcccaagacacctccaacagataccaccatgtacatggaacttccaaatgctaagccaagatcattgtctcctgcccataagcaccacagtcaggccttgaggggatcttctagggagacaacagccctgtctcaaaaccgggttgctagctcccatgtaccagcagctggaatctgaaggcatcagtcttcatcttaggggatcgctcttcctcacaccacaaatctgaacatgcctctctcttgcttacaaatgtctaaggtccccactgcctgctggagagaagacacactcctttgcttagcccacaattctctatttcacttgacccctgcccacctctccaactgaactggcttacttcctagtctacttgaggctgcaatcacactgaggaactcacaattccagacatacaagaggctccctcttaacatggcactgagacacgtgctgttccaccttccctcatgctgtttcacctttcctcagactattttccagccttctgtcagtcagcagtgaaacttataaaattttttgtgatttcaatgtagctgtctccttttcaaataaacatgtctgccctc

SEQ ID NO: 146477 - DNA, 1109 bp, Homo sapiens
  Payload ID: 8982
  Gene Symbol: KIR2DP1
  Gene Name: killer cell immunoglobulin-like receptor, two domains, pseudogene 1
  ENST ID: ENST00000613362
  CDS Start-End: 1-915
atgtcgctcatggtcgtcagcatggcgtgtgttgggttcttcttgctgcagggggcctggccacatgagggagtccacagaaaaccttccctcctggcccacccaggtcccctggtgaaatcagaagagacagtcatcctgcaatgttggtcagatgtcaggtttcagcacttccttctgcacagagaagggaagtttaaggacactttgcacctcattggagagcaccatgatggggtctccaaggccaacttctccatcggtcccatgatgcaagaccttgcagggacctacagatgctacggttctgttactcactccccctatcagttgtcagctcccagtgaccctctggacatcgtcatcacaggtctatatgagaaaccttctctctcagcccagccgggccccacggttctggcaggagagagcgtgaccttgtcctgcagctcccggagctcctatgacatgtaccatctatccagggagggggaggcccatgaacgtaggttctctgcagggcccaaggtcaacggaacattccaggccgactttcctctgggccctgccacccacggaggaacctacagatgcttcggctctttccgtgactctccatacgagtggtcaaactcgagtgacccactgcttgtttctgtcacaggaaacccttcaaatagttggccttcacccactgaaccaagctccaaaaccggtaacccaagacacctgcacgttctgattgggacctcagtggtcatcatcctcttcatcctcctcctcttctttctccttcatcgctggtgctccaacaagaaaaatgctgctgtaatggaccaagagcctgcagggaacagaacagtgaacagcgaggattctgatgaacaagaccatcaggaggtgtcatacgcataattggatcactgtgttttcacacagagaaaaatcactcgcccttctgagaggcccaagacacccccaacagataccagcatgtacatagaacttccaaatgctgagcccagatccaaagttgtcttctgtccacgagcaccacagtcaggccttgaggggatcttctagggagacaacagccctgtctcaaaacc

SEQ ID NO: 146478 - DNA, 1494 bp, Homo sapiens
  Payload ID: 8982
  Gene Symbol: KIR2DP1
  Gene Name: killer cell immunoglobulin-like receptor, two domains, pseudogene 1
  ENST ID: ENST00000620286
  CDS Start-End: 26-1390
gccgcctgtctgcaccggcagcaccatgtcgctcatggtcgtcagcatggcgtgtgttgggttcttcttgctggaggggccctggccacatgtgggtggtcaggacaagcccttcctctctgcctggcccggcactgtggtgtctgaaggacaacatgtgactcttcagtgtcgctctcgtcttgggtttaaagaattcagtctgtccaaagaagacgggatgcctgtccctgagctctacaacagaatattccggaacagctttctcatgggccctgtgaccccagcacatgcagggacctacagatgttgcagttcacacccacactcccccactgggtggtcggcacccagcaaccctgtggtgatcatggtcacaggagtccacagaaaaccttccctcctggcccacccaggtcccctggtgaaatcgggagagacggtcatcctgcaatgttggtcagatgtcagttttgagcgcttccttctgcacagagaggggatcactgaggaccccttgcgcctcgttggacagctccacgatgcgggttcccaggtcaactattccatgggtcccatgacacctgcccttgcagggacctacagatgctttggttctgtcactcacttaccctatgagttgtcagctcccagtgaccctctggacatcgtggtcgtaggtctatatgagaaaccttctctctcagcccagccgggccccacggttctggcaggagagagcgtgaccttgtcctgcagctcccggagctcctatgacatgtaccatctatccagggagggggaggcccatgaacgtaggttctctgcagggcccaaggtcaacggaacattccaggccgactttcctctgggccctgccacccacggaggaacctacagatgcttcggctctttccgtgactctccatacgagtggtcaaactcgagtgacccactgcttgtttctgtcacaggaaacccttcaaatagttggccttcacccactgaaccaagctccaaaaccggtaacccaagacacctgcacgttctgattgggacctcagtggtcatcatcctcttcatcctcctcctcttctttctccttcatcgctggtgctccaacaagaaaaatgctgctgtaatggaccaagagcctgcagggaacagaacagcgaatagcgaggactctgatgaacaagaccctcaggaggtgacatacgtacagttggatcactgcgttttcacacagagaaaaatcactcgcccttctcagaggcccaagacacccccaacagataccagagtgtacacggaacttccaaatgctgagtccagatccaaagttgtctcctgcccagcaccacagtcaggccttgaggggatcttctagggagacaacagccctgtctcaaaaccgggttgccagctcccatgtaccagcagctggaatctgaaggcgtgagtctgcatcttagggcatcgctcttcctcaca

SEQ ID NO: 146479 - DNA, 1410 bp, Homo sapiens
  Payload ID: 8982
  Gene Symbol: KIR2DP1
  Gene Name: killer cell immunoglobulin-like receptor, two domains, pseudogene 1
  ENST ID: ENST00000622004
  CDS Start-End: 39-953
gagctggggcgcagccgcctgtctgcaccggcagcaccatgtcgctcatggtcgtcagcatggcgtgtgttgggttcttcttgctgcagggggcctggccacatgagggagtccacagaaaaccttccctcctggcccacccaggtcccctggtgaaatcagaagagacagtcatcctgcaatgttggtcagatgtcaggtttcagcacttccttctgcacagagaagggaagtttaaggacactttgcacctcattggagagcaccatgatggggtctccaaggccaacttctccatcggtcccatgatgcaagaccttgcagggacctacagatgctacggttctgttactcactccccctatcagttgtcagctcccagtgaccctctggacatcgtcatcacaggtctatatgagaaaccttctctctcagcccagccgggccccacggttctggcaggagagagcgtgaccttgtcctgcagctcccggagctcctatgacatgtaccatctatccagggagggggaggcccatgaacgtaggttctctgcagggcccaaggtcaacggaacattccaggccgactttcctctgggccctgccacccacggaggaacctacagatgcttcggctctttccgtgactctccatacgagtggtcaaactcgagtgacccactgcttgtttctgtcacaggaaacccttcaaatagttggccttcacccactgaaccaagctccaaaaccggtaaccccagacacctacatgttctgattgggacctcagtggtcaaaatccctttcaccatcctcctcttctttctccttcatcgctggtgctccgacaaaaaaaatgctgctgtaatggaccaagagcctgcagggaacagaacagtgaacagcgaggattctgatgaacaagaccatcaggaggtgtcatacgcataattggatcactgtgttttcacacagagaaaaatcactcgcccttctgagaggcccaagacacccccaacagataccagcatgtacatagaacttccaaatgctgagcccagatccaaagttgtcttctgtccacgagcaccacagtcaggccttgaggggatcttctagggagacaacagccctgtctcaaaaccgggttgccagctcccatgtaccagcagctggaatctgaaggcatcagtcttcatcttagggcatcgctcttcctcacaccacgaatctgaacatgcctctctcttgcttacaaatgtctaaggtccccactgcctgctggagagaaaacacactcctttgcttagcccacaattctccatttcacttgacccctgcccacctctccaacctaactggcttacttcctagtctacctgaggctgcaatcacactgaggaactca

SEQ ID NO: 146480 - DNA, 1601 bp, Homo sapiens; identical to SEQ ID NO: 146336
  Payload ID: 8982
  Gene Symbol: KIR2DP1
  Gene Name: killer cell immunoglobulin-like receptor, two domains, pseudogene 1
  ENST ID: ENST00000618023
  CDS Start-End: 39-1088

SEQ ID NO: 146481 - DNA, 1570 bp, Homo sapiens
  Payload ID: 8982
  Gene Symbol: KIR2DP1
  Gene Name: killer cell immunoglobulin-like receptor, two domains, pseudogene 1
  ENST ID: ENST00000611070
  CDS Start-End: 1-1368
atgtcgctcatggtcgtcagcatggcgtgtgttgggttcttcttgctggaggggccctggccacatgtgggtggtcaggacaagcccttcctctctgcctggcccggcactgtggtgtctgaaggacaacatgtgactcttcagtgtcgctctcgtcttgggtttaaagaattcagtctgtccaaagaagacgggatgcctgtccctgagctctacaacagaatattccggaacagctttctcatgggccctgtgaccccagcacatgcagggacctacagatgttgcagttcacacccacactcccccactgggtggtcggcacccagcaaccctgtggtgatcatggtcacaggagtccacagaaaaccttccctcctggcccacccaggtcccctggtgaaatcgggagagacggtcatcctgcaatgttggtcagatgtcagttttgagcgcttccttctgcacagagaggggatcactgaggaccccttgcgcctcgttggacagctccacgatgcgggttcccaggtcaactattccatgggtcccatgacacctgcccttgcagggacctacagatgctttggttctgtcactcacttaccctatgagttgtcagctcccagtgaccctctggacatcgtggtcgtaggtctatatgagaaaccttctctctcagcccagccgggccccacggttctggcaggagagagcgtgaccttgtcctgcagctcccggagctcctatgacatgtaccatctatccagggagggggaggcccatgaacgtaggttctctgcagggcccaaggtcaacggaacattccaggccgactttcctctgggccctgccacccacggaggaacctacagatgcttcggctctttccgtgactctccatacgagtggtcaaactcgagtgacccactgcttgtttctgtcacaggaaacccttcaaatagttggccttcacccactgaaccaagctccaaaaccggtaacccaagacacctgcacgttctgattgggacctcagtggtcatcatcctcttcatcctcctcctcttctttctccttcatcgctggtgctccaacaagaaaaatgctgctgtaatggaccaagagcctgcagggaacagaacagcgaatagcgaggactctgatgaacaagaccctcaggaggtgacatacgtacagttggatcactgcgttttcacacagagaaaaatcactcgcccttctcagaggcccaagacacccccaacagataccagagtgtacacggaacttccaaatgctgagtccagatccaaagttgtctcctgcccacgagcaccacagtcaggccttgaggggatcttctagggagacaacagccctgtctcaaaaccgggttgccagctcccatgtaccagcagctggaatctgaaggcatcagtcttcatcttagggcatcgctcttcctcacaccacgaatctgaacatgcctctctcttgcttacaaatgtctaaggtccccactgcctgctggagagaaaacacactcctttgcttagcccacaattct

SEQ ID NO: 146482 - DNA, 1596 bp, Homo sapiens
  Payload ID: 8982
  Gene Symbol: KIR2DP1
  Gene Name: killer cell immunoglobulin-like receptor, two domains, pseudogene 1
  ENST ID: ENST00000621698
  CDS Start-End: 38-1087
agctggggcgcggccgcctgtctgcacagacagcaccatgtcgctcatggtcgtcagcatggtgtgtgttgggttcttcttgctgcagggggcctggccacatgagggagtccacagaaaaccttccctcctggcccacccaggtcccctggtgaaatcagaagagacagtcatcctgcaatgttggtcagatgtcaggtttcagcacttccttctgcacagagaagggaagtttaaggacactttgcacctcattggagagcaccatgatggggtctccaaggccaacttctccatcggtcccatgatgcaagaccttgcagggacctacagatgctacggttctgttactcactccccctatcagttgtcagctcccagtgaccctctggacatcgtcatcacaggtctatatgagaaaccttctctctcagcccagccgggccccacggttctggcaggagagagcgtgaccttgtcctgcagctcccggagctcctatgacatgtaccatctatccagggagggggaggcccatgaacgtaggttctctgcagggcccaaggtcaacggaacattccaggccgactttcctctgggccctgccacccacggaggaacctacagatgcttcggctctttccgtgactctccatacgagtggtcaaactcgagtgacccactgcttgtttctgtcacaggaaacccttcaaatagttggccttcacccactgaaccaagctccaaaaccggtaacccaagacacctgcacgttctgattgggacctcagtggtcatcatcctcttcatcctcctcctcttctttctccttcatcgctggtgctccaacaagaaaaatgctgctgtaatggaccaagagcctgcagggaacagaacagcgaatagcgaggactctgatgaacaagaccctcaggaggtgacatacgtacagttggatcactgcgttttcacacagagaaaaatcactcgcccttctcagaggcccaagacacccccaacagataccagagtgtacacggaacttccaaatgctgagtccagatccaaagttgtctcctgcccatgagcaccacagtcaggccttgaggggatcttctagggagacaacagccctgtctcaaaaccgggttgccagctcccatgtaccagcagctggaatctgaaggcgtgagtctgcatcttagggcatcgctcttcctcacaccacaaatctgaatgtgcctctctcttgcttacaaatgtctaaggtccccactgcctgctggagagaaaacacactcctttgcttagcccacaattctccatttcacttgacccctgcccacctctccaaccttactggcttacttcctagtctacttgaggctgcaatcacactgaggaactcacagttccaaacatacaagaggctccctcttaacacggcacttagacacgtcctgttccaccttccctcatgctgttccacctcccctcagagtatctttcagccttctgtcagcagtaaaacttatatattttttaaaataatttcaatgtagttttccctccttcaaataaacatgtctgccctca

SEQ ID NO: 146483 - DNA, 1102 bp, Homo sapiens
  Payload ID: 8982
  Gene Symbol: KIR2DP1
  Gene Name: killer cell immunoglobulin-like receptor, two domains, pseudogene 1
  ENST ID: ENST00000621887
  CDS Start-End: 3-1019
ccatgtcgctcatggtcgtcagcatggcgtgtgttgggttcttcttgctgcagggggcctggccacatgagggagtccacagaaaaccttccctcctggcccacccaggtcccctggtgaaatcagaagagacagtcatcctgcaatgttggtcagatgtcaggtttcagcacttccttctgcacagagaagggaagtttaaggacactttgcacctcattggagagcaccatgatggggtctccaaggccaacttctccatcggtcccatgatgcaagaccttgcagggacctacagatgctacggttctgttactcactccccctatcagttgtcagctcccagtgaccctctggacatcgtcatcacaggtctatatgagaaaccttctctctcagcccagccgggccccacggttctggcaggagagagcgtgaccttgtcctgcagctcccggagctcctatgacatgtaccatctatccagggagggggaggcccatgaacgtaggttctctgcagggcccaaggtcaacggaacattccaggccgactttcctctgggccctgccacccacggaggaacctacagatgcttcggctctttccgtgactctccatacgagtggtcaaactcgagtgacccactgcttgtttctgtcacaggaaacccttcaaatagttggccttcacccactgaaccaagctccaaaaccggtaaccccagacacctacatgttctgattgggacctcagtggtcaaaatccctttcaccatcctcctcttctttctccttcatcgctggtgctccgacaaaaaaaatgctgctgtaatggaccaagagcctgcagggaacagaacagtgaacagcgagagaaaaatcactcgcccttctgagaggcccaagacacccccaacagataccagcatgtacatagaacttccaaatgctgagcccagatccaaagttgtcttctgtccacgagcaccacagtcaggccttgaggggatcttctagggagacaacagccctgtctcaaaaccgggttgccagctcccatgtaccagcagctggaatctgaaggcatcagtcttcatctt

SEQ ID NO: 146484 - DNA, 1101 bp, Homo sapiens
  Payload ID: 8983
  Gene Symbol: KIR2DS1
  Gene Name: killer cell immunoglobulin-like receptor, two domains, short cytoplasmic tail, 1
  ENST ID: ENST00000622039
  CDS Start-End: 14-928
caccggcagcaccatgtcgctcacggtcgtcagcatggcgtgtgttgggttcttcttgctgcagggggcctggccacatgagggagtccacagaaaaccttccctcctggcccacccaggtcgcctggtgaaatcagaagagacagtcatcctgcaatgttggtcagatgtcatgtttgaacacttccttctgcacagagaggggatgtttaacgacactttgcgcctcattggagaacaccatgatggggtctccaaggccaacttctccatcagtcgcatgaagcaagacctggcagggacctacagatgctacggttctgttactcactccccctatcagttgtcagctcccagtgaccctctggacatcgtgatcataggtctatatgagaaaccttctctctcagcccagccgggccccacggttctggcaggagagaatgtgaccttgtcctgcagctcccggagctcctatgacatgtaccatctatccagggaaggggaggcccatgaacgtaggctccctgcagggaccaaggtcaacggaacattccaggccaactttcctctgggccctgccacccatggagggacctacagatgcttcggctctttccgtgactctccatacgagtggtcaaagtcaagtgacccactgcttgtttctgtcacaggaaacccttcaaatagttggccttcacccactgaaccaagctccgaaaccggtaaccccagacacctacatgttctgattgggacctcagtggtcaaaatccctttcaccatcctcctcttctttctccttcatcgctggtgctccgacaaaaaaaatgctgctgtaatggaccaagagcctgcagggaacagaacagtgaacagcgaggattctgatgaacaagaccatcaggaggtgtcatacgcataattggatcactgtgttttcacacagagaaaaatcactcgcccttctgagaggcccaagacacccccaacagataccagcatgtacatagaacttccaaatgctgagcccagatccaaagttgtcttctgtccacgagcaccacagtcaggccttgaggggatcttctagggaga

SEQ ID NO: 146485 - DNA, 1384 bp, Homo sapiens
  Payload ID: 8983
  Gene Symbol: KIR2DS1
  Gene Name: killer cell immunoglobulin-like receptor, two domains, short cytoplasmic tail, 1
  ENST ID: ENST00000622218
  CDS Start-End: 39-953
gagctggggcgcagccgcctgtctgcaccggcagcaccatgtcgctcatggtcgtcagcatggcgtgtgttgggttcttcttgctgcagggggcctggccacatgagggagtccacagaaaaccttccctcctggcccacccaggtcgcctggtgaaatcagaagagacagtcatcctgcaatgttggtcagatgtcatgtttgaacacttccttctgcacagagaggggatgtttaacgacactttgcgcctcattggagaacaccatgatggggtctccaaggccaacttctccatcagtcgcatgaagcaagacctggcagggacctacagatgctacggttctgttactcactccccctatcagttgtcagctcccagtgaccctctggacatcgtgatcataggtctatatgagaaaccttctctctcagcccagccgggccccacggttctggcaggagagaatgtgaccttgtcctgcagctcccggagctcctatgacatgtaccatctatccagggaaggggaggcccatgaacgtaggctccctgcagggaccaaggtcaacggaacattccaggccaactttcctctgggccctgccacccatggagggacctacagatgcttcggctctttccgtgactctccatacgagtggtcaaagtcaagtgacccactgcttgtttctgtcacaggaaacccttcaaatagttggccttcacccactgaaccaagctccgaaaccggtaaccccagacacctacatgttctgattgggacctcagtggtcaaaatccctttcaccatcctcctcttctttctccttcatcgctggtgctccgacaaaaaaaatgctgctgtaatggaccaagagcctgcagggaacagaacagtgaacagcgaggattctgatgaacaagaccatcaggaggtgtcatacgcataattggatcactgtgttttcacacagagaaaaatcactcgcccttctgagaggcccaagacacccccaacagataccagcatgtacatagaacttccaaatgctgagcccagatccaaagttgtcttctgtccacgagcaccacagtcaggccttgaggggatcttctagggagacaacagccctgtctcaaaaccgggttgccagctcccatgtaccagcagctggaatctgaaggcatcagtcttcatcttagggcatcgctcttcctcacaccacgaatctgaacatgcctctctcttgcttacaaatgtctaaggtccccactgcctgctggagagaaaacacactcctttgcttagcccacaattctccatttcacttgacccctgcccacctctccaacctaactggcttacttcctagtctacctg

SEQ ID NO: 146486 - DNA, 1577 bp, Homo sapiens
  Payload ID: 8983
  Gene Symbol: KIR2DS1
  Gene Name: killer cell immunoglobulin-like receptor, two domains, short cytoplasmic tail, 1
  ENST ID: ENST00000615190
  CDS Start-End: 41-955
ctgagctcggtcgcggctgcctgtctgctccggcagcaccatgtcgctcttggtcgtcagcatggcgtgtgttgggttcttcttgctgcagggggcctggccacatgagggagtccacagaaaaccttccctcctggcccacccaggtcgcctggtgaaatcagaagagacagtcatcctgcaatgttggtcagatgtcatgtttgaacacttccttctgcacagagaggggatgtttaacgacactttgcgcctcattggagaacaccatgatggggtctccaaggccaacttctccatcagtcgcatgaagcaagacctggcagggacctacagatgctacggttctgttactcactccccctatcagttgtcagctcccagtgaccctctggacatcgtgatcataggtctatatgagaaaccttctctctcagcccagccgggccccacggttctggcaggagagaatgtgaccttgtcctgcagctcccggagctcctatgacatgtaccatctatccagggaaggggaggcccatgaacgtaggctccctgcagggaccaaggtcaacggaacattccaggccaactttcctctgggccctgccacccatggagggacctacagatgcttcggctctttccgtgactctccatacgagtggtcaaagtcaagtgacccactgcttgtttctgtcacaggaaacccttcaaatagttggccttcacccactgaaccaagctccgaaaccggtaaccccagacacctacatgttctgattgggacctcagtggtcaaaatccctttcaccatcctcctcttctttctccttcatcgctggtgctccgacaaaaaaaatgctgctgtaatggaccaagagcctgcagggaacagaacagtgaacagcgaggattctgatgaacaagaccatcaggaggtgtcatacgcataattggatcactgtgttttcacacagagaaaaatcactcgcccttctgagaggcccaagacacccccaacagataccagcatgtacatagaacttccaaatgctgagcccagatccaaagttgtcttctgtccacgagcaccacagtcaggccttgaggggatcttctagggagacaacagccctgtctcaaaaccgggttgccagctcccatgtaccagcagctggaatctgaaggcatcagtcttcatcttagggcatcgctcttcctcacaccacgaatctgaacatgcctctctcttgcttacaaatgtctaaggtccccactgcctgctggagagaaaacacactcctttgcttagcccacaattctccatttcacttgacccctgcccacctctccaacctaactggcttacttcctagtctacctgaggctgcaatcacactgaggaactcacaattccaaacatacaagaggctgcctcttaacacagcacttagacacgtgctgttccacctcccttcagactatctttcagccttctgccagcagtaaaacttataaattttttaaataatttcaatgtagttttcccgccttcaaataaacatgtctgccctc

SEQ ID NO: 146487 - DNA, 1323 bp, Homo sapiens
  Payload ID: 8983
  Gene Symbol: KIR2DS1
  Gene Name: killer cell immunoglobulin-like receptor, two domains, short cytoplasmic tail, 1
  ENST ID: ENST00000616491
  CDS Start-End: 41-955
ctgagctcggtcgcggctgcctgtctgctccggcagcaccatgtcgctcttggtcgtcagcatggcgtgtgttgggttcttcttgctgcagggggcctggccacatgagggagtccacagaaaaccttccctcctggcccacccaggtcgcctggtgaaatcagaagagacagtcatcctgcaatgttggtcagatgtcatgtttgaacacttccttctgcacagagaggggatgtttaacgacactttgcgcctcattggagaacaccatgatggggtctccaaggccaacttctccatcagtcgcatgaagcaagacctggcagggacctacagatgctacggttctgttactcactccccctatcagttgtcagctcccagtgaccctctggacatcgtgatcataggtctatatgagaaaccttctctctcagcccagccgggccccacggttctggcaggagagaatgtgaccttgtcctgcagctcccggagctcctatgacatgtaccatctatccagggaaggggaggcccatgaacgtaggctccctgcagggaccaaggtcaacggaacattccaggccaactttcctctgggccctgccacccatggagggacctacagatgcttcggctctttccgtgactctccatacgagtggtcaaagtcaagtgacccactgcttgtttctgtcacaggaaacccttcaaatagttggccttcacccactgaaccaagctccgaaaccggtaaccccagacacctacatgttctgattgggacctcagtggtcaaaatccctttcaccatcctcctcttctttctccttcatcgctggtgctccgacaaaaaaaatgctgctgtaatggaccaagagcctgcagggaacagaacagtgaacagcgaggattctgatgaacaagaccatcaggaggtgtcatacgcataattggatcactgtgttttcacacagagaaaaatcactcgcccttctgagaggcccaagacacccccaacagataccagcatgtacatagaacttccaaatgctgagcccagatccaaagttgtcttctgtccacgagcaccacagtcaggccttgaggggatcttctagggagacaacagccctgtctcaaaaccgggttgccagctcccatgtaccagcagctggaatctgaaggcatcagtcttcatcttagggcatcgctcttcctcacaccacgaatctgaacatgcctctctcttgcttacaaatgtctaaggtccccactgcctgctggagagaaaacacactcctttgcttagcccacaatt

SEQ ID NO: 146488 - DNA, 1372 bp, Homo sapiens
  Payload ID: 8983
  Gene Symbol: KIR2DS1
  Gene Name: killer cell immunoglobulin-like receptor, two domains, short cytoplasmic tail, 1
  ENST ID: ENST00000621135
  CDS Start-End: 31-1077
tcgcggctgcctgtctgctccggcagcaccatgtcgctcttggtcgtcagcatggcgtgtgttgggttcttcttgctgcagggggcctggccacatgagggagtccacagaaaaccttccctcctggcccacccaggtcgcctggtgaaatcagaagagacagtcatcctgcaatgttggtcagatgtcatgtttgaacacttccttctgcacagagaggggatgtttaacgacactttgcgcctcattggagaacaccatgatggggtctccaaggccaacttctccatcagtcgcatgaagcaagacctggcagggacctacagatgctacggttctgttactcactccccctatcagttgtcagctcccagtgaccctctggacatcgtgatcataggtctatatgagaaaccttctctctcagcccagccgggccccacggttctggcaggagagaatgtgaccttgtcctgcagctcccggagctcctatgacatgtaccatctatccagggaaggggaggcccatgaacgtaggctccctgcagggaccaaggtcaacggaacattccaggccaactttcctctgggccctgccacccatggagggacctacagatgcttcggctctttccgtgactctccatacgagtggtcaaagtcaagtgacccactgcttgtttctgtcacaggaaacccttcaaatagttggccttcacccactgaaccaagctccgaaaccggtaaccccagacacctacatgttctgattgggacctcagtggtcaaaatccctttcaccatcctcctcttctttctccttcatcgctggtgctccgacaaaaaaaatgctgctgtaatggaccaagagcctgcagggaacagaacagtgaacagcgaggattctgatgaacaagaccatcaggaggtgtcatacgcattggatcactgtgttttcacacagagaaaaatcactcgcccttctgagaggcccaagacacccccaacagataccagcatgtacatagaacttccaaatgctgagcccagatccaaagttgtcttctgtccacgagcaccacagtcaggccttgaggggatcttctagggagacaacagccctgtctcaaaaccgggttgccagctcccatgtaccagcagctggaatctgaaggcatcagtcttcatcttagggcatcgctcttcctcacaccacgaatctgaacatgcctctctcttgcttacaaatgtctaaggtccccactgcctgctggagagaaaacacactcctttgcttagcccacaattctccatttcacttgacccctgcccacctctccaacctaactggcttacttcctagtctacct

SEQ ID NO: 146489 - DNA, 1630 bp, Homo sapiens
  Payload ID: 8983
  Gene Symbol: KIR2DS1
  Gene Name: killer cell immunoglobulin-like receptor, two domains, short cytoplasmic tail, 1
  ENST ID: ENST00000612447
  CDS Start-End: 90-1004
tgtaaactgcatgggcagggcgccaaataacatcctgtgcgctgctgagctgagctggggcgcggccgcctgtctgcaccggcagcaccatgtcgctcacggtcgtcagcatggcgtgtgttgggttcttcttgctgcagggggcctggccacatgagggagtccacagaaaaccttccctcctggcccacccaggtcgcctggtgaaatcagaagagacagtcatcctgcaatgttggtcagatgtcatgtttgaacacttccttctgcacagagaggggatgtttaacgacactttgcgcctcattggagaacaccatgatggggtctccaaggccaacttctccatcagtcgcatgaagcaagacctggcagggacctacagatgctacggttctgttactcactccccctatcagttgtcagctcccagtgaccctctggacatcgtgatcataggtctatatgagaaaccttctctctcagcccagccgggccccacggttctggcaggagagaatgtgaccttgtcctgcagctcccggagctcctatgacatgtaccatctatccagggaaggggaggcccatgaacgtaggctccctgcagggaccaaggtcaacggaacattccaggccaactttcctctgggccctgccacccatggagggacctacagatgcttcggctctttccgtgactctccatacgagtggtcaaagtcaagtgacccactgcttgtttctgtcacaggaaacccttcaaatagttggccttcacccactgaaccaagctccgaaaccggtaaccccagacacctacatgttctgattgggacctcagtggtcaaaatccctttcaccatcctcctcttctttctccttcatcgctggtgctccgacaaaaaaaatgctgctgtaatggaccaagagcctgcagggaacagaacagtgaacagcgaggattctgatgaacaagaccatcaggaggtgtcatacgcataattggatcactgtgttttcacacagagaaaaatcactcgcccttctgagaggcccaagacacccccaacagataccagcatgtacatagaacttccaaatgctgagcccagatccaaagttgtcttctgtccacgagcaccacagtcaggccttgaggggatcttctagggagacaacagccctgtctcaaaaccgggttgccagctcccatgtaccagcagctggaatctgaaggcatcagtcttcatcttagggcatcgctcttcctcacaccacgaatctgaacatgcctctctcttgcttacaaatgtctaaggtccccactgcctgctggagagaaaacacactcctttgcttagcccacaattctccatttcacttgacccctgcccacctctccaacctaactggcttacttcctagtctacctgaggctgcaatcacactgaggaactcacaattccaaacatacaagaggctgcctcttaacacagcacttagacacgtgctgttccacctcccttcagactatctttcagccttctgccagcagtaaaacttataaattttttaaataatttcaatgtagttttcccgccttcaaataaacatgtctgccctcatgg

SEQ ID NO: 146490 - DNA, 1101 bp, Homo sapiens; identical to SEQ ID NO: 146484
  Payload ID: 8983
  Gene Symbol: KIR2DS1
  Gene Name: killer cell immunoglobulin-like receptor, two domains, short cytoplasmic tail, 1
  ENST ID: ENST00000621207
  CDS Start-End: 14-928

SEQ ID NO: 146491 - DNA, 1557 bp, Homo sapiens
  Payload ID: 8983
  Gene Symbol: KIR2DS1
  Gene Name: killer cell immunoglobulin-like receptor, two domains, short cytoplasmic tail, 1
  ENST ID: ENST00000611996
  CDS Start-End: 20-934
tgtctgcaccggcagcaccatgtcgctcacggtcgtcagcatggcgtgtgttgggttcttcttgctgcagggggcctggccacatgagggagtccacagaaaaccttccctcctggcccacccaggtcgcctggtgaaatcagaagagacagtcatcctgcaatgttggtcagatgtcatgtttgaacacttccttctgcacagagaggggatgtttaacgacactttgcgcctcattggagaacaccatgatggggtctccaaggccaacttctccatcagtcgcatgaagcaagacctggcagggacctacagatgctacggttctgttactcactccccctatcagttgtcagctcccagtgaccctctggacatcgtgatcataggtctatatgagaaaccttctctctcagcccagccgggccccacggttctggcaggagagaatgtgaccttgtcctgcagctcccggagctcctatgacatgtaccatctatccagggaaggggaggcccatgaacgtaggctccctgcagggaccaaggtcaacggaacattccaggccaactttcctctgggccctgccacccatggagggacctacagatgcttcggctctttccgtgactctccatacgagtggtcaaagtcaagtgacccactgcttgtttctgtcacaggaaacccttcaaatagttggccttcacccactgaaccaagctccgaaaccggtaaccccagacacctacatgttctgattgggacctcagtggtcaaaatccctttcaccatcctcctcttctttctccttcatcgctggtgctccgacaaaaaaaatgctgctgtaatggaccaagagcctgcagggaacagaacagtgaacagcgaggattctgatgaacaagaccatcaggaggtgtcatacgcataattggatcactgtgttttcacacagagaaaaatcactcgcccttctgagaggcccaagacacccccaacagataccagcatgtacatagaacttccaaatgctgagcccagatccaaagttgtcttctgtccacgagcaccacagtcaggccttgaggggatcttctagggagacaacagccctgtctcaaaaccgggttgccagctcccatgtaccagcagctggaatctgaaggcatcagtcttcatcttagggcatcgctcttcctcacaccacgaatctgaacatgcctctctcttgcttacaaatgtctaaggtccccactgcctgctggagagaaaacacactcctttgcttagcccacaattctccatttcacttgacccctgcccacctctccaacctaactggcttacttcctagtctacctgaggctgcaatcacactgaggaactcacaattccaaacatacaagaggctgcctcttaacacagcacttagacacgtgctgttccacctcccttcagactatctttcagccttctgccagcagtaaaacttataaattttttaaataatttcaatgtagttttcccgccttcaaataaacatgtctgccctca

SEQ ID NO: 146492 - DNA, 1323 bp, Homo sapiens
  Payload ID: 8983
  Gene Symbol: KIR2DS1
  Gene Name: killer cell immunoglobulin-like receptor, two domains, short cytoplasmic tail, 1
  ENST ID: ENST00000618071
  CDS Start-End: 41-955
ctgagctggggcgcggccgcctgtctgcaccggcagcaccatgtcgctcacggtcgtcagcatggcgtgtgttgggttcttcttgctgcagggggcctggccacatgagggagtccacagaaaaccttccctcctggcccacccaggtcgcctggtgaaatcagaagagacagtcatcctgcaatgttggtcagatgtcatgtttgaacacttccttctgcacagagaggggatgtttaacgacactttgcgcctcattggagaacaccatgatggggtctccaaggccaacttctccatcagtcgcatgaagcaagacctggcagggacctacagatgctacggttctgttactcactccccctatcagttgtcagctcccagtgaccctctggacatcgtgatcataggtctatatgagaaaccttctctctcagcccagccgggccccacggttctggcaggagagaatgtgaccttgtcctgcagctcccggagctcctatgacatgtaccatctatccagggaaggggaggcccatgaacgtaggctccctgcagggaccaaggtcaacggaacattccaggccaactttcctctgggccctgccacccatggagggacctacagatgcttcggctctttccgtgactctccatacgagtggtcaaagtcaagtgacccactgcttgtttctgtcacaggaaacccttcaaatagttggccttcacccactgaaccaagctccgaaaccggtaaccccagacacctacatgttctgattgggacctcagtggtcaaaatccctttcaccatcctcctcttctttctccttcatcgctggtgctccgacaaaaaaaatgctgctgtaatggaccaagagcctgcagggaacagaacagtgaacagcgaggattctgatgaacaagaccatcaggaggtgtcatacgcataattggatcactgtgttttcacacagagaaaaatcactcgcccttctgagaggcccaagacacccccaacagataccagcatgtacatagaacttccaaatgctgagcccagatccaaagttgtcttctgtccacgagcaccacagtcaggccttgaggggatcttctagggagacaacagccctgtctcaaaaccgggttgccagctcccatgtaccagcagctggaatctgaaggcatcagtcttcatcttagggcatcgctcttcctcacaccacgaatctgaacatgcctctctcttgcttacaaatgtctaaggtccccactgcctgctggagagaaaacacactcctttgcttagcccacaatt

SEQ ID NO: 146493 - DNA, 1015 bp, Homo sapiens
  Payload ID: 8983
  Gene Symbol: KIR2DS1
  Gene Name: killer cell immunoglobulin-like receptor, two domains, short cytoplasmic tail, 1
  ENST ID: ENST00000617661
  CDS Start-End: 12-926
ccggcagcaccatgtcgctcacggtcgtcagcatggcgtgtgttgggttcttcttgctgcagggggcctggccacatgagggagtccacagaaaaccttccctcctggcccacccaggtcgcctggtgaaatcagaagagacagtcatcctgcaatgttggtcagatgtcatgtttgaacacttccttctgcacagagaggggatgtttaacgacactttgcgcctcattggagaacaccatgatggggtctccaaggccaacttctccatcagtcgcatgaagcaagacctggcagggacctacagatgctacggttctgttactcactccccctatcagttgtcagctcccagtgaccctctggacatcgtgatcataggtctatatgagaaaccttctctctcagcccagccgggccccacggttctggcaggagagaatgtgaccttgtcctgcagctcccggagctcctatgacatgtaccatctatccagggaaggggaggcccatgaacgtaggctccctgcagggaccaaggtcaacggaacattccaggccaactttcctctgggccctgccacccatggagggacctacagatgcttcggctctttccgtgactctccatacgagtggtcaaagtcaagtgacccactgcttgtttctgtcacaggaaacccttcaaatagttggccttcacccactgaaccaagctccgaaaccggtaaccccagacacctacatgttctgattgggacctcagtggtcaaaatccctttcaccatcctcctcttctttctccttcatcgctggtgctccgacaaaaaaaatgctgctgtaatggaccaagagcctgcagggaacagaacagtgaacagcgaggattctgatgaacaagaccatcaggaggtgtcatacgcataattggatcactgtgttttcacacagagaaaaatcactcgcccttctgagaggcccaagacacccccaacagataccagcatgtacataga

SEQ ID NO: 146494 - DNA, 1535 bp, Homo sapiens
  Payload ID: 8983
  Gene Symbol: KIR2DS1
  Gene Name: killer cell immunoglobulin-like receptor, two domains, short cytoplasmic tail, 1
  ENST ID: ENST00000613951
  CDS Start-End: 20-913
gtcgctcacggtcgtcagcatggcgtgtgttgggttcttcttgctgcagggggcctggccacatgagggagtccacagaaaaccttccctcctggcccacccaggtcgcctggtgaaatcagaagagacagtcatcctgcaatgttggtcagatgtcatgtttgaacacttccttctgcacagagaggggatgtttaacgacactttgcgcctcattggagaacaccatgatggggtctccaaggccaacttctccatcagtcgcatgaagcaagacctggcagggacctacagatgctacggttctgttactcactccccctatcagttgtcagctcccagtgaccctctggacatcgtgatcataggtctatatgagaaaccttctctctcagcccagccgggccccacggttctggcaggagagaatgtgaccttgtcctgcagctcccggagctcctatgacatgtaccatctatccagggaaggggaggcccatgaacgtaggctccctgcagggaccaaggtcaacggaacattccaggccaactttcctctgggccctgccacccatggagggacctacagatgcttcggctctttccgtgactctccatacgagtggtcaaagtcaagtgacccactgcttgtttctgtcacaggaaacccttcaaatagttggccttcacccactgaaccaagctccgaaaccggtaaccccagacacctacatgttctgattgggacctcagtggtcaaaatccctttcaccatcctcctcttctttctccttcatcgctggtgctccgacaaaaaaaatgctgctgtaatggaccaagagcctgcagggaacagaacagtgaacagcgaggattctgatgaacaagaccatcaggaggtgtcatacgcataattggatcactgtgttttcacacagagaaaaatcactcgcccttctgagaggcccaagacacccccaacagataccagcatgtacatagaacttccaaatgctgagcccagatccaaagttgtcttctgtccacgagcaccacagtcaggccttgaggggatcttctagggagacaacagccctgtctcaaaaccgggttgccagctcccatgtaccagcagctggaatctgaaggcatcagtcttcatcttagggcatcgctcttcctcacaccacgaatctgaacatgcctctctcttgcttacaaatgtctaaggtccccactgcctgctggagagaaaacacactcctttgcttagcccacaattctccatttcacttgacccctgcccacctctccaacctaactggcttacttcctagtctacctgaggctgcaatcacactgaggaactcacaattccaaacatacaagaggctgcctcttaacacagcacttagacacgtgctgttccacctcccttcagactatctttcagccttctgccagcagtaaaacttataaattttttaaataatttcaatgtagttttcccgccttcaaataaacatgtctgccctc

SEQ ID NO: 146495 - DNA, 1579 bp, Homo sapiens
  Payload ID: 8984
  Gene Symbol: KIR2DS2
  Gene Name: killer cell immunoglobulin-like receptor, two domains, short cytoplasmic tail, 2
  ENST ID: ENST00000614622
  CDS Start-End: 90-953
tgtaaactgcatgggcagggcgccaaataacatcctgtgcgctgctgagctgagctggggcgcggccgcctgtctgcacagacagcaccatgtcgctcatggtcgtcagcatggcgtgtgttgggttcttcttgctgcagggggcctggccacatgagggagtccacagaaaaccttccctcctggcccacccaggtcccctggtgaaatcagaagagacagtcatcctgcaatgttggtcagatgtcaggtttgagcacttccttctgcacagagaggggaagtataaggacactttgcacctcattggagagcaccatgatggggtctccaaggccaacttctccatcggtcccatgatgcaagaccttgcagggacctacagatgctacggttctgttactcactccccctatcagttgtcagctcccagtgaccctctggacatcgtcatcacaggtctatatgagaaaccttctctctcagcccagccgggccccacggttttggcaggagagagcgtgaccttgtcctgcagctcccggagctcctatgacatgtaccatctatccagggagggggaggcccatgaacgtaggttctctgcagggcccaaggtcaacggaacattccaggccgactttcctctgggccctgccacccacggaggaacctacagatgcttcggctctttccgtgactctccctatgagtggtcaaactcgagtgacccactgcttgtttctgtcacaggtaaccccagacacctgcatgttctgattgggacctcagtggtcaaaatccctttcaccatcctcctcttctttctccttcatcgctggtgctccaacaaaaaaaatgctgctgtaatggaccaagagcctgcagggaacagaacagtgaacagcgaggattctgatgaacaagaccatcaggaggtgtcatacgcataattggatcactgtgttttcacacagagagaaatcactcgcccttctgagaggcccaagacacccccaacagataccagcatgtacatagaacttccaaatgctgagcccagatccaaagttgtcttctgtccacgagcaccacagtcaggccttgaggggatcttctagggagacaacagccctgtctcaaaaccgggttgccagctcccatgtaccagcagctggaatctgaaggcatcagtcttcatcttagggcatcgctcttcctcacaccacgaatctgaacatgcctctctcttgcttacaaatgtctaaggtccccactgcctgctggagagaaaacacactcctttgcttagcccacaattctccatttcacttgacccctgcccacctctccaacctaactagcttacttcctagtctacctgaggctgcaatcacactgaggaactcacaattccaaacatacaagaggctccctcttaacacagcacttagacacgtgctgttccacctcccttcagactatctttcagccttctgccagcagtaaaacttataaattttttaaataatttcaatgtagttttcccgccttcaaataaacatgtctgccctcatgg

SEQ ID NO: 146496 - DNA, 1557 bp, Homo sapiens
  Payload ID: 8984
  Gene Symbol: KIR2DS2
  Gene Name: killer cell immunoglobulin-like receptor, two domains, short cytoplasmic tail, 2
  Uniprot ID: P43631
  ENST ID: ENST00000617984
  CDS Start-End: 20-934
tgtctgcacagacagcaccatgtcgctcatggtcgtcagcatggcgtgtgttgggttcttcttgctgcagggggcctggccacatgagggagtccacagaaaaccttccctcctggcccacccaggtcccctggtgaaatcagaagagacagtcatcctgcaatgttggtcagatgtcaggtttgagcacttccttctgcacagagaggggaagtataaggacactttgcacctcattggagagcaccatgatggggtctccaaggccaacttctccatcggtcccatgatgcaagaccttgcagggacctacagatgctacggttctgttactcactccccctatcagttgtcagctcccagtgaccctctggacatcgtcatcacaggtctatatgagaaaccttctctctcagcccagccgggccccacggttttggcaggagagagcgtgaccttgtcctgcagctcccggagctcctatgacatgtaccatctatccagggagggggaggcccatgaacgtaggttctctgcagggcccaaggtcaacggaacattccaggccgactttcctctgggccctgccacccacggaggaacctacagatgcttcggctctttccgtgactctccctatgagtggtcaaactcgagtgacccactgcttgtttctgtcacaggaaacccttcaaatagttggccttcacccactgaaccaagctccaaaaccggtaaccccagacacctgcatgttctgattgggacctcagtggtcaaaatccctttcaccatcctcctcttctttctccttcatcgctggtgctccaacaaaaaaaatgctgctgtaatggaccaagagcctgcagggaacagaacagtgaacagcgaggattctgatgaacaagaccatcaggaggtgtcatacgcataattggatcactgtgttttcacacagagagaaatcactcgcccttctgagaggcccaagacacccccaacagataccagcatgtacatagaacttccaaatgctgagcccagatccaaagttgtcttctgtccacgagcaccacagtcaggccttgaggggatcttctagggagacaacagccctgtctcaaaaccgggttgccagctcccatgtaccagcagctggaatctgaaggcatcagtcttcatcttagggcatcgctcttcctcacaccacgaatctgaacatgcctctctcttgcttacaaatgtctaaggtccccactgcctgctggagagaaaacacactcctttgcttagcccacaattctccatttcacttgacccctgcccacctctccaacctaactagcttacttcctagtctacctgaggctgcaatcacactgaggaactcacaattccaaacatacaagaggctccctcttaacacagcacttagacacgtgctgttccacctcccttcagactatctttcagccttctgccagcagtaaaacttataaattttttaaataatttcaatgtagttttcccgccttcaaataaacatgtctgccctca

SEQ ID NO: 146497 - DNA, 1557 bp, Homo sapiens; identical to SEQ ID NO: 146496
  Payload ID: 8984
  Gene Symbol: KIR2DS2
  Gene Name: killer cell immunoglobulin-like receptor, two domains, short cytoplasmic tail, 2
  Uniprot ID: P43631
  ENST ID: ENST00000617284
  CDS Start-End: 20-934

SEQ ID NO: 146498 - DNA, 1557 bp, Homo sapiens; identical to SEQ ID NO: 146496
  Payload ID: 8984
  Gene Symbol: KIR2DS2
  Gene Name: killer cell immunoglobulin-like receptor, two domains, short cytoplasmic tail, 2
  Uniprot ID: P43631
  ENST ID: ENST00000612182
  CDS Start-End: 20-934

SEQ ID NO: 146499 - DNA, 1569 bp, Homo sapiens
  Payload ID: 8984
  Gene Symbol: KIR2DS2
  Gene Name: killer cell immunoglobulin-like receptor, two domains, short cytoplasmic tail, 2
  Uniprot ID: P43631
  ENST ID: ENST00000618510
  CDS Start-End: 32-946
ggcgcggccgcctgtctgcacagacagcaccatgtcgctcatggtcgtcagcatggcgtgtgttgggttcttcttgctgcagggggcctggccacatgagggagtccacagaaaaccttccctcctggcccacccaggtcccctggtgaaatcagaagagacagtcatcctgcaatgttggtcagatgtcaggtttgagcacttccttctgcacagagaggggaagtataaggacactttgcacctcattggagagcaccatgatggggtctccaaggccaacttctccatcggtcccatgatgcaagaccttgcagggacctacagatgctacggttctgttactcactccccctatcagttgtcagctcccagtgaccctctggacatcgtcatcacaggtctatatgagaaaccttctctctcagcccagccgggccccacggttttggcaggagagagcgtgaccttgtcctgcagctcccggagctcctatgacatgtaccatctatccagggagggggaggcccatgaacgtaggttctctgcagggcccaaggtcaacggaacattccaggccgactttcctctgggccctgccacccacggaggaacctacagatgcttcggctctttccgtgactctccctatgagtggtcaaactcgagtgacccactgcttgtttctgtcacaggaaacccttcaaatagttggccttcacccactgaaccaagctccaaaaccggtaaccccagacacctgcatgttctgattgggacctcagtggtcaaaatccctttcaccatcctcctcttctttctccttcatcgctggtgctccaacaaaaaaaatgctgctgtaatggaccaagagcctgcagggaacagaacagtgaacagcgaggattctgatgaacaagaccatcaggaggtgtcatacgcataattggatcactgtgttttcacacagagagaaatcactcgcccttctgagaggcccaagacacccccaacagataccagcatgtacatagaacttccaaatgctgagcccagatccaaagttgtcttctgtccacgagcaccacagtcaggccttgaggggatcttctagggagacaacagccctgtctcaaaaccgggttgccagctcccatgtaccagcagctggaatctgaaggcatcagtcttcatcttagggcatcgctcttcctcacaccacgaatctgaacatgcctctctcttgcttacaaatgtctaaggtccccactgcctgctggagagaaaacacactcctttgcttagcccacaattctccatttcacttgacccctgcccacctctccaacctaactagcttacttcctagtctacctgaggctgcaatcacactgaggaactcacaattccaaacatacaagaggctccctcttaacacagcacttagacacgtgctgttccacctcccttcagactatctttcagccttctgccagcagtaaaacttataaattttttaaataatttcaatgtagttttcccgccttcaaataaacatgtctgccctca

SEQ ID NO: 146500 - DNA, 1558 bp, Homo sapiens
  Payload ID: 8984
  Gene Symbol: KIR2DS2
  Gene Name: killer cell immunoglobulin-like receptor, two domains, short cytoplasmic tail, 2
  Uniprot ID: P43631
  ENST ID: ENST00000617419
  CDS Start-End: 1-915
atgtcgctcatggtcgtcagcatggcgtgtgttgggttcttcttgctgcagggggcctggccacatgagggagtccacagaaaaccttccctcctggcccacccaggtcccctggtgaaatcagaagagacagtcatcctgcaatgttggtcagatgtcaggtttgagcacttccttctgcacagagaggggaagtataaggacactttgcacctcattggagagcaccatgatggggtctccaaggccaacttctccatcggtcccatgatgcaagaccttgcagggacctacagatgctacggttctgttactcactccccctatcagttgtcagctcccagtgaccctctggacatcgtcatcacaggtctatatgagaaaccttctctctcagcccagccgggccccacggttttggcaggagagagcgtgaccttgtcctgcagctcccggagctcctatgacatgtaccatctatccagggagggggaggcccatgaacgtaggttctctgcagggcccaaggtcaacggaacattccaggccgactttcctctgggccctgccacccacggaggaacctacagatgcttcggctctttccgtgactctccctatgagtggtcaaactcgagtgacccactgcttgtttctgtcacaggaaacccttcaaatagttggccttcacccactgaaccaagctccaaaaccggtaaccccagacacctgcatgttctgattgggacctcagtggtcaaaatccctttcaccatcctcctcttctttctccttcatcgctggtgctccaacaaaaaaaatgctgctgtaatggaccaagagcctgcagggaacagaacagtgaacagcgaggattctgatgaacaagaccatcaggaggtgtcatacgcataattggatcactgtgttttcacacagagagaaatcactcgcccttctgagaggcccaagacacccccaacagataccagcatgtacatagaacttccaaatgctgagcccagatccaaagttgtcttctgtccacgagcaccacagtcaggccttgaggggatcttctagggagacaacagccctgtctcaaaaccgggttgccagctcccatgtaccagcagctggaatctgaaggcatcagtcttcatcttagggcatcgctcttcctcacaccacgaatctgaacatgcctctctcttgcttacaaatgtctaaggtccccactgcctgctggagaaaaaacacactcctttgcttagcccacagttctccatttcacttgacccctgcccacctctccaacctaactggcttacttcctagtctacttgaggctgcaatcacactgaggaactcacaattccaaacatacaagaggctccctcttaacgcagcacttagacacgtgttgttccaccttccctcatgctgttccacctcccctcagactagctttcagtcttctgtcagcagtaaaacttatatattttttaaaataacttcaatgtagttttccatccttcaaataaacatgtctgccccc

SEQ ID NO: 146501 - DNA, 1058 bp, Homo sapiens
  Payload ID: 8984
  Gene Symbol: KIR2DS2
  Gene Name: killer cell immunoglobulin-like receptor, two domains, short cytoplasmic tail, 2
  ENST ID: ENST00000622343
  CDS Start-End: 1-864
atgtcgctcatggtcgtcagcatggcgtgtgttgggttcttcttgctgcagggggcctggccacatgagggagtccacagaaaaccttccctcctggcccacccaggtcccctggtgaaatcagaagagacagtcatcctgcaatgttggtcagatgtcaggtttgagcacttccttctgcacagagaggggaagtataaggacactttgcacctcattggagagcaccatgatggggtctccaaggccaacttctccatcggtcccatgatgcaagaccttgcagggacctacagatgctacggttctgttactcactccccctatcagttgtcagctcccagtgaccctctggacatcgtcatcacaggtctatatgagaaaccttctctctcagcccagccgggccccacggttttggcaggagagagcgtgaccttgtcctgcagctcccggagctcctatgacatgtaccatctatccagggagggggaggcccatgaacgtaggttctctgcagggcccaaggtcaacggaacattccaggccgactttcctctgggccctgccacccacggaggaacctacagatgcttcggctctttccgtgactctccctatgagtggtcaaactcgagtgacccactgcttgtttctgtcacaggtaaccccagacacctgcatgttctgattgggacctcagtggtcaaaatccctttcaccatcctcctcttctttctccttcatcgctggtgctccaacaaaaaaaatgctgctgtaatggaccaagagcctgcagggaacagaacagtgaacagcgaggattctgatgaacaagaccatcaggaggtgtcatacgcataattggatcactgtgttttcacacagagagaaatcactcgcccttctgagaggcccaagacacccccaacagataccagcatgtacatagaacttccaaatgctgagcccagatccaaagttgtcttctgtccacgagcaccacagtcaggccttgaggggatcttctagggagacaacagccctgtctcaaaacc

SEQ ID NO: 146502 - DNA, 1344 bp, Homo sapiens
  Payload ID: 8984
  Gene Symbol: KIR2DS2
  Gene Name: killer cell immunoglobulin-like receptor, two domains, short cytoplasmic tail, 2
  Uniprot ID: P43631
  ENST ID: ENST00000622127
  CDS Start-End: 90-1004
tgtaaactgcatgggcagggcgccaaataacatcctgtgcgctgctgagctgagctggggcgcggccgcctgtctgcacagacagcaccatgtcgctcatggtcgtcagcatggcgtgtgttgggttcttcttgctgcagggggcctggccacatgagggagtccacagaaaaccttccctcctggcccacccaggtcccctggtgaaatcagaagagacagtcatcctgcaatgttggtcagatgtcaggtttgagcacttccttctgcacagagaggggaagtataaggacactttgcacctcattggagagcaccatgatggggtctccaaggccaacttctccatcggtcccatgatgcaagaccttgcagggacctacagatgctacggttctgttactcactccccctatcagttgtcagctcccagtgaccctctggacatcgtcatcacaggtctatatgagaaaccttctctctcagcccagccgggccccacggttttggcaggagagagcgtgaccttgtcctgcagctcccggagctcctatgacatgtaccatctatccagggagggggaggcccatgaacgtaggttctctgcagggcccaaggtcaacggaacattccaggccgactttcctctgggccctgccacccacggaggaacctacagatgcttcggctctttccgtgactctccctatgagtggtcaaactcgagtgacccactgcttgtttctgtcacaggaaacccttcaaatagttggccttcacccactgaaccaagctccaaaaccggtaaccccagacacctgcatgttctgattgggacctcagtggtcaaaatccctttcaccatcctcctcttctttctccttcatcgctggtgctccaacaaaaaaaatgctgctgtaatggaccaagagcctgcagggaacagaacagtgaacagcgaggattctgatgaacaagaccatcaggaggtgtcatacgcataattggatcactgtgttttcacacagagaaaaatcactcgcccttctgagaggcccaagacacccccaacagataccagcatgtacatagaacttccaaatgctgagcccagatccaaagttgtcttctgtccacgagcaccacagtcaggccttgaggggatcttctagggagacaacagccctgtctcaaaaccgggttgccagctcccatgtaccagcagctggaatctgaaggcatcagtcttcatcttagggcatcgctcttcctcacaccacgaatctgaacatgcctctctcttgcttacaaatgtctaaggtccccactgcctgctggagagaa

SEQ ID NO: 146503 - DNA, 1397 bp, Homo sapiens
  Payload ID: 8984
  Gene Symbol: KIR2DS2
  Gene Name: killer cell immunoglobulin-like receptor, two domains, short cytoplasmic tail, 2
  Uniprot ID: P43631
  ENST ID: ENST00000616472
  CDS Start-End: 32-946
ggcgcggccgcctgtctgcacagacagcaccatgtcgctcatggtcgtcagcatggcgtgtgttgggttcttcttgctgcagggggcctggccacatgagggagtccacagaaaaccttccctcctggcccacccaggtcccctggtgaaatcagaagagacagtcatcctgcaatgttggtcagatgtcaggtttgagcacttccttctgcacagagaggggaagtataaggacactttgcacctcattggagagcaccatgatggggtctccaaggccaacttctccatcggtcccatgatgcaagaccttgcagggacctacagatgctacggttctgttactcactccccctatcagttgtcagctcccagtgaccctctggacatcgtcatcacaggtctatatgagaaaccttctctctcagcccagccgggccccacggttttggcaggagagagcgtgaccttgtcctgcagctcccggagctcctatgacatgtaccatctatccagggagggggaggcccatgaacgtaggttctctgcagggcccaaggtcaacggaacattccaggccgactttcctctgggccctgccacccacggaggaacctacagatgcttcggctctttccgtgactctccctatgagtggtcaaactcgagtgacccactgcttgtttctgtcacaggaaacccttcaaatagttggccttcacccactgaaccaagctccaaaaccggtaaccccagacacctgcatgttctgattgggacctcagtggtcaaaatccctttcaccatcctcctcttctttctccttcatcgctggtgctccaacaaaaaaaatgctgctgtaatggaccaagagcctgcagggaacagaacagtgaacagcgaggattctgatgaacaagaccatcaggaggtgtcatacgcataattggatcactgtgttttcacacagagagaaatcactcgcccttctgagaggcccaagacacccccaacagataccagcatgtacatagaacttccaaatgctgagcccagatccaaagttgtcttctgtccacgagcaccacagtcaggccttgaggggatcttctagggagacaacagccctgtctcaaaaccgggttgccagctcccatgtaccagcagctggaatctgaaggcatcagtcttcatcttagggcatcgctcttcctcacaccacgaatctgaacatgcctctctcttgcttacaaatgtctaaggtccccactgcctgctggagagaaaacacactcctttgcttagcccacaattctccatttcacttgacccctgcccacctctccaacctaactagcttacttcctagtctacctgaggctgcaatcacactgagg

SEQ ID NO: 146504 - DNA, 1381 bp, Homo sapiens
  Payload ID: 8984
  Gene Symbol: KIR2DS2
  Gene Name: killer cell immunoglobulin-like receptor, two domains, short cytoplasmic tail, 2
  Uniprot ID: P43631
  ENST ID: ENST00000613378
  CDS Start-End: 11-925
agacagcaccatgtcgctcatggtcgtcagcatggcgtgtgttgggttcttcttgctgcagggggcctggccacatgagggagtccacagaaaaccttccctcctggcccacccaggtcccctggtgaaatcagaagagacagtcatcctgcaatgttggtcagatgtcaggtttgagcacttccttctgcacagagaggggaagtataaggacactttgcacctcattggagagcaccatgatggggtctccaaggccaacttctccatcggtcccatgatgcaagaccttgcagggacctacagatgctacggttctgttactcactccccctatcagttgtcagctcccagtgaccctctggacatcgtcatcacaggtctatatgagaaaccttctctctcagcccagccgggccccacggttttggcaggagagagcgtgaccttgtcctgcagctcccggagctcctatgacatgtaccatctatccagggagggggaggcccatgaacgtaggttctctgcagggcccaaggtcaacggaacattccaggccgactttcctctgggccctgccacccacggaggaacctacagatgcttcggctctttccgtgactctccctatgagtggtcaaactcgagtgacccactgcttgtttctgtcacaggaaacccttcaaatagttggccttcacccactgaaccaagctccaaaaccggtaaccccagacacctgcatgttctgattgggacctcagtggtcaaaatccctttcaccatcctcctcttctttctccttcatcgctggtgctccaacaaaaaaaatgctgctgtaatggaccaagagcctgcagggaacagaacagtgaacagcgaggattctgatgaacaagaccatcaggaggtgtcatacgcataattggatcactgtgttttcacacagagagaaatcactcgcccttctgagaggcccaagacacccccaacagataccagcatgtacatagaacttccaaatgctgagcccagatccaaagttgtcttctgtccacgagcaccacagtcaggccttgaggggatcttctagggagacaacagccctgtctcaaaaccgggttgccagctcccatgtaccagcagctggaatctgaaggcatcagtcttcatcttagggcatcgctcttcctcacaccacgaatctgaacatgcctctctcttgcttacaaatgtctaaggtccccactgcctgctggagagaaaacacactcctttgcttagcccacaattctccatttcacttgacccctgcccacctctccaacctaactagcttacttcctagtctacctgaggctgcaatcacactgaggaactc

SEQ ID NO: 146505 - DNA, 1465 bp, Homo sapiens
  Payload ID: 8984
  Gene Symbol: KIR2DS2
  Gene Name: killer cell immunoglobulin-like receptor, two domains, short cytoplasmic tail, 2
  Uniprot ID: P43631
  ENST ID: ENST00000614231
  CDS Start-End: 32-946
ggcgcggccgcctgtctgcacagacagcaccatgtcgctcatggtcgtcagcatggcgtgtgttgggttcttcttgctgcagggggcctggccacatgagggagtccacagaaaaccttccctcctggcccacccaggtcccctggtgaaatcagaagagacagtcatcctgcaatgttggtcagatgtcaggtttgagcacttccttctgcacagagaggggaagtataaggacactttgcacctcattggagagcaccatgatggggtctccaaggccaacttctccatcggtcccatgatgcaagaccttgcagggacctacagatgctacggttctgttactcactccccctatcagttgtcagctcccagtgaccctctggacatcgtcatcacaggtctatatgagaaaccttctctctcagcccagccgggccccacggttttggcaggagagagcgtgaccttgtcctgcagctcccggagctcctatgacatgtaccatctatccagggagggggaggcccatgaacgtaggttctctgcagggcccaaggtcaacggaacattccaggccgactttcctctgggccctgccacccacggaggaacctacagatgcttcggctctttccgtgactctccctatgagtggtcaaactcgagtgacccactgcttgtttctgtcacaggaaacccttcaaatagttggccttcacccactgaaccaagctccaaaaccggtaaccccagacacctgcatgttctgattgggacctcagtggtcaaaatccctttcaccatcctcctcttctttctccttcatcgctggtgctccaacaaaaaaaatgctgctgtaatggaccaagagcctgcagggaacagaacagtgaacagcgaggattctgatgaacaagaccatcaggaggtgtcatacgcataattggatcactgtgttttcacacagagagaaatcactcgcccttctgagaggcccaagacacccccaacagataccagcatgtacatagaacttccaaatgctgagcccagatccaaagttgtcttctgtccacgagcaccacagtcaggccttgaggggatcttctagggagacaacagccctgtctcaaaaccgggttgccagctcccatgtaccagcagctggaatctgaaggcatcagtcttcatcttagggcatcgctcttcctcacaccacgaatctgaacatgcctctctcttgcttacaaatgtctaaggtccccactgcctgctggagagaaaacacactcctttgcttagcccacaattctccatttcacttgacccctgcccacctctccaacctaactagcttacttcctagtctacctgaggctgcaatcacactgaggaactcacaattccaaacatacaagaggctccctcttaacacagcacttagacacgtgctgttccacct

SEQ ID NO: 146506 - DNA, 1381 bp, Homo sapiens; identical to SEQ ID NO: 146504
  Payload ID: 8984
  Gene Symbol: KIR2DS2
  Gene Name: killer cell immunoglobulin-like receptor, two domains, short cytoplasmic tail, 2
  Uniprot ID: P43631
  ENST ID: ENST00000614727
  CDS Start-End: 11-925

SEQ ID NO: 146507 - DNA, 1569 bp, Homo sapiens; identical to SEQ ID NO: 146499
  Payload ID: 8984
  Gene Symbol: KIR2DS2
  Gene Name: killer cell immunoglobulin-like receptor, two domains, short cytoplasmic tail, 2
  Uniprot ID: P43631
  ENST ID: ENST00000618364
  CDS Start-End: 32-946

SEQ ID NO: 146508 - DNA, 1123 bp, Homo sapiens
  Payload ID: 8984
  Gene Symbol: KIR2DS2
  Gene Name: killer cell immunoglobulin-like receptor, two domains, short cytoplasmic tail, 2
  ENST ID: ENST00000613952
  CDS Start-End: 12-626
cagacagcaccatgtcgctcatggtcgtcagcatggcgtgtgttgggttcttcttgctgcagggggcctggccacatgagggtctatatgagaaaccttctctctcagcccagccgggccccacggttttggcaggagagagcgtgaccttgtcctgcagctcccggagctcctatgacatgtaccatctatccagggagggggaggcccatgaacgtaggttctctgcagggcccaaggtcaacggaacattccaggccgactttcctctgggccctgccacccacggaggaacctacagatgcttcggctctttccgtgactctccctatgagtggtcaaactcgagtgacccactgcttgtttctgtcacaggaaacccttcaaatagttggccttcacccactgaaccaagctccaaaaccggtaaccccagacacctgcatgttctgattgggacctcagtggtcaaaatccctttcaccatcctcctcttctttctccttcatcgctggtgctccaacaaaaaaaatgctgctgtaatggaccaagagcctgcagggaacagaacagtgaacagcgaggattctgatgaacaagaccatcaggaggtgtcatacgcataattggatcactgtgttttcacacagagagaaatcactcgcccttctgagaggcccaagacacccccaacagataccagcatgtacatagaacttccaaatgctgagcccagatccaaagttgtcttctgtccacgagcaccacagtcaggccttgaggggatcttctagggagacaacagccctgtctcaaaaccgggttgccagctcccatgtaccagcagctggaatctgaaggcatcagtcttcatcttagggcatcgctcttcctcacaccacgaatctgaacatgcctctctcttgcttacaaatgtctaaggtccccactgcctgctggagagaaaacacactcctttgcttagcccacaattctccatttcacttgacccctgcccacctctccaacctaactagcttacttcctagtctacctgaggctgcaatcacactgaggaactcacaattccaaacatacaagaggctccctcttaacacagcac

SEQ ID NO: 146509 - DNA, 1286 bp, Homo sapiens
  Payload ID: 8984
  Gene Symbol: KIR2DS2
  Gene Name: killer cell immunoglobulin-like receptor, two domains, short cytoplasmic tail, 2
  Uniprot ID: P43631
  ENST ID: ENST00000611495
  CDS Start-End: 32-946
ggcgcggccgcctgtctgcacagacagcaccatgtcgctcatggtcgtcagcatggcgtgtgttgggttcttcttgctgcagggggcctggccacatgagggagtccacagaaaaccttccctcctggcccacccaggtcccctggtgaaatcagaagagacagtcatcctgcaatgttggtcagatgtcaggtttgagcacttccttctgcacagagaggggaagtataaggacactttgcacctcattggagagcaccatgatggggtctccaaggccaacttctccatcggtcccatgatgcaagaccttgcagggacctacagatgctacggttctgttactcactccccctatcagttgtcagctcccagtgaccctctggacatcgtcatcacaggtctatatgagaaaccttctctctcagcccagccgggccccacggttttggcaggagagagcgtgaccttgtcctgcagctcccggagctcctatgacatgtaccatctatccagggagggggaggcccatgaacgtaggttctctgcagggcccaaggtcaacggaacattccaggccgactttcctctgggccctgccacccacggaggaacctacagatgcttcggctctttccgtgactctccctatgagtggtcaaactcgagtgacccactgcttgtttctgtcacaggaaacccttcaaatagttggccttcacccactgaaccaagctccaaaaccggtaaccccagacacctgcatgttctgattgggacctcagtggtcaaaatccctttcaccatcctcctcttctttctccttcatcgctggtgctccaacaaaaaaaatgctgctgtaatggaccaagagcctgcagggaacagaacagtgaacagcgaggattctgatgaacaagaccatcaggaggtgtcatacgcataattggatcactgtgttttcacacagagagaaatcactcgcccttctgagaggcccaagacacccccaacagataccagcatgtacatagaacttccaaatgctgagcccagatccaaagttgtcttctgtccacgagcaccacagtcaggccttgaggggatcttctagggagacaacagccctgtctcaaaaccgggttgccagctcccatgtaccagcagctggaatctgaaggcatcagtcttcatcttagggcatcgctcttcctcacaccacgaatctgaacatgcctctctcttgcttacaaatgtctaaggtccccactgcctgctggagagaa

SEQ ID NO: 146510 - DNA, 1579 bp, Homo sapiens; identical to SEQ ID NO: 146495
  Payload ID: 8984
  Gene Symbol: KIR2DS2
  Gene Name: killer cell immunoglobulin-like receptor, two domains, short cytoplasmic tail, 2
  ENST ID: ENST00000616523
  CDS Start-End: 90-953

SEQ ID NO: 146511 - DNA, 1169 bp, Homo sapiens
  Payload ID: 8984
  Gene Symbol: KIR2DS2
  Gene Name: killer cell immunoglobulin-like receptor, two domains, short cytoplasmic tail, 2
  Uniprot ID: P43631
  ENST ID: ENST00000610441
  CDS Start-End: 3-917
ccatgtcgctcatggtcgtcagcatggcgtgtgttgggttcttcttgctgcagggggcctggccacatgagggagtccacagaaaaccttccctcctggcccacccaggtcccctggtgaaatcagaagagacagtcatcctgcaatgttggtcagatgtcaggtttgagcacttccttctgcacagagaggggaagtataaggacactttgcacctcattggagagcaccatgatggggtctccaaggccaacttctccatcggtcccatgatgcaagaccttgcagggacctacagatgctacggttctgttactcactccccctatcagttgtcagctcccagtgaccctctggacatcgtcatcacaggtctatatgagaaaccttctctctcagcccagccgggccccacggttttggcaggagagagcgtgaccttgtcctgcagctcccggagctcctatgacatgtaccatctatccagggagggggaggcccatgaacgtaggttctctgcagggcccaaggtcaacggaacattccaggccgactttcctctgggccctgccacccacggaggaacctacagatgcttcggctctttccgtgactctccctatgagtggtcaaactcgagtgacccactgcttgtttctgtcacaggaaacccttcaaatagttggccttcacccactgaaccaagctccaaaaccggtaaccccagacacctgcatgttctgattgggacctcagtggtcaaaatccctttcaccatcctcctcttctttctccttcatcgctggtgctccaacaaaaaaaatgctgctgtaatggaccaagagcctgcagggaacagaacagtgaacagcgaggattctgatgaacaagaccatcaggaggtgtcatacgcataattggatcactgtgttttcacacagagagaaatcactcgcccttctgagaggcccaagacacccccaacagataccagcatgtacatagaacttccaaatgctgagcccagatccaaagttgtcttctgtccacgagcaccacagtcaggccttgaggggatcttctagggagacaacagccctgtctcaaaaccgggttgccagctcccatgtaccagcagctggaatctgaaggcatcagtcttcatctta

SEQ ID NO: 146512 - DNA, 1169 bp, Homo sapiens; identical to SEQ ID NO: 146511
  Payload ID: 8984
  Gene Symbol: KIR2DS2
  Gene Name: killer cell immunoglobulin-like receptor, two domains, short cytoplasmic tail, 2
  Uniprot ID: P43631
  ENST ID: ENST00000619473
  CDS Start-End: 3-917

SEQ ID NO: 146513 - DNA, 1558 bp, Homo sapiens; identical to SEQ ID NO: 146500
  Payload ID: 8984
  Gene Symbol: KIR2DS2
  Gene Name: killer cell immunoglobulin-like receptor, two domains, short cytoplasmic tail, 2
  Uniprot ID: P43631
  ENST ID: ENST00000616541
  CDS Start-End: 1-915

SEQ ID NO: 146514 - DNA, 991 bp, Homo sapiens
  Payload ID: 8985
  Gene Symbol: KIR2DS3
  Gene Name: killer cell immunoglobulin-like receptor, two domains, short cytoplasmic tail, 3
  Uniprot ID: Q14952
  ENST ID: ENST00000611193
  CDS Start-End: 60-974
atcctgtgcgctgctgagctgagctaggggtgcggccgcctgtctgctccggcaccaccatgtcgctcatggtcatcagcatggcatgtgttgggttcttctggctgcagggggcctggccacatgagggattccgcagaaaaccttccctcctggcccacccaggtcgcctggtgaaatcagaagagacagtcatcctgcaatgttggtcagatgtcatgtttgagcacttccttctgcacagagaggggacgtttaacgacactttgcgcctcattggagagcacattgatggggtctccaaggccaacttctccatcggtcgcatgaggcaagacctggcagggacctacagatgctacggttctgttcctcactccccctatcagttttcagctcccagtgaccctctggacatcgtgatcacaggtctatatgagaaaccttctctctcagcccagccgggccccacggttctggcaggagagagcgtgaccttgtcctgcagctcctggagctcctatgacatgtaccatctatccacggagggggaggcccatgaacgtaggttctctgcagggcccaaggtcaacggaacattccaggccgactttcctctgggccctgccacccaaggaggaacctacagatgcttcggctctttccatgactctccctacgagtggtcaaagtcaagtgacccactgcttgtttctgtcacaggaaacccttcaaatagttggccttcacccactgaaccaagctccaaaaccggtaaccccagacacctacacgttctgattgggacctcagtggtcaaactccctttcaccatcctcctcttctttctccttcatcgctggtgctccgacaaaaaaaatgcatctgtaatggaccaagggcctgcggggaacagaacagtgaacagggaggattctgatgaacaggaccatcaggaggtgtcatacgcataattggatcactgtgtttt

SEQ ID NO: 146515 - DNA, 1216 bp, Homo sapiens
  Payload ID: 8985
  Gene Symbol: KIR2DS3
  Gene Name: killer cell immunoglobulin-like receptor, two domains, short cytoplasmic tail, 3
  ENST ID: ENST00000617330
  CDS Start-End: 60-974
atcctgtgcgctgctgagctgagctaggggtgcggccgcctgtctgctccggcaccaccatgtcgctcatggtcatcagcatggcatgtgttgggttcttctggctgcagggggcctggccacatgagggattccgcagaaaaccttccctcctggcccacccaggtcgcctggtgaaatcagaagagacagtcatcctgcaatgttggtcagatgtcatgtttgagcacttccttctgcacagagaggggacgtttaacgacactttgcgcctcattggagagcacattgatggggtctccaaggccaacttctccatcggtcgcatgaggcaagacctggcagggacctacagatgctacggttctgttcctcactccccctatcagttttcagctcccagtgaccctctggacatcgtgatcacaggtctatatgagaaaccttctctctcagcccagccgggccccacggttctggcaggagagagcgtgaccttgtcctgcagctcctggagctcctatgacatgtaccatctatccacggagggggaggcccatgaacgtaggttctctgcagggcccaaggtcaacggaacattccaggccgactttcctctgggccctgccacccaaggaggaacctacagatgcttcggctctttccatgactctccctacgagtggtcaaagtcaagtgacccactgcttgtttctgtcacaggaaacccttcaaatagttggccttcacccactgaaccaagctccaaaaccggtaaccccagacacctacacgttctgattgggacctcagtggtcaaactccctttcaccatcctcctcttctttctccttcatcgctggtgctccaacaaaaaaaatgcatctgtaatggaccaagggcctgcggggaacagaacagtgaacagggaggattctgatgaacaggaccatcaggaggtgtcatacgcataattggatcactgtgttttcacacagagaaaaatcactcccccttctcagaggcccaagacacccccaacagataccagcatgtacatagaacttccaaatgctgagtccagatccaaagctgtcttctgtccacgagcaccacagtcaggccttgaggggatcttctagggagacaacagccctgtctcaaaaccgggttgccagctcccatgtaccagcagctggaatctgaaggcatcagt

SEQ ID NO: 146516 - DNA, 1193 bp, Homo sapiens
  Payload ID: 8985
  Gene Symbol: KIR2DS3
  Gene Name: killer cell immunoglobulin-like receptor, two domains, short cytoplasmic tail, 3
  Uniprot ID: Q14952
  ENST ID: ENST00000613265
  CDS Start-End: 37-951
ctaggggtgcggccgcctgtctgctccggcaccaccatgtcgctcatggtcatcagcatggcatgtgttgggttcttctggctgcagggggcctggccacatgagggattccgcagaaaaccttccctcctggcccacccaggtcgcctggtgaaatcagaagagacagtcatcctgcaatgttggtcagatgtcatgtttgagcacttccttctgcacagagaggggacgtttaacgacactttgcgcctcattggagagcacattgatggggtctccaaggccaacttctccatcggtcgcatgaggcaagacctggcagggacctacagatgctacggttctgttcctcactccccctatcagttttcagctcccagtgaccctctggacatcgtgatcacaggtctatatgagaaaccttctctctcagcccagccgggccccacggttctggcaggagagagcgtgaccttgtcctgcagctcctggagctcctatgacatgtaccatctatccacggagggggaggcccatgaacgtaggttctctgcagggcccaaggtcaacggaacattccaggccgactttcctctgggccctgccacccaaggaggaacctacagatgcttcggctctttccatgactctccctacgagtggtcaaagtcaagtgacccactgcttgtttctgtcacaggaaacccttcaaatagttggccttcacccactgaaccaagctccaaaaccggtaaccccagacacctacacgttctgattgggacctcagtggtcaaactccctttcaccatcctcctcttctttctccttcatcgctggtgctccgacaaaaaaaatgcatctgtaatggaccaagggcctgcggggaacagaacagtgaacagggaggattctgatgaacaggaccatcaggaggtgtcatacgcataattggatcactgtgttttcacacagagaaaaatcactcccccttctcagaggcccaagacacccccaacagatagcagcatgtacatagaacttccaaatgctgagtccagatccaaagctgtcttctgtccacgagcaccacagtcaggccttgaggggatcttctagggagacaacagccctgtctcaaaaccgggttgccagctcccatgtaccagcagctggaatctgaaggcatcagt

SEQ ID NO: 146517 - DNA, 1193 bp, Homo sapiens; identical to SEQ ID NO: 139181
  Payload ID: 8985
  Gene Symbol: KIR2DS3
  Gene Name: killer cell immunoglobulin-like receptor, two domains, short cytoplasmic tail, 3
  ENST ID: ENST00000614513
  CDS Start-End: 37-951

SEQ ID NO: 146518 - DNA, 1193 bp, Homo sapiens; identical to SEQ ID NO: 146516
  Payload ID: 8985
  Gene Symbol: KIR2DS3
  Gene Name: killer cell immunoglobulin-like receptor, two domains, short cytoplasmic tail, 3
  Uniprot ID: Q14952
  ENST ID: ENST00000614725
  CDS Start-End: 37-951

SEQ ID NO: 146519 - DNA, 1608 bp, Homo sapiens
  Payload ID: 8986
  Gene Symbol: KIR2DS4
  Gene Name: killer cell immunoglobulin-like receptor, two domains, short cytoplasmic tail, 4
  ENST ID: ENST00000339924
  CDS Start-End: 90-982
tgtaaactgcatgggcagggcgccaaataacatcctgtgcgctgctgagctgagctggggcgcggccgcctgtctgcaccggcagcaccatgtcgctcatggtcatcatcatggcgtgtgttgggttcttcttgctgcagggggcctggccacaggagggagtccacagaaaaccttccttcctggccctcccaggtcacctggtgaaatcagaagagacagtcatcctgcaatgttggtcggatgtcatgtttgagcacttccttctgcacagagaggggaagtttaacaacactttgcacctcattggagagcaccatgatggggtttccaaggccaacttctccattggtcccatgatgcctgtccttgcaggaacctacagatgctacggttctgttcctcactccccctatcagttgtcagctcccagtgaccctctggacatggtgatcataggtctatatgagaaaccttctctctcagcccagccgggccccacggttcaggcaggagagaatgtgaccttgtcctgcagctccatctatccagggaaggggaggcccatgaacgtaggctccctgcagtgcgcagcatcaacggaacattccaggccgactttcctctgggccctgccacccacggagggacctacagatgcttcggctctttccgtgacgctccctacgagtggtcaaactcgagtgatccactgcttgtttccgtcacaggaaacccttcaaatagttggccttcacccactgaaccaagctccaaaaccggtaaccccagacacctacatgttctgattgggacctcagtggtcaaaatccctttcaccatcctcctcttctttctccttcatcgctggtgctccgacaaaaaaaatgctgctgtaatggaccaagagcctgcagggaacagaacagtgaacagcgaggattctgatgaacaagaccatcaggaggtgtcatacgcataattggatcactgtgttttcacacagagaaaaatcactcgcccttctgagaggcccaagacacccccaacagataccagcatgtacatagaacttccaaatgctgagcccagatccaaagttgtcttctgtccacgagcaccacagtcaggccttgaggggatcttctagggagacaacagccctgtctcaaaaccgggttgccagctcccatgtaccagcagctggaatctgaaggcatcagtcttcatcttagggcatcgctcttcctcacaccacgaatctgaacatgcctctctcttgcttacaaatgtctaaggtccccactgcctgctggagagaaaacacactcctttgcttagcccacaattctccatttcacttgacccctgcccacctctccaacctaactggcttacttcctagtctacctgaggctgcaatcacactgaggaactcacaattccaaacatacaagaggctgcctcttaacacagcacttagacacgtgctgttccacctcccttcagactatctttcagccttctgccagcagtaaaacttataaattttttaaataatttcaatgtagttttcccgccttcaaataaacatgtctgccctcatgg

SEQ ID NO: 146520 - DNA, 677 bp, Homo sapiens
  Payload ID: 8986
  Gene Symbol: KIR2DS4
  Gene Name: killer cell immunoglobulin-like receptor, two domains, short cytoplasmic tail, 4
  ENST ID: ENST00000391729
  CDS Start-End: 1-677
atgtcgctcatggtcatcatcatggcgtgtgttgggttcttcttgctgcagggggcctggccacaggagggagtccacagaaaaccttccttcctggccctcccaggtcacctggtgaaatcagaagagacagtcatcctgcaatgttggtcggatgtcatgtttgagcacttccttctgcacagagaggggaagtttaacaacactttgcacctcattggagagcaccatgatggggtttccaaggccaacttctccattggtcccatgatgcctgtccttgcaggaacctacagatgctacggttctgttcctcactccccctatcagttgtcagctcccagtgaccctctggacatggtgatcataggtctatatgagaaaccttctctctcagcccagccgggccccacggttcaggcaggagagaatgtgaccttgtcctgcagctccatctatccagggaaggggaggcccatgaacgtaggctccctgcagtgcgcagcatcaacggaacattccaggccgactttcctctgggccctgccacccacggagggacctacagatgcttcggctctttccgtgacgctccctacgagtggtcaaactcgagtgatccactgcttgtttccgtcacaggtaaccccagacacctacatgttctgattgggacc

SEQ ID NO: 146521 - DNA, 1410 bp, Homo sapiens
  Payload ID: 8986
  Gene Symbol: KIR2DS4
  Gene Name: killer cell immunoglobulin-like receptor, two domains, short cytoplasmic tail, 4
  Uniprot ID: P43632
  ENST ID: ENST00000617469
  CDS Start-End: 39-953
gagctggggcgcggccgcctgtctgcaccggcagcaccatgtcgctcatggtcatcatcatggcgtgtgttgggttcttcttgctgcagggggcctggccacaggagggagtccacagaaaaccttccttcctggccctcccaggtcacctggtgaaatcagaagagacagtcatcctgcaatgttggtcggatgtcatgtttgagcacttccttctgcacagagaggggaagtttaacaacactttgcacctcattggagagcaccatgatggggtttccaaggccaacttctccattggtcccatgatgcctgtccttgcaggaacctacagatgctacggttctgttcctcactccccctatcagttgtcagctcccagtgaccctctggacatggtgatcataggtctatatgagaaaccttctctctcagcccagccgggccccacggttcaggcaggagagaatgtgaccttgtcctgcagctcccggagctcctatgacatgtaccatctatccagggaaggggaggcccatgaacgtaggctccctgcagtgcgcagcatcaacggaacattccaggccgactttcctctgggccctgccacccacggagggacctacagatgcttcggctctttccgtgacgctccctacgagtggtcaaactcgagtgatccactgcttgtttccgtcacaggaaacccttcaaatagttggccttcacccactgaaccaagctccaaaaccggtaaccccagacacctacatgttctgattgggacctcagtggtcaaaatccctttcaccatcctcctcttctttctccttcatcgctggtgctccgacaaaaaaaatgctgctgtaatggaccaagagcctgcagggaacagaacagtgaacagcgaggattctgatgaacaagaccatcaggaggtgtcatacgcataattggatcactgtgttttcacacagagaaaaatcactcacccttctgagaggcccaagacacccccaacagataccagcatgtacatagaacttccaaatgctgagcccagatccaaagttgtcttctgtccacgagcaccacagtcaggccttgaggggatcttctagggagacaacagccctgtctcaaaaccgggttgccagctcccatgtaccagcagctggaatctgaaggcatcagtcttcatcttagggcatcgctcttcctcacaccacgaatctgaacatgcctctctcttgcttacaaatgtctaaggtccccactgcctgctggagagaaaacacactcctttgcttagcccacaattctccatttcacttgacccctgcccacctctccaacctaactggcttacttcctagtctacctgaggctgcaatcacactgaggaactca

SEQ ID NO: 146522 - DNA, 1344 bp, Homo sapiens
  Payload ID: 8986
  Gene Symbol: KIR2DS4
  Gene Name: killer cell immunoglobulin-like receptor, two domains, short cytoplasmic tail, 4
  Uniprot ID: P43632
  ENST ID: ENST00000619771
  CDS Start-End: 90-1004
tgtaaactgcatgggcagggcgccaaataacatcctgtgtgctgctgagctgagctggggcgcggccgcctgtctgcaccggcagcaccatgtcgctcatggtcatcatcatggcgtgtgttgggttcttcttgctgcagggggcctggccacaggagggagtccacagaaaaccttccttcctggccctcccaggtcacctggtgaaatcagaagagacagtcatcctgcaatgttggtcggatgtcatgtttgagcacttccttctgcacagagaggggaagtttaacaacactttgcacctcattggagagcaccatgatggggtttccaaggccaacttctccattggtcccatgatgcctgtccttgcaggaacctacagatgctacggttctgttcctcactccccctatcagttgtcagctcccagtgaccctctggacatggtgatcataggtctatatgagaaaccttctctctcagcccagccgggccccacggttcaggcaggagagaatgtgaccttgtcctgcagctcccggagctcctatgacatgtaccatctatccagggaaggggaggcccatgaacgtaggctccctgcagtgcgcagcatcaacggaacattccaggccgactttcctctgggccctgccacccacggagggacctacagatgcttcggctctttccgtgacgctccctacgagtggtcaaactcgagtgatccactgcttgtttccgtcacaggaaacccttcaaatagttggccttcacccactgaaccaagctccaaaaccggtaaccccagacacctacatgttctgattgggacctcagtggtcaaaatccctttcaccatcctcctcttctttctccttcatcgctggtgctccgacaaaaaaaatgctgctgtaatggaccaagagcctgcagggaacagaacagtgaacagcgaggattctgatgaacaagaccatcaggaggtgtcatacgcataattggatcactgtgttttcacacagagaaaaatcactcgcccttctgagaggcccaagacacccccaacagataccagcatgtacatagaacttccaaatgctgagcccagatccaaagttgtcttctgtccacgagcaccacagtcaggccttgaggggatcttctagggagacaacagccctgtctcaaaaccgggttgccagctcccatgtaccagcagctggaatctgaaggcatcagtcttcatcttagggcatcgctcttcctcacaccacgaatctgaacatgcctctctcttgcttacaaatgtctaaggtccccactgcctgctggagagaa

SEQ ID NO: 146523 - DNA, 1295 bp, Homo sapiens
  Payload ID: 8986
  Gene Symbol: KIR2DS4
  Gene Name: killer cell immunoglobulin-like receptor, two domains, short cytoplasmic tail, 4
  ENST ID: ENST00000616914
  CDS Start-End: 47-939
gctgagctgagctggggcgcggccgcctgtctgcaccggcagcaccatgtcgctcatggtcatcatcatggcgtgtgttgggttcttcttgctgcagggggcctggccacaggaggaagtccacagaaaaccttccttcctggccctcccaggtcacctggtgaaatcagaagagacagtcatcctgcaatgttggtcggatgtcatgtttgagcacttccttctgcacagagaggggaagtttaacaacactttgcacctcattggagagcaccatgatggggtttccaaggccaacttctccattggtcccatgatgcctgtccttgcaggaacctacagatgctacggttctgttactcactccccctatcagttgtcagctcccagtgaccctctggacatggtgatcataggtctatatgagaaaccttctctctcagcccagccgggccccacggttcaggcaggagagaatgtgaccttgtcctgcagctccatctatccagggaaggggaggcccatgaacgtaggctccctgcagtgcgcagcatcaacggaacattccaggccgactttcctctgggccctgccacccacggagggacctacagatgcttcggctctttccgtgacgctccctacgagtggtcaaactcgagtgatccactgcttgtttccgtcacaggaaacccttcaaatagttggccttcacccactgaaccaagctccaaaaccggtaaccccagacacctacatgttctgattgggacctcagtggtcaaaatccctttcaccatcctcctcttctttctccttcatcgctggtgctccgacaaaaaaaatgctgctgtaatggaccaagagcctgcagggaacagaacagtgaacagcgaggattctgatgaacaagaccatcaggaggtgtcatacgcataattggatcactgtgttttcacacagagaaaaatcactcgcccttctgagaggcccaagacacccccaacagataccagcatgtacatagaacttccaaatgctgagcccagatccaaagttgtcttctgtccacgagcaccacagtcaggccttgaggggatcttctagggagacaacagccctgtctcaaaaccgggttgccagctcccatgtaccagcagctggaatctgaaggcatcagtcttcatcttagggcatcgctcttcctcacaccacgaatctgaacatgcctctctcttgcttacaaatgtctaaggtccccactgcctgctggagagaaaacacactcctttgct

SEQ ID NO: 146524 - DNA, 1256 bp, Homo sapiens
  Payload ID: 8986
  Gene Symbol: KIR2DS4
  Gene Name: killer cell immunoglobulin-like receptor, two domains, short cytoplasmic tail, 4
  ENST ID: ENST00000621991
  CDS Start-End: 8-900
cagcaccatgtcgctcatggtcatcatcatggcgtgtgttgggttcttcttgctgcagggggcctggccacaggagggagtccacagaaaaccttccttcctggccctcccaggtcacctggtgaaatcagaagagacagtcatcctgcaatgttggtcggatgtcatgtttgagcacttccttctgcacagagaggggaagtttaacaacactttgcacctcattggagagcaccatgatggggtttccaaggccaacttctccattggtcccatgatgcctgtccttgcaggaacctacagatgctacggttctgttcctcactccccctatcagttgtcagctcccagtgaccctctggacatggtgatcataggtctatatgagaaaccttctctctcagcccagccgggccccacggttcaggcaggagagaatgtgaccttgtcctgcagctccatctatccagggagggggaggcccatgaacgtaggctccctgcagtgcgcagcatcaacggaacattccaggccgactttcctctgggccctgccacccacggagggacctacagatgcttcggctctttccgtgacgctccctacgagtggtcaaactcgagtgatccactgcttgtttccgtcacaggaaacccttcaaatagttggccttcacccactgaaccaagctccaaaaccggtaaccccagacacctacatgttctgattgggacctcagtggtcaaaatccctttcaccatcctcctcttctttctccttcatcgctggtgctccgacaaaaaaaatgctgctgtaatggaccaagagcctgcagggaacagaacagtgaacagcgaggattctgatgaacaagaccatcaggaggtgtcatacgcataattggatcactgtgttttcacacagagaaaaatcactcgcccttctgagaggcccaagacacccccaacagataccagcatgtacatagaacttccaaatgctgagcccagatccaaagttgtcttctgtccacgagcaccacagtcaggccttgaggggatcttctagggagacaacagccctgtctcaaaaccgggttgccagctcccatgtaccagcagctggaatctgaaggcatcagtcttcatcttagggcatcgctcttcctcacaccacgaatctgaacatgcctctctcttgcttacaaatgtctaaggtccccactgcctgctggagagaaaacacactcctttgct

SEQ ID NO: 146525 - DNA, 677 bp, Homo sapiens
  Payload ID: 8986
  Gene Symbol: KIR2DS4
  Gene Name: killer cell immunoglobulin-like receptor, two domains, short cytoplasmic tail, 4
  ENST ID: ENST00000619816
  CDS Start-End: 1-677
atgtcgctcatggtcatcatcatggcgtgtgttgggttcttcttgctgcagggggcctggccacaggagggagtccacagaaaaccttccttcctggccctcccaggtcacctggtgaaatcagaagagacagtcatcctgcaatgttggtcggatgtcatgtttgagcacttccttctgcacagagaggggaagtttaacaacactttgcacctcattggagagcaccatgatggggtttccaaggccaacttctccattggtcccatgatgcctgtccttgcaggaacctacagatgctacggttctgttcctcactccccctatcagttgtcagctcccagtgaccctctggacatggtgatcataggtctatatgagaaaccttctctctcagcccagccgggccccacggttcaggcaggagagaatgtgaccttgtcctgcagctccatctatccagggagggggaggcccatgaacgtaggctccctgcagtgcgcagcatcaacggaacattccaggccgactttcctctgggccctgccacccacggagggacctacagatgcttcggctctttccgtgacgctccctacgagtggtcaaactcgagtgatccactgcttgtttccgtcacaggtaaccccagacacctacatgttctgattgggacc

SEQ ID NO: 146526 - DNA, 1240 bp, Homo sapiens
  Payload ID: 8986
  Gene Symbol: KIR2DS4
  Gene Name: killer cell immunoglobulin-like receptor, two domains, short cytoplasmic tail, 4
  ENST ID: ENST00000621713
  CDS Start-End: 8-900
cagcaccatgtcgctcatggtcatcatcatggcgtgtgttgggttcttcttgctgcagggggcctggccacaggaggaagtccacagaaaaccttccttcctggccctcccaggtcacctggtgaaatcagaagagacagtcatcctgcaatgttggtcggatgtcatgtttgagcacttccttctgcacagagaggggaagtttaacaacactttgcacctcattggagagcaccatgatggggtttccaaggccaacttctccattggtcccatgatgcctgtccttgcaggaacctacagatgctacggttctgttactcactccccctatcagttgtcagctcccagtgaccctctggacatggtgatcataggtctatatgagaaaccttctctctcagcccagccgggccccacggttcaggcaggagagaatgtgaccttgtcctgcagctccatctatccagggaaggggaggcccatgaacgtaggctccctgcagtgcgcagcatcaacggaacattccaggccgactttcctctgggccctgccacccacggagggacctacagatgcttcggctctttccgtgacgctccctacgagtggtcaaactcgagtgatccactgcttgtttccgtcacaggaaacccttcaaatagttggccttcacccactgaaccaagctccaaaaccggtaaccccagacacctacatgttctgattgggacctcagtggtcaaaatccctttcaccatcctcctcttctttctccttcatcgctggtgctccgacaaaaaaaatgctgctgtaatggaccaagagcctgcagggaacagaacagtgaacagcgaggattctgatgaacaagaccatcaggaggtgtcatacgcataattggatcactgtgttttcacacagagaaaaatcactcgcccttctgagaggcccaagacacccccaacagataccagcatgtacatagaacttccaaatgctgagcccagatccaaagttgtcttctgtccacgagcaccacagtcaggccttgaggggatcttctagggagacaacagccctgtctcaaaaccgggttgccagctcccatgtaccagcagctggaatctgaaggcatcagtcttcatcttagggcatcgctcttcctcacaccacgaatctgaacatgcctctctcttgcttacaaatgtctaaggtccccactgcctgctggagagaa

SEQ ID NO: 146527 - DNA, 1112 bp, Homo sapiens
  Payload ID: 8986
  Gene Symbol: KIR2DS4
  Gene Name: killer cell immunoglobulin-like receptor, two domains, short cytoplasmic tail, 4
  ENST ID: ENST00000611873
  CDS Start-End: 12-904
ccggcagcaccatgtcgctcatggtcatcatcatggcgtgtgttgggttcttcttgctgcagggggcctggccacaggagggagtccacagaaaaccttccttcctggccctcccaggtcacctggtgaaatcagaagagacagtcatcctgcaatgttggtcggatgtcatgtttgagcacttccttctgcacagagaggggaagtttaacaacactttgcacctcattggagagcaccatgatggggtttccaaggccaacttctccattggtcccatgatgcctgtccttgcaggaacctacagatgctacggttctgttcctcactccccctatcagttgtcagctcccagtgaccctctggacatggtgatcataggtctatatgagaaaccttctctctcagcccagccgggccccacggttcaggcaggagagaatgtgaccttgtcctgcagctccatctatccagggaaggggaggcccatgaacgtaggctccctgcagtgcgcagcatcaacggaacattccaggccgactttcctctgggccctgccacccacggagggacctacagatgcttcggctctttccgtgacgctccctacgagtggtcaaactcgagtgatccactgcttgtttccgtcacaggaaacccttcaaatagttggccttcacccactgaaccaagctccaaaaccggtaaccccagacacctacatgttctgattgggacctcagtggtcaaaatccctttcaccatcctcctcttctttctccttcatcgctggtgctccgacaaaaaaaatgctgctgtaatggaccaagagcctgcagggaacagaacagtgaacagcgaggattctgatgaacaagaccatcaggaggtgtcatacgcataattggatcactgtgttttcacacagagaaaaatcactcgcccttctgagaggcccaagacacccccaacagataccagcatgtacatagaacttccaaatgctgagcccagatccaaagttgtcttctgtccacgagcaccacagtcaggccttgaggggatcttctagggagacaacagccctgtctcaaaaccgggttgccagctcc

SEQ ID NO: 146528 - DNA, 1563 bp, Homo sapiens
  Payload ID: 8986
  Gene Symbol: KIR2DS4
  Gene Name: killer cell immunoglobulin-like receptor, two domains, short cytoplasmic tail, 4
  ENST ID: ENST00000615996
  CDS Start-End: 47-1171
gctgagctgagctggggcgcggccgcctgtctgcaccggcagcaccatgtcgctcatggtcatcatcatggcgtgtgttgggttcttcttgctgcagggggcctggccacaggagggagtccacagaaaaccttccttcctggccctcccaggtcacctggtgaaatcagaagagacagtcatcctgcaatgttggtcggatgtcatgtttgagcacttccttctgcacagagaggggaagtttaacaacactttgcacctcattggagagcaccatgatggggtttccaaggccaacttctccattggtcccatgatgcctgtccttgcaggaacctacagatgctacggttctgttcctcactccccctatcagttgtcagctcccagtgaccctctggacatggtgatcataggtctatatgagaaaccttctctctcagcccagccgggccccacggttcaggcaggagagaatgtgaccttgtcctgcagctccatctatccagggagggggaggcccatgaacgtaggctccctgcagtgcgcagcatcaacggaacattccaggccgactttcctctgggccctgccacccacggagggacctacagatgcttcggctctttccgtgacgctccctacgagtggtcaaactcgagtgatccactgcttgtttccgtcacaggaaacccttcaaatagttggccttcacccactgaaccaagctccaaaaccggtaaccccagacacctacatgttctgattgggacctcagtggtcaaaatccctttcaccatcctcctcttctttctccttcatcgctggtgctccgacaaaaaaaatgctgctgtaatggaccaagagcctgcagggaacagaacagtgaacagcgaggattctgatgaacaagaccatcaggaggtgtcatacgcataattggatcactgtgttttcacacagagaaaaatcactcgcccttctgagaggcccaagacacccccaacagataccagcatgtacatagaacttccaaatgctgagcccagatccaaagttgtcttctgtccacgagcaccacagtcaggccttgaggggatcttctagggagacaacagccctgtctcaaaaccgggttgccagctcccatgtaccagcagctggaatctgaaggcatcagtcttcatcttagggcatcgctcttcctcacaccacgaatctgaacatgcctctctcttgcttacaaatgtctaaggtccccactgcctgctggagagaaaacacactcctttgcttagcccacaattctccatttcacttgacccctgcccacctctccaacctaactggcttacttcctagtctacctgaggctgcaatcacactgaggaactcacaattccaaacatacaagaggctgcctcttaacacagcacttagacacgtgctgttccacctcccttcagactatctttcagccttctgccagcagtaaaacttataaattttttaaataatttcaatgtagttttcccgccttcaaataaacatgtctgccctcat

SEQ ID NO: 146529 - DNA, 1574 bp, Homo sapiens
  Payload ID: 8986
  Gene Symbol: KIR2DS4
  Gene Name: killer cell immunoglobulin-like receptor, two domains, short cytoplasmic tail, 4
  ENST ID: ENST00000617550
  CDS Start-End: 56-775
ctgtgcgctgctgagctgagctggggcgcggccgcctgtctgcaccggcagcaccatgtcgctcatggtcatcatcatggcgtgtgttgggttcttcttgctgcagggggcctggccacaggagggagtccacagaaaaccttccttcctggccctcccaggtcacctggtgaaatcagaagagacagtcatcctgcaatgttggtcggatgtcatgtttgagcacttccttctgcacagagaggggaagtttaacaacactttgcacctcattggagagcaccatgatggggtttccaaggccaacttctccattggtcccatgatgcctgtccttgcaggaacctacagatgctacggttctgttcctcactccccctatcagttgtcagctcccagtgaccctctggacatggtgatcataggtctatatgagaaaccttctctctcagcccagccgggccccacggttcaggcaggagagaatgtgaccttgtcctgcagctccatctatccagggaaggggaggcccatgaacgtaggctccctgcagtgcgcagcatcaacggaacattccaggccgactttcctctgggccctgccacccacggagggacctacagatgcttcggctctttccgtgacgctccctacgagtggtcaaactcgagtgatccactgcttgtttccgtcacaggaaacccttcaaatagttggccttcacccactgaaccaagctccaaaaccggtaaccccagacacctacatgttctgattgggacctcagtggtcaaaatccctttcaccatcctcctcttctttctccttcatcgctggtgctccgacaaaaaaaatgctgctgtaatggaccaagagcctgcagggaacagaacagtgaacagcgaggattctgatgaacaagaccatcaggaggtgtcatacgcataattggatcactgtgttttcacacagagaaaaatcactcgcccttctgagaggcccaagacacccccaacagataccagcatgtacatagaacttccaaatgctgagcccagatccaaagttgtcttctgtccacgagcaccacagtcaggccttgaggggatcttctagggagacaacagccctgtctcaaaaccgggttgccagctcccatgtaccagcagctggaatctgaaggcatcagtcttcatcttagggcatcgctcttcctcacaccacgaatctgaacatgcctctctcttgcttacaaatgtctaaggtccccactgcctgctggagagaaaacacactcctttgcttagcccacaattctccatttcacttgacccctgcccacctctccaacctaactggcttacttcctagtctacctgaggctgcaatcacactgaggaactcacaattccaaacatacaagaggctgcctcttaacacagcacttagacacgtgctgttccacctcccttcagactatctttcagccttctgccagcagtaaaacttataaattttttaaataatttcaatgtagttttcccgccttcaaataaacatgtctgccctcatgg

SEQ ID NO: 146530 - DNA, 1630 bp, Homo sapiens
  Payload ID: 8986
  Gene Symbol: KIR2DS4
  Gene Name: killer cell immunoglobulin-like receptor, two domains, short cytoplasmic tail, 4
  Uniprot ID: P43632
  ENST ID: ENST00000621436
  CDS Start-End: 90-1004
tgtaaactgcatgggcagggcgccaaataacatcctgtgtgctgctgagctgagctggggcgcggccgcctgtctgcaccggcagcaccatgtcgctcatggtcatcatcatggcgtgtgttgggttcttcttgctgcagggggcctggccacaggagggagtccacagaaaaccttccttcctggccctcccaggtcacctggtgaaatcagaagagacagtcatcctgcaatgttggtcggatgtcatgtttgagcacttccttctgcacagagaggggaagtttaacaacactttgcacctcattggagagcaccatgatggggtttccaaggccaacttctccattggtcccatgatgcctgtccttgcaggaacctacagatgctacggttctgttcctcactccccctatcagttgtcagctcccagtgaccctctggacatggtgatcataggtctatatgagaaaccttctctctcagcccagccgggccccacggttcaggcaggagagaatgtgaccttgtcctgcagctcccggagctcctatgacatgtaccatctatccagggaaggggaggcccatgaacgtaggctccctgcagtgcgcagcatcaacggaacattccaggccgactttcctctgggccctgccacccacggagggacctacagatgcttcggctctttccgtgacgctccctacgagtggtcaaactcgagtgatccactgcttgtttccgtcacaggaaacccttcaaatagttggccttcacccactgaaccaagctccaaaaccggtaaccccagacacctacatgttctgattgggacctcagtggtcaaaatccctttcaccatcctcctcttctttctccttcatcgctggtgctccgacaaaaaaaatgctgctgtaatggaccaagagcctgcagggaacagaacagtgaacagcgaggattctgatgaacaagaccatcaggaggtgtcatacgcataattggatcactgtgttttcacacagagaaaaatcactcgcccttctgagaggcccaagacacccccaacagataccagcatgtacatagaacttccaaatgctgagcccagatccaaagttgtcttctgtccacgagcaccacagtcaggccttgaggggatcttctagggagacaacagccctgtctcaaaaccgggttgccagctcccatgtaccagcagctggaatctgaaggcatcagtcttcatcttagggcatcgctcttcctcacaccacgaatctgaacatgcctctctcttgcttacaaatgtctaaggtccccactgcctgctggagagaaaacacactcctttgcttagcccacaattctccatttcacttgacccctgcccacctctccaacctaactggcttacttcctagtctacctgaggctgcaatcacactgaggaactcacaattccaaacatacaagaggctgcctcttaacacagcacttagacacgtgctgttccacctcccttcagactatctttcagccttctgccagcagtaaaacttataaattttttaaataatttcaatgtagttttcccgccttcaaataaacatgtctgccctcatgg

SEQ ID NO: 146531 - DNA, 1344 bp, Homo sapiens
  Payload ID: 8986
  Gene Symbol: KIR2DS4
  Gene Name: killer cell immunoglobulin-like receptor, two domains, short cytoplasmic tail, 4
  Uniprot ID: P43632
  ENST ID: ENST00000620669
  CDS Start-End: 90-1004
tgtaaactgcatgggcagggcgccaaataacatcctgtgcgctgctgagctgagctggggcgcggccgcctgtctgcaccggcagcaccatgtcgctcatggtcatcatcatggcgtgtgttgggttcttcttgctgcagggggcctggccacaggagggagtccacagaaaaccttccttcctggccctcccaggtcacctggtgaaatcagaagagacagtcatcctgcaatgttggtcggatgtcatgtttgagcacttccttctgcacagagaggggaagtttaacaacactttgcacctcattggagagcaccatgatggggtttccaaggccaacttctccattggtcccatgatgcctgtccttgcaggaacctacagatgctacggttctgttcctcactccccctatcagttgtcagctcccagtgaccctctggacatggtgatcataggtctatatgagaaaccttctctctcagcccagccgggccccacggttcaggcaggagagaatgtgaccttgtcctgcagctcccggagctcctatgacatgtaccatctatccagggaaggggaggcccatgaacgtaggctccctgcagtgcgcagcatcaacggaacattccaggccgactttcctctgggccctgccacccacggagggacctacagatgcttcggctctttccgtgacgctccctacgagtggtcaaactcgagtgatccactgcttgtttccgtcacaggaaacccttcaaatagttggccttcacccactgaaccaagctccaaaaccggtaaccccagacacctacatgttctgattgggacctcagtggtcaaaatccctttcaccatcctcctcttctttctccttcatcgctggtgctccgacaaaaaaaatgctgctgtaatggaccaagagcctgcagggaacagaacagtgaacagcgaggattctgatgaacaagaccatcaggaggtgtcatacgcataattggatcactgtgttttcacacagagaaaaatcactcgcccttctgagaggcccaagacacccccaacagataccagcatgtacatagaacttccaaatgctgagcccagatccaaagttgtcttctgtccacgagcaccacagtcaggccttgaggggatcttctagggagacaacagccctgtctcaaaaccgggttgccagctcccatgtaccagcagctggaatctgaaggcatcagtcttcatcttagggcatcgctcttcctcacaccacgaatctgaacatgcctctctcttgcttacaaatgtctaaggtccccactgcctgctggagagaa

SEQ ID NO: 146532 - DNA, 1315 bp, Homo sapiens
  Payload ID: 8986
  Gene Symbol: KIR2DS4
  Gene Name: killer cell immunoglobulin-like receptor, two domains, short cytoplasmic tail, 4
  ENST ID: ENST00000610558
  CDS Start-End: 1-516
actttgcacctcattggagagcaccatgatggggtttccaaggccaacttctccattggtcccatgatgcctgtccttgcaggaacctacagatgctacggttctgttactcactccccctatcagttgtcagctcccagtgaccctctggacatggtgatcataggtctatatgagaaaccttctctctcagcccagccgggccccacggttcaggcaggagagaatgtgaccttgtcctgcagctccatctatccagggaaggggaggcccatgaacgtaggctccctgcagtgcgcagcatcaacggaacattccaggccgactttcctctgggccctgccacccacggagggacctacagatgcttcggctctttccgtgacgctccctacgagtggtcaaactcgagtgatccactgcttgtttccgtcacaggaaacccttcaaatagttggccttcacccactgaaccaagctccaaaaccggtaaccccagacacctacatgttctgattgggacctcagtggtcaaaatccctttcaccatcctcctcttctttctccttcatcgctggtgctccgacaaaaaaaatgctgctgtaatggaccaagagcctgcagggaacagaacagtgaacagcgaggattctgatgaacaagaccatcaggaggtgtcatacgcataattggatcactgtgttttcacacagagaaaaatcactcgcccttctgagaggcccaagacacccccaacagataccagcatgtacatagaacttccaaatgctgagcccagatccaaagttgtcttctgtccacgagcaccacagtcaggccttgaggggatcttctagggagacaacagccctgtctcaaaaccgggttgccagctcccatgtaccagcagctggaatctgaaggcatcagtcttcatcttagggcatcgctcttcctcacaccacgaatctgaacatgcctctctcttgcttacaaatgtctaaggtccccactgcctgctggagagaaaacacactcctttgcttagcccacaattctccatttcacttgacccctgcccacctctccaacctaactggcttacttcctagtctacctgaggctgcaatcacactgaggaactcacaattccaaacatacaagaggctgcctcttaacacagcacttagacacgtgctgttccacctcccttcagactatctttcagccttctgccagcagtaaaacttataaattttttaaataatttcaatgtagttttcccgccttcaaataaacatgtctgccctcatgg

SEQ ID NO: 146533 - DNA, 900 bp, Homo sapiens
  Payload ID: 8986
  Gene Symbol: KIR2DS4
  Gene Name: killer cell immunoglobulin-like receptor, two domains, short cytoplasmic tail, 4
  ENST ID: ENST00000619141
  CDS Start-End: 8-900
cagcaccatgtcgctcatggtcatcatcatggcgtgtgttgggttcttcttgctgcagggggcctggccacaggagggagtccacagaaaaccttccttcctggccctcccaggtcacctggtgaaatcagaagagacagtcatcctgcaatgttggtcggatgtcatgtttgagcacttccttctgcacagagaggggaagtttaacaacactttgcacctcattggagagcaccatgatggggtttccaaggccaacttctccattggtcccatgatgcctgtccttgcaggaacctacagatgctacagttctgttcctcactccccctatcagttgtcagctcccagtgaccctctggacatggtgatcataggtctatatgagaaaccttctctctcagcccagccgggccccacggttcaggcaggagagaatgtgtccttgtcctgcagctccatctatccagggagggggaggcccatgaacgtaggctccctgcagtgcgcagcatccacggaacattccaggccgactttcctctgggccctgccacccacggagggacctacagatgcttcggctctttccgtgacgctccctacgagtggtcaaactcgagtgatccactgcttgtttccgtcacaggaaacccttcaaatagttggccttcacccactgaaccaagctccaaaaccggtaaccccagacacctacatgttctgattgggacctcagtggtcaaaatccctttcaccatcctcctcttctttctccttcatcgctggtgctccgacaaaaaaaatgctgctgtaatggaccaagagcctgcagggaacagaacagtgaacagcgaggattctgatgaacaagaccatcaggaggtgtcatacgcataa

SEQ ID NO: 146534 - DNA, 1850 bp, Homo sapiens
  Payload ID: 8986
  Gene Symbol: KIR2DS4
  Gene Name: killer cell immunoglobulin-like receptor, two domains, short cytoplasmic tail, 4
  ENST ID: ENST00000617783
  CDS Start-End: 31-1227
gcgcggccgcctgtctgcaccggcagcaccatgtcgctcatggtcatcatcatggcgtgtgttgggttcttcttgctgcagggggcctggccacaggagggtggtcaggacaagcccttgctttctacctggcccagccttgtggtgcctccagaacatgtgactcttcagtgtcactctaatcttgggtttaacaacttcagtctgtacaaggatgatggggtgcctgtccctgagctgtacaacagaatattctggaaaagccttttcatgggccctgtgaccccgtcacatgcagggacctatagatgccggggttcacacacacactcccccagtgggtggtcggcacccagcaaccccctggtgatcatggtcacaggagtccacagaaaaccttccttcctggccctcccaggtcacctggtgaaatcagaagagacagtcatcctgcaatgttggtcggatgtcatgtttgagcacttccttctgcacagagaggggaagtttaacaacactttgcacctcattggagagcaccatgatggggtttccaaggccaacttctccattggtcccatgatgcctgtccttgcaggaacctacagatgctacggttctgttcctcactccccctatcagttgtcagctcccagtgaccctctggacatggtgatcataggtctatatgagaaaccttctctctcagcccagccgggccccacggttcaggcaggagagaatgtgaccttgtcctgcagctcccggagctcctatgacatgtaccatctatccagggaaggggaggcccatgaacgtaggctccctgcagtgcgcagcatcaacggaacattccaggccgactttcctctgggccctgccacccacggagggacctacagatgcttcggctctttccgtgacgctccctacgagtggtcaaactcgagtgatccactgcttgtttccgtcacaggaaacccttcaaatagttggccttcacccactgaaccaagctccaaaaccggtaaccccagacacctacatgttctgattgggacctcagtggtcaaaatccctttcaccatcctcctcttctttctccttcatcgctggtgctccgacaaaaaaaatgctgctgtaatggaccaagagcctgcagggaacagaacagtgaacagcgaggattctgatgaacaagaccatcaggaggtgtcatacgcataattggatcactgtgttttcacacagagaaaaatcactcgcccttctgagaggcccaagacacccccaacagataccagcatgtacatagaacttccaaatgctgagcccagatccaaagttgtcttctgtccacgagcaccacagtcaggccttgaggggatcttctagggagacaacagccctgtctcaaaaccgggttgccagctcccatgtaccagcagctggaatctgaaggcatcagtcttcatcttagggcatcgctcttcctcacaccacgaatctgaacatgcctctctcttgcttacaaatgtctaaggtccccactgcctgctggagagaaaacacactcctttgcttagcccacaattctccatttcacttgacccctgcccacctctccaacctaactggcttacttcctagtctacctgaggctgcaatcacactgaggaactcacaattccaaacatacaagaggctgcctcttaacacagcacttagacacgtgctgttccacctcccttcagactatctttcagccttctgccagcagtaaaacttataaattttttaaataatttcaatgtagttttcccgccttcaaataaacatgtctgccctca

SEQ ID NO: 146535 - DNA, 1322 bp, Homo sapiens
  Payload ID: 8986
  Gene Symbol: KIR2DS4
  Gene Name: killer cell immunoglobulin-like receptor, two domains, short cytoplasmic tail, 4
  ENST ID: ENST00000613379
  CDS Start-End: 90-1214
tgtaaactgcatgggcagggcgccaaataacatcctgtgcgctgctgagctgagctggggcgcggccgcctgtctgcaccggcagcaccatgtcgctcatggtcatcatcatggcgtgtgttgggttcttcttgctgcagggggcctggccacaggaggaagtccacagaaaaccttccttcctggccctcccaggtcacctggtgaaatcagaagagacagtcatcctgcaatgttggtcggatgtcatgtttgagcacttccttctgcacagagaggggaagtttaacaacactttgcacctcattggagagcaccatgatggggtttccaaggccaacttctccattggtcccatgatgcctgtccttgcaggaacctacagatgctacggttctgttactcactccccctatcagttgtcagctcccagtgaccctctggacatggtgatcataggtctatatgagaaaccttctctctcagcccagccgggccccacggttcaggcaggagagaatgtgaccttgtcctgcagctccatctatccagggaaggggaggcccatgaacgtaggctccctgcagtgcgcagcatcaacggaacattccaggccgactttcctctgggccctgccacccacggagggacctacagatgcttcggctctttccgtgacgctccctacgagtggtcaaactcgagtgatccactgcttgtttccgtcacaggaaacccttcaaatagttggccttcacccactgaaccaagctccaaaaccggtaaccccagacacctacatgttctgattgggacctcagtggtcaaaatccctttcaccatcctcctcttctttctccttcatcgctggtgctccgacaaaaaaaatgctgctgtaatggaccaagagcctgcagggaacagaacagtgaacagcgaggattctgatgaacaagaccatcaggaggtgtcatacgcataattggatcactgtgttttcacacagagaaaaatcactcgcccttctgagaggcccaagacacccccaacagataccagcatgtacatagaacttccaaatgctgagcccagatccaaagttgtcttctgtccacgagcaccacagtcaggccttgaggggatcttctagggagacaacagccctgtctcaaaaccgggttgccagctcccatgtaccagcagctggaatctgaaggcatcagtcttcatcttagggcatcgctcttcctcacaccacgaatctgaacatgcctctctcttgcttacaaatgtctaaggtccccactgcctgctggagagaa

SEQ ID NO: 146536 - DNA, 1633 bp, Homo sapiens
  Payload ID: 8986
  Gene Symbol: KIR2DS4
  Gene Name: killer cell immunoglobulin-like receptor, two domains, short cytoplasmic tail, 4
  Uniprot ID: P43632
  ENST ID: ENST00000614639
  CDS Start-End: 99-1004
tgtaaactgcatgggcagggcgccaaataacatcctgtgtgctgctgagctgagctggggcgcggccgcctgtctgcaccggcagcaccatgtcgctcatggtcatcatcatggcgtgtgttgggttcttcttgctgcagggggcctggccacaggagggagtccacagaaaaccttccttcctggccctcccaggtcacctggtgaaatcagaagagacagtcatcctgcaatgttggtcggatgtcatgtttgagcacttccttctgcacagagaggggaagtttaacaacactttgcacctcattggagagcaccatgatggggtttccaaggccaacttctccattggtcccatgatgcctgtccttgcaggaacctacagatgctacggttctgttcctcactccccctatcagttgtcagctcccagtgaccctctggacatggtgatcataggtctatatgagaaaccttctctctcagcccagccgggccccacggttcaggcaggagagaatgtgaccttgtcctgcagctcccggagctcctatgacatgtaccatctatccagggaaggggaggcccatgaacgtaggctccctgcagtgcgcagcatcaacggaacattccaggccgactttcctctgggccctgccacccacggagggacctacagatgcttcggctctttccgtgacgctccctacgagtggtcaaactcgagtgatccactgcttgtttccgtcacaggaaacccttcaaatagttggccttcacccactgaaccaagctccaaaaccggtaaccccagacacctacatgttctgattgggacctcagtggtcaaaatccctttcaccatcctcctcttctttctccttcatcgctggtgctccgacaaaaaaaatgctgctgtaatggaccaagagcctgcagggaacagaacagtgaacagcgaggattctgatgaacaagaccatcaggaggtgtcatacgcataattggatcactgtgttttcacacagagaaaaatcactcgcccttctgagaggcccaagacacccccaacagataccagcatgtacatagaacttccaaatgctgagcccagatccaaagttgtcttctgtccacgagcaccacagtcaggccttgaggggatcttctagggagacaacagccctgtctcaaaaccgggttgccagctcccatgtaccagcagctggaatctgaaggcatcagtcttcatcttagggcatcgctcttcctcacaccacgaatctgaacatgcctctctcttgcttacaaatgtctaaggtccccactgcctgctggagagaaaacacactcctttgcttagcccacaattctccatttcacttgacccctgcccacctctccaacctaactggcttacttcctagtctacctgaggctgcaatcacactgaggaactcacaattccaaacatacaagaggctgcctcttaacacagcacttagacacgtgctgttccacctcccttcagactatctttcagccttctgccagcagtaaaacttataaattttttaaataatttcaatgtagttttcccgccttcaaataaacatgtctgccctcatggttt

SEQ ID NO: 146537 - DNA, 1322 bp, Homo sapiens
  Payload ID: 8986
  Gene Symbol: KIR2DS4
  Gene Name: killer cell immunoglobulin-like receptor, two domains, short cytoplasmic tail, 4
  ENST ID: ENST00000610808
  CDS Start-End: 90-981
tgtaaactgcatgggcagggcgccaaataacatcctgtgcgctgctgagctgagctggggcgcggccgcctgtctgcaccggcagcaccatgtcgctcatggtcatcatcatggcgtgtgttgggttcttcttgctgcagggggcctggccacaggagggagtccacagaaaaccttccttcctggccctcccaggtcacctggtgaaatcagaagagacagtcatcctgcaatgttggtcggatgtcatgtttgagcacttccttctgcacagagaggggaagtttaacaacactttgcacctcattggagagcaccatgatggggtttccaaggccaacttctccattggtcccatgatgcctgtccttgcaggaacctacagatgctacggttctgttcctcactccccctatcagttgtcagctcccagtgaccctctggacatggtgatcataggtctatatgagaaaccttctctctcagcccagccgggccccacggttcaggcaggagagaatgtgaccttgtcctgcagctccatctatccagggaaggggaggcccatgaacgtaggctccctgcagtgcgcagcatcaacggaacattccaggccgactttcctctgggccctgccacccacggagggacctacagatgcttcggctctttccgtgacgctccctacgagtggtcaaactcgagtgatccactgcttgtttccgtcacaggaaacccttcaaatagttggccttcacccactgaaccaagctccaaaaccggtaaccccagacacctacatgttctgattgggacctcagtggtcaaaatccctttcaccatcctcctcttctttctccttcatcgctggtgctccgacaaaaaaaatgctgctgtaatggaccaagagcctgcagggaacagaacagtgaacagcgaggattctgatgaacaagaccatcaggaggtgtcatacgcataattggatcactgtgttttcacacagagaaaaatcactcgcccttctgagaggcccaagacacccccaacagataccagcatgtacatagaacttccaaatgctgagcccagatccaaagttgtcttctgtccacgagcaccacagtcaggccttgaggggatcttctagggagacaacagccctgtctcaaaaccgggttgccagctcccatgtaccagcagctggaatctgaaggcatcagtcttcatcttagggcatcgctcttcctcacaccacgaatctgaacatgcctctctcttgcttacaaatgtctaaggtccccactgcctgctggagagaa

SEQ ID NO: 146538 - DNA, 1630 bp, Homo sapiens; identical to SEQ ID NO: 146530
  Payload ID: 8986
  Gene Symbol: KIR2DS4
  Gene Name: killer cell immunoglobulin-like receptor, two domains, short cytoplasmic tail, 4
  Uniprot ID: P43632
  ENST ID: ENST00000612783
  CDS Start-End: 90-1004

SEQ ID NO: 146539 - DNA, 1596 bp, Homo sapiens
  Payload ID: 8986
  Gene Symbol: KIR2DS4
  Gene Name: killer cell immunoglobulin-like receptor, two domains, short cytoplasmic tail, 4
  Uniprot ID: P43632
  ENST ID: ENST00000613654
  CDS Start-End: 56-970
ctgtgtgctgctgagctgagctggggcgcggccgcctgtctgcaccggcagcaccatgtcgctcatggtcatcatcatggcgtgtgttgggttcttcttgctgcagggggcctggccacaggagggagtccacagaaaaccttccttcctggccctcccaggtcacctggtgaaatcagaagagacagtcatcctgcaatgttggtcggatgtcatgtttgagcacttccttctgcacagagaggggaagtttaacaacactttgcacctcattggagagcaccatgatggggtttccaaggccaacttctccattggtcccatgatgcctgtccttgcaggaacctacagatgctacggttctgttcctcactccccctatcagttgtcagctcccagtgaccctctggacatggtgatcataggtctatatgagaaaccttctctctcagcccagccgggccccacggttcaggcaggagagaatgtgaccttgtcctgcagctcccggagctcctatgacatgtaccatctatccagggaaggggaggcccatgaacgtaggctccctgcagtgcgcagcatcaacggaacattccaggccgactttcctctgggccctgccacccacggagggacctacagatgcttcggctctttccgtgacgctccctacgagtggtcaaactcgagtgatccactgcttgtttccgtcacaggaaacccttcaaatagttggccttcacccactgaaccaagctccaaaaccggtaaccccagacacctacatgttctgattgggacctcagtggtcaaaatccctttcaccatcctcctcttctttctccttcatcgctggtgctccgacaaaaaaaatgctgctgtaatggaccaagagcctgcagggaacagaacagtgaacagcgaggattctgatgaacaagaccatcaggaggtgtcatacgcataattggatcactgtgttttcacacagagaaaaatcactcgcccttctgagaggcccaagacacccccaacagataccagcatgtacatagaacttccaaatgctgagcccagatccaaagttgtcttctgtccacgagcaccacagtcaggccttgaggggatcttctagggagacaacagccctgtctcaaaaccgggttgccagctcccatgtaccagcagctggaatctgaaggcatcagtcttcatcttagggcatcgctcttcctcacaccacgaatctgaacatgcctctctcttgcttacaaatgtctaaggtccccactgcctgctggagagaaaacacactcctttgcttagcccacaattctccatttcacttgacccctgcccacctctccaacctaactggcttacttcctagtctacctgaggctgcaatcacactgaggaactcacaattccaaacatacaagaggctgcctcttaacacagcacttagacacgtgctgttccacctcccttcagactatctttcagccttctgccagcagtaaaacttataaattttttaaataatttcaatgtagttttcccgccttcaaataaacatgtctgccctcatgg

SEQ ID NO: 146540 - DNA, 1630 bp, Homo sapiens; identical to SEQ ID NO: 146530
  Payload ID: 8986
  Gene Symbol: KIR2DS4
  Gene Name: killer cell immunoglobulin-like receptor, two domains, short cytoplasmic tail, 4
  Uniprot ID: P43632
  ENST ID: ENST00000617825
  CDS Start-End: 90-1004

SEQ ID NO: 146541 - DNA, 677 bp, Homo sapiens
  Payload ID: 8986
  Gene Symbol: KIR2DS4
  Gene Name: killer cell immunoglobulin-like receptor, two domains, short cytoplasmic tail, 4
  ENST ID: ENST00000621830
  CDS Start-End: 1-677
atgtcgctcatggtcatcatcatggcgtgtgttgggttcttcttgctgcagggggcctggccacaggagggagtccacagaaaaccttccttcctggccctcccaggtcacctggtgaaatcagaagagacagtcatcctgcaatgttggtcggatgtcatgtttgagcacttccttctgcacagagaggggaagtttaacaacactttgcacctcattggagagcaccatgatggggtttccaaggccaacttctccattggtcccatgatgcctgtccttgcaggaacctacagatgctacagttctgttcctcactccccctatcagttgtcagctcccagtgaccctctggacatggtgatcataggtctatatgagaaaccttctctctcagcccagccgggccccacggttcaggcaggagagaatgtgtccttgtcctgcagctccatctatccagggagggggaggcccatgaacgtaggctccctgcagtgcgcagcatccacggaacattccaggccgactttcctctgggccctgccacccacggagggacctacagatgcttcggctctttccgtgacgctccctacgagtggtcaaactcgagtgatccactgcttgtttccgtcacaggtaaccccagacacctacatgttctgattgggacc

SEQ ID NO: 146542 - DNA, 1295 bp, Homo sapiens
  Payload ID: 8986
  Gene Symbol: KIR2DS4
  Gene Name: killer cell immunoglobulin-like receptor, two domains, short cytoplasmic tail, 4
  ENST ID: ENST00000615270
  CDS Start-End: 47-938
gctgagctgagctggggcgcggccgcctgtctgcaccggcagcaccatgtcgctcatggtcatcatcatggcgtgtgttgggttcttcttgctgcagggggcctggccacaggagggagtccacagaaaaccttccttcctggccctcccaggtcacctggtgaaatcagaagagacagtcatcctgcaatgttggtcggatgtcatgtttgagcacttccttctgcacagagaggggaagtttaacaacactttgcacctcattggagagcaccatgatggggtttccaaggccaacttctccattggtcccatgatgcctgtccttgcaggaacctacagatgctacggttctgttcctcactccccctatcagttgtcagctcccagtgaccctctggacatggtgatcataggtctatatgagaaaccttctctctcagcccagccgggccccacggttcaggcaggagagaatgtgaccttgtcctgcagctccatctatccagggaaggggaggcccatgaacgtaggctccctgcagtgcgcagcatcaacggaacattccaggccgactttcctctgggccctgccacccacggagggacctacagatgcttcggctctttccgtgacgctccctacgagtggtcaaactcgagtgatccactgcttgtttccgtcacaggaaacccttcaaatagttggccttcacccactgaaccaagctccaaaaccggtaaccccagacacctacatgttctgattgggacctcagtggtcaaaatccctttcaccatcctcctcttctttctccttcatcgctggtgctccgacaaaaaaaatgctgctgtaatggaccaagagcctgcagggaacagaacagtgaacagcgaggattctgatgaacaagaccatcaggaggtgtcatacgcataattggatcactgtgctttcacacagagaaaaatcactcgcccttctgagaggcccaagacacccccaacagataccagcatgtacatagaacttccaaatgctgagcccagatccaaagttgtcttctgtccacgagcaccacagtcaggccttgaggggatcttctagggagacaacagccctgtctcaaaaccgggttgccagctcccatgtaccagcagctggaatctgaaggcatcagtcttcatcttagggcatcgctcttcctcacaccacgaatctgaacatgcctctctcttgcttacaaatgtctaaggtccccactgcctgctggagagaaaacacactcctttgct

SEQ ID NO: 146543 - DNA, 1630 bp, Homo sapiens
  Payload ID: 8986
  Gene Symbol: KIR2DS4
  Gene Name: killer cell immunoglobulin-like receptor, two domains, short cytoplasmic tail, 4
  Uniprot ID: P43632
  ENST ID: ENST00000611311
  CDS Start-End: 90-1004
tgtaaactgcatgggcagggcgccaaataacatcctgtgcgctgctgagctgagctggggcgcggccgcctgtctgcaccggcagcaccatgtcgctcatggtcatcatcatggcgtgtgttgggttcttcttgctgcagggggcctggccacaggagggagtccacagaaaaccttccttcctggccctcccaggtcacctggtgaaatcagaagagacagtcatcctgcaatgttggtcggatgtcatgtttgagcacttccttctgcacagagaggggaagtttaacaacactttgcacctcattggagagcaccatgatggggtttccaaggccaacttctccattggtcccatgatgcctgtccttgcaggaacctacagatgctacggttctgttcctcactccccctatcagttgtcagctcccagtgaccctctggacatggtgatcataggtctatatgagaaaccttctctctcagcccagccgggccccacggttcaggcaggagagaatgtgaccttgtcctgcagctcccggagctcctatgacatgtaccatctatccagggaaggggaggcccatgaacgtaggctccctgcagtgcgcagcatcaacggaacattccaggccgactttcctctgggccctgccacccacggagggacctacagatgcttcggctctttccgtgacgctccctacgagtggtcaaactcgagtgatccactgcttgtttccgtcacaggaaacccttcaaatagttggccttcacccactgaaccaagctccaaaaccggtaaccccagacacctacatgttctgattgggacctcagtggtcaaaatccctttcaccatcctcctcttctttctccttcatcgctggtgctccgacaaaaaaaatgctgctgtaatggaccaagagcctgcagggaacagaacagtgaacagcgaggattctgatgaacaagaccatcaggaggtgtcatacgcataattggatcactgtgttttcacacagagaaaaatcactcgcccttctgagaggcccaagacacccccaacagataccagcatgtacatagaacttccaaatgctgagcccagatccaaagttgtcttctgtccacgagcaccacagtcaggccttgaggggatcttctagggagacaacagccctgtctcaaaaccgggttgccagctcccatgtaccagcagctggaatctgaaggcatcagtcttcatcttagggcatcgctcttcctcacaccacgaatctgaacatgcctctctcttgcttacaaatgtctaaggtccccactgcctgctggagagaaaacacactcctttgcttagcccacaattctccatttcacttgacccctgcccacctctccaacctaactggcttacttcctagtctacctgaggctgcaatcacactgaggaactcacaattccaaacatacaagaggctgcctcttaacacagcacttagacaggtgctgttccacctcccttcagactatctttcagccttctgccagcagtaaaacttataaattttttaaataatttcaatgtagttttcccgccttcaaataaacatgtctgccctcatgg

SEQ ID NO: 146544 - DNA, 1120 bp, Homo sapiens
  Payload ID: 8987
  Gene Symbol: KIR2DS5
  Gene Name: killer cell immunoglobulin-like receptor, two domains, short cytoplasmic tail, 5
  ENST ID: ENST00000615980
  CDS Start-End: 59-973
tcctgtgcgctgctgagctgagctaggggtgcggccgcctgtctgctccggcaccaccatgtcactcatggtcatcagcatggcgtgtgttgcgttcttcttgctgcagggggcctggccacatgagggattccgcagaaaaccttccctcctggcccacccaggtcccctggtgaaatcagaagagacagtcatcctgcaatgttggtcagatgtcatgtttgagcacttccttctgcacagagaggggacgtttaaccacactttgcgcctcattggagagcacattgatggggtctccaagggcaacttctccatcggtcgcatgacacaagacctggcagggacctacagatgctacggttctgttactcactccccctatcagttgtcagcgcccagtgaccctctggacatcgtgatcacaggtctatatgagaaaccttctctctcagcccagccgggccccacggttctggcaggagagagcgtgaccttgtcctgcagctcccggagctcctatgacatgtaccatctatccagggaaggggaggcccatgaacgtaggctccctgcagggcccaaggtcaacggaacattccaggccgactttcctctggaccctgccacccacggagggacctacagatgcttcggctctttccgtgactctccatacgagtggtcaaagtcaagtgacccactgcttgtttctgtcacaggaaactcttcaaatagttggccttcacccactgaaccaagctccaaaaccggtaaccccagacacctacacgttctgattgggacctcagtggtcaaactccctttcaccatcctcctcttctttctccttcatcgctggtgctccaacaaaaaaaatgcatctgtaatggaccaagggcctgcggggaacagaacagtgaacagggaggattctgatgaacaagaccatcaggaggtgtcatacgcataattggatcactgtgttttcacacagagaaaaatcactcgcccttctgagaggcccaagacacccccaacagataccagcatgtacatagaacttccaaatgctgagcccagatccaaagttgtcttctgtccacgagcaccacagtca

SEQ ID NO: 146545 - DNA, 1422 bp, Homo sapiens
  Payload ID: 8987
  Gene Symbol: KIR2DS5
  Gene Name: killer cell immunoglobulin-like receptor, two domains, short cytoplasmic tail, 5
  ENST ID: ENST00000619788
  CDS Start-End: 57-971
ctgtgcgctgctgagctgagctaggggtgcggccgcctgtctgctccggcaccaccatgtcactcatggtcatcagcatggcgtgtgttgcgttcttcttgctgcagggggcctggccacatgagggattccgcagaaaaccttccctcctggcccacccaggtcccctggtgaaatcagaagagacagtcatcctgcaatgttggtcagatgtcatgtttgagcacttccttctgcacagagaggggacgtttaaccacactttgcgcctcattggagagcacattgatggggtctccaagggcaacttctccatcggtcgcatgacacaagacctggcagggacctacagatgctacggttctgttactcactccccctatcagttgtcagcgcccagtgaccctctggacatcgtgatcacaggtctatatgagaaaccttctctctcagcccagccgggccccacggttctggcaggagagagcgtgaccttgttctgcagctcccggagctcctatgacatgtaccatctatccagggaaggggaggcccatgaacgtaggctccctgcagggcccaaggtcaacggaacattccaggccgactttcctctggaccctgccacccacggagggacctacagatgcttcggctctttccatgactctccatacgagtggtcaaagtcaagtgacccactgcttgtttctgtcacaggaaactcttcaaatagttggccttcacccactgaaccaagctccgaaaccggtaaccccagacacctacacgttctgattgggacctcagtggtcaaactccctttcaccatcctcctcttctttctccttcatcgctggtgctccaacaaaaaaaatgcatctgtaatggaccaagggcctgcggggaacagaacagtgaacagggaggattctgatgaacaggaccatcaggaggtgtcatacgcataattggatcactgtgttttcacacagagaaaaatcactcccccttctcagaggcccaagacacccccaacagataccagcatgtacatagaacttccaaatgctgagtccagatccaaagctgtcttctgtccacgagcaccacagtcaggccttgaggggatcttctagggagacaacagccctgtctcaaaaccgggttgccagctcccatgtaccagcagctggaatctgaaggcatcagtcttcatcttaggggatcgctcttcctcacaccacgaatctgaacatgcctctctcttgcttacaaatgtctaaggtccccactgcctgctggagagaaaacacactcctttgcttagcccacaattctccatttcacttgacccctgcccacctctccaacctaactggcttacttcctagtctacttgaggctgcaatcacactgagg

SEQ ID NO: 146546 - DNA, 1601 bp, Homo sapiens
  Payload ID: 8987
  Gene Symbol: KIR2DS5
  Gene Name: killer cell immunoglobulin-like receptor, two domains, short cytoplasmic tail, 5
  ENST ID: ENST00000614053
  CDS Start-End: 35-949
aggggtgcggccgcctgtctgcaccggcagcaccatgtcgctcatggtcatcagcatggcgtgtgttgcgttcttcttgctgcagggggcctggccacatgagggattccgcagaaaaccttccctcctggcccacccaggtcccctggtgaaatcagaagagacagtcatcctgcaatgttggtcagatgtcatgtttgagcacttccttctgcacagagaggggacgtttaaccacactttgcgcctcattggagagcacattgatggggtctccaagggcaacttctccatcggtcgcatgacacaagacctggcagggacctacagatgctacggttctgttactcactccccctatcagttgtcagcgcccagtgaccctctggacatcgtgatcacaggtctatatgagaaaccttctctctcagcccagccgggccccacggttctggcaggagagagcgtgaccttgtcctgcagctcccggagctcctatgacatgtaccatctatccagggaaggggaggcccatgaacgtaggctccctgcagggcccaaggtcaacagaacattccaggccgactttcctctggaccctgccacccacggagggacctacagatgcttcggctctttccgtgactctccatacgagtggtcaaagtcaagtgacccactgcttgtttctgtcacaggaaactcttcaaatagttggccttcacccactgaaccaagctccgaaaccggtaaccccagacacctacacgttctgattgggacctcagtggtcaaactccctttcaccatcctcctcttctttctccttcatcgctggtgctccaacaaaaaaaatgcatctgtaatggaccaagggcctgcggggaacagaacagtgaacagggaggattctgatgaacaggaccatcaggaggtgtcatacgcataattggatcactgtgttttcacacagagaaaaatcactcccccttctcagaggcccaagacacccccaacagataccagcatgtacatagaacttccaaatgctgagtccagatccaaagctgtcttctgtccacgagcaccacagtcaggccttgaggggatcttctagggagacaacagccctgtctcaaaaccgggttgccagctcccatgtaccagcagctggaatctgaaggcatcagtcttcatcttaggggatcgctcttcctcaaaccacgaatctgaacatgcctctctcttgcttacaaatgtctaaggtccccactgcctgctggagagaaaacacactcctttgcttagcccacaattctccatttcacttgacccctgcccacctctccaacctaactggcttacttcctagtctacttgaggctgcaatcacactgaggaactcacaattccaaacatacaagaggctccctcttaacacagcacttagacacgtgctgttccaccttctctcatgcagttccacctcccctcagactatctttcagccttctgtcagcagtaaaacttataaattgtttttagtaatttcaatgtagttttccctccttcaaataaacatgtctgccctcatggtttcg

SEQ ID NO: 146547 - DNA, 1455 bp, Homo sapiens
  Payload ID: 8987
  Gene Symbol: KIR2DS5
  Gene Name: killer cell immunoglobulin-like receptor, two domains, short cytoplasmic tail, 5
  ENST ID: ENST00000619698
  CDS Start-End: 12-926
ccggcagcaccatgtcgctcatggtcatcagcatggcgtgtgttgcgttcttcttgctgcagggggcctggccacatgagggattccgcagaaaaccttccctcctggcccacccaggtcccctggtgaaatcagaagagacagtcatcctgcaatgttggtcagatgtcatgtttgagcacttccttctgcacagagaggggacgtttaaccacactttgcgcctcattggagagcacattgatggggtctccaagggcaacttctccatcggtcgcatgacacaagacctggcagggacctacagatgctacggttctgttactcactccccctatcagttgtcagcgcccagtgaccctctggacatcgtgatcacaggtctatatgagaaaccttctctctcagcccagccgggccccacggttctggcaggagagagcgtgaccttgtcctgcagctcccggagctcctatgacatgtaccatctatccagggaaggggaggcccatgaacgtaggctccctgcagggcccaaggtcaacagaacattccaggccgactttcctctggaccctgccacccacggagggacctacagatgcttcggctctttccgtgactctccatacgagtggtcaaagtcaagtgacccactgcttgtttctgtcacaggaaactcttcaaatagttggccttcacccactgaaccaagctccgaaaccggtaaccccagacacctacacgttctgattgggacctcagtggtcaaactccctttcaccatcctcctcttctttctccttcatcgctggtgctccaacaaaaaaaatgcatctgtaatggaccaagggcctgcggggaacagaacagtgaacagggaggattctgatgaacaggaccatcaggaggtgtcatacgcataattggatcactgtgttttcacacagagaaaaatcactcccccttctcagaggcccaagacacccccaacagataccagcatgtacatagaacttccaaatgctgagtccagatccaaagctgtcttctgtccacgagcaccacagtcaggccttgaggggatcttctagggagacaacagccctgtctcaaaaccgggttgccagctcccatgtaccagcagctggaatctgaaggcatcagtcttcatcttaggggatcgctcttcctcaaaccacgaatctgaacatgcctctctcttgcttacaaatgtctaaggtccccactgcctgctggagagaaaacacactcctttgcttagcccacaattctccatttcacttgacccctgcccacctctccaacctaactggcttacttcctagtctacttgaggctgcaatcacactgaggaactcacaattccaaacatacaagaggctccctcttaacacagcacttagacacgtgctgttccaccttctctcatgc

SEQ ID NO: 146548 - DNA, 1601 bp, Homo sapiens
  Payload ID: 8987
  Gene Symbol: KIR2DS5
  Gene Name: killer cell immunoglobulin-like receptor, two domains, short cytoplasmic tail, 5
  ENST ID: ENST00000617536
  CDS Start-End: 39-1088
gagctggggcgcggctgcctgtctgcaccggcagcaccatgtcgctcatggtcgtcagcatggcgtgtgttgggttcttcttgctgcagggggcctggacacatgagggattccgcagaaaaccttccctcctggcccacccaggtcccctggtgaaatcagaagagacagtcatcctgcaatgttggtcagatgtcatgtttgagcacttccttctgcacagagaggggacgtttaaccacactttgcgcctcattggagagcacattgatggggtctccaagggcaacttctccatcggtcgcatgacacaagacctggcagggacctacagatgctacggttctgttactcactccccctatcagttgtcagcgcccagtgaccctctggacatcgtgatcacaggtctatatgagaaaccttctctctcagcccagccgggccccacggttctggcaggagagagcgtgaccttgtcctgcagctcccggagctcctatgacatgtaccatctatccagggaaggggaggcccatgaacgtaggctccctgcagggcccaaggtcaacggaacattccaggccgactttcctctggaccctgccacccacggagggacctacagatgcttcggctctttccgtgactctccatacgagtggtcaaagtcaagtgacccactgcttgtttctgtcacaggaaacccttcaaatagttggccttcacccactgaaccaagctccaaaaccggtaacccaagacacctgcacgttctgattgggacctcagtggtcatcatcctcttcatcctcctcctcttctttctccttcatcgctggtgctccaacaagaaaaatgctgctgtaatggaccaagagcctgcagggaacagaacagcgaatagcgaggactctgatgaacaagaccctcaggaggtgacatacgtacagttggatcactgcgttttcacacagagaaaaatcactcgcccttctcagaggcccaagacacccccaacagataccagagtgtacacggaacttccaaatgctgagtccagatccaacgttgtctcctgcccatgagcaccacagtcaggccttgaggggatcttctagggagacaatagccctgtctcaaaaccgggttgccagctcccatgtgccagcagctggaatctgaaggcgtgagtctgcatcttagggcatcgctcttcctcacaccacaaatctgaatgtgcctctctcttgcttacaaatgtctaaggtccccactgcctgctggagagaaaacacactcctttgcttagcccacaattctccatttcacttgacccctgcccacctctccaaccttactggcttacttcctagtctacttgaggctgcaatcacactgaggaactcacagttccaaacatacaagaggctccctcttaacacggcacttagacacgtcctgttccaccttccctcatgctgttccacctcccctcagagtatctttcagccttctgtcagcagtaaaacttatatattttttaaaataatttcaatgtagttttccctccttcaaataaacatgtctgccctcatggt

SEQ ID NO: 146549 - DNA, 1601 bp, Homo sapiens; identical to SEQ ID NO: 146546
  Payload ID: 8987
  Gene Symbol: KIR2DS5
  Gene Name: killer cell immunoglobulin-like receptor, two domains, short cytoplasmic tail, 5
  ENST ID: ENST00000618443
  CDS Start-End: 35-949

SEQ ID NO: 146550 - DNA, 1448 bp, Homo sapiens
  Payload ID: 8988
  Gene Symbol: KLRB1
  Gene Name: killer cell lectin-like receptor subfamily B, member 1
  Uniprot ID: Q12918
  ENST ID: ENST00000229402
  CDS Start-End: 48-725
gagtttgttcttacacacaagtttaatgccaccttcctctgtctgccatggaccaacaagcaatatatgctgagttaaacttacccacagactcaggcccagaaagttcttcaccttcatctcttcctcgggatgtctgtcagggttcaccttggcatcaatttgccctgaaacttagctgtgctgggattattctccttgtcttggttgttactgggttgagtgtttcagtgacatccttaatacagaaatcatcaatagaaaaatgcagtgtggacattcaacagagcaggaataaaacaacagagagaccgggtctcttaaactgcccaatatattggcagcaactccgagagaaatgcttgttattttctcacactgtcaacccttggaataacagtctagctgattgttccaccaaagaatccagcctgctgcttattcgagataaggatgaattgatacacacacagaacctgatacgtgacaaagcaattctgttttggattggattaaatttttcattatcagaaaagaactggaagtggataaacggctcttttttaaattctaatgacttagaaattagaggtgatgctaaagaaaacagctgtatttccatctcacagacatctgtgtattctgagtactgtagtacagaaatcagatggatctgccaaaaagaactaacacctgtgagaaataaagtgtatcctgactcttgactatgaatcccatctcaatttatttgcttcccattactgatctctgtacttgtagctgcacatactattggtactacctaatagtgccacatttagtggcacaaagtgaacaattctgagaattgacaactgttatgaatcttacagaagttcatgtttatcatattcattctattaaatgaggaaacagagacatagagaaaaacgtgcatcgttttaaagaaacagtgatattctatggtgaaggagtgaaggatgtccccgaatatgccagattggtatatgattgttttgtgtttaaaacagtggagaaattgtagattcagaaagggagagctgacctgtctcttcccgcacgcggcaagccgtgaagattcctctgggagggctatccgagtcatacaagggcaagaaaatagctcttatcgccagagacctggaattggatgctgcaatgaacctgaataaagatacttaataaacacctatctttcacctattttacagccccccgcaaccaatatatctcctagtgactcctctagaaaatttattgcccctagccagcttttcttcatcctgtcatttcttttcaaatttatcattcttggtctaaaaagcataaaagcatcttgcttaggccacttctatggatttcactctcttgcgagttcctcatgtacatgcaaaacgaataaaatgtgtatacttttattttgttca

SEQ ID NO: 146551 - DNA, 1332 bp, Homo sapiens
  Payload ID: 8989
  Gene Symbol: KLRC1
  Gene Name: killer cell lectin-like receptor subfamily C, member 1
  Uniprot ID: P26715
  ENST ID: ENST00000347831
  CDS Start-End: 165-812
gcaggcattgtttgttcttgtcttggatttatgcctttaaatttcaccttttattacacagctatagcaggcctttttatgagactaacctggcctctccactaaaggatgtgtgactttctggggacagaagagtacagtccctgacatcacacactgcagagatggataaccaaggagtaatctactcagacctgaatctgcccccaaacccaaagaggcagcaacgaaaacctaaaggcaataaaaactccattttagcaactgaacaggaaataacctatgcggaattaaaccttcaaaaagcttctcaggattttcaagggaatgacaaaacctatcactgcaaagatttaccatcagctccagagaagctcattgttgggatcctgggaattatctgtcttatcttaatggcctctgtggtaacgatagttgttattccctcacgtcattgtggccattgtcctgaggagtggattacatattccaacagttgttactacattggtaaggaaagaagaacttgggaagagagtttgctggcctgtacttcgaagaactccagtctgctttctatagataatgaagaagaaatgaaatttctgtccatcatttcaccatcctcatggattggtgtgtttcgtaacagcagtcatcatccatgggtgacaatgaatggtttggctttcaaacatgagataaaagactcagataatgctgaacttaactgtgcagtgctacaagtaaatcgacttaaatcagcccagtgtggatcttcaataatatatcattgtaagcataagctttagaggtaaagcgtttgcatttgcagtgcatcagataaattgtatatttcttaaaatagaaatatattatgattgcataaatcttaaaatgaattatgttatttgctctaataagaaaattctaaatcaattattgaaacaggatacacacaattactaaagtacagacatcctagcatttgtgtcgggctcattttgctcaacatggtatttgtggttttcagcctttctaaaagttgcatgttatgtgagtcagcttataggaagtaccaagaacagtcaaacccatggagacagaaagtagaatagtggttgccaatgtctgagggaggttgaaataggagatgacctctaactgatagaacgttactttgtgtcgtgatgaaaactttctaaatttcagtagtggtgatggttgtaactctgcgaatatactaaacatcattgatttttaatcattttaagtgcatgaaatgtatgctttgtacacgacacttcaataaagctatccagaaaaaaaaaa

SEQ ID NO: 146552 - DNA, 1407 bp, Homo sapiens
  Payload ID: 8989
  Gene Symbol: KLRC1
  Gene Name: killer cell lectin-like receptor subfamily C, member 1
  Uniprot ID: P26715
  ENST ID: ENST00000359151
  CDS Start-End: 183-884
gggcagtctgcgaagattgcaggcattgtttgttcttgtcttggatttatgcctttaaatttcaccttttattacacagctatagcaggcctttttatgagactaacctggcctctccactaaaggatgtgtgactttctggggacagaagagtacagtccctgacatcacacactgcagagatggataaccaaggagtaatctactcagacctgaatctgcccccaaacccaaagaggcagcaacgaaaacctaaaggcaataaaaactccattttagcaactgaacaggaaataacctatgcggaattaaaccttcaaaaagcttctcaggattttcaagggaatgacaaaacctatcactgcaaagatttaccatcagctccagagaagctcattgttgggatcctgggaattatctgtcttatcttaatggcctctgtggtaacgatagttgttattccctctacattaatacagaggcacaacaattcttccctgaatacaagaactcagaaagcacgtcattgtggccattgtcctgaggagtggattacatattccaacagttgttactacattggtaaggaaagaagaacttgggaagagagtttgctggcctgtacttcgaagaactccagtctgctttctatagataatgaagaagaaatgaaatttctgtccatcatttcaccatcctcatggattggtgtgtttcgtaacagcagtcatcatccatgggtgacaatgaatggtttggctttcaaacatgagataaaagactcagataatgctgaacttaactgtgcagtgctacaagtaaatcgacttaaatcagcccagtgtggatcttcaataatatatcattgtaagcataagctttagaggtaaagcgtttgcatttgcagtgcatcagataaattgtatatttcttaaaatagaaatatattatgattgcataaatcttaaaatgaattatgttatttgctctaataagaaaattctaaatcaattattgaaacaggatacacacaattactaaagtacagacatcctagcatttgtgtcgggctcattttgctcaacatggtatttgtggttttcagcctttctaaaagttgcatgttatgtgagtcagcttataggaagtaccaagaacagtcaaacccatggagacagaaagtagaatagtggttgccaatgtctgagggaggttgaaataggagatgacctctaactgatagaacgttactttgtgtcgtgatgaaaactttctaaatttcagtagtggtgatggttgtaactctgcgaatatactaaacatcattgatttttaatcattttaagtgcatgaaatgtatgctttgtacacgacacttcaataaagctatccagaaaaaaaaaaaaa

SEQ ID NO: 146553 - DNA, 1559 bp, Homo sapiens
  Payload ID: 8989
  Gene Symbol: KLRC1
  Gene Name: killer cell lectin-like receptor subfamily C, member 1
  Uniprot ID: P26715
  ENST ID: ENST00000408006
  CDS Start-End: 389-1036
gcatgccccagaggtacagatgtatatgtctcccaggaagtctctgtgggtgaaggactgatctcaagttgtggctgacactagttaaagccaagttagagggctgtttcagggtctacattgagactacagttgatatgcctacctcctgagacactagtgtgtgagtctcctcctgggcccctgggcaaatggttttggcagcatgaccaaggcctaaatggggctgaaggcaagcacaggaggatgggtcccttttcaggtctggagatggaatcactgttgctatagcaggcctttttatgagactaacctggcctctccactaaaggatgtgtgactttctggggacagaagagtacagtccctgacatcacacactgcagagatggataaccaaggagtaatctactcagacctgaatctgcccccaaacccaaagaggcagcaacgaaaacctaaaggcaataaaaactccattttagcaactgaacaggaaataacctatgcggaattaaaccttcaaaaagcttctcaggattttcaagggaatgacaaaacctatcactgcaaagatttaccatcagctccagagaagctcattgttgggatcctgggaattatctgtcttatcttaatggcctctgtggtaacgatagttgttattccctcacgtcattgtggccattgtcctgaggagtggattacatattccaacagttgttactacattggtaaggaaagaagaacttgggaagagagtttgctggcctgtacttcgaagaactccagtctgctttctatagataatgaagaagaaatgaaatttctgtccatcatttcaccatcctcatggattggtgtgtttcgtaacagcagtcatcatccatgggtgacaatgaatggtttggctttcaaacatgagataaaagactcagataatgctgaacttaactgtgcagtgctacaagtaaatcgacttaaatcagcccagtgtggatcttcaataatatatcattgtaagcataagctttagaggtaaagcgtttgcatttgcagtgcatcagataaattgtatatttcttaaaatagaaatatattatgattgcataaatcttaaaatgaattatgttatttgctctaataagaaaattctaaatcaattattgaaacaggatacacacaattactaaagtacagacatcctagcatttgtgtcgggctcattttgctcaacatggtatttgtggttttcagcctttctaaaagttgcatgttatgtgagtcagcttataggaagtaccaagaacagtcaaacccatggagacagaaagtagaatagtggttgccaatgtctgagggaggttgaaataggagatgacctctaactgatagaacgttactttgtgtcgtgatgaaaactttctaaatttcagtagtggtgatggttgtaactctgcgaatatactaaacatcattgatttttaatcattttaagtgcatgaaatgtatgctttgtacacgacacttcaataaagctatccagaaaaaaaaaaaaa

SEQ ID NO: 146554 - DNA, 1600 bp, Homo sapiens
  Payload ID: 8989
  Gene Symbol: KLRC1
  Gene Name: killer cell lectin-like receptor subfamily C, member 1
  Uniprot ID: P26715
  ENST ID: ENST00000544822
  CDS Start-End: 389-1090
gcatgccccagaggtacagatgtatatgtctcccaggaagtctctgtgggtgaaggactgatctcaagttgtggctgacactagttaaagccaagttagagggctgtttcagggtctacattgagactacagttgatatgcctacctcctgagacactagtgtgtgagtctcctcctgggcccctgggcaaatggttttggcagcatgaccaaggcctaaatggggctgaaggcaagcacaggaggatgggtcccttttcaggtctggagatggaatcactgttgctatagcaggcctttttatgagactaacctggcctctccactaaaggatgtgtgactttctggggacagaagagtacagtccctgacatcacacactgcagagatggataaccaaggagtaatctactcagacctgaatctgcccccaaacccaaagaggcagcaacgaaaacctaaaggcaataaaaactccattttagcaactgaacaggaaataacctatgcggaattaaaccttcaaaaagcttctcaggattttcaagggaatgacaaaacctatcactgcaaagatttaccatcagctccagagaagctcattgttgggatcctgggaattatctgtcttatcttaatggcctctgtggtaacgatagttgttattccctctacattaatacagaggcacaacaattcttccctgaatacaagaactcagaaagcacgtcattgtggccattgtcctgaggagtggattacatattccaacagttgttactacattggtaaggaaagaagaacttgggaagagagtttgctggcctgtacttcgaagaactccagtctgctttctatagataatgaagaagaaatgaaatttctgtccatcatttcaccatcctcatggattggtgtgtttcgtaacagcagtcatcatccatgggtgacaatgaatggtttggctttcaaacatgagataaaagactcagataatgctgaacttaactgtgcagtgctacaagtaaatcgacttaaatcagcccagtgtggatcttcaataatatatcattgtaagcataagctttagaggtaaagcgtttgcatttgcagtgcatcagataaattgtatatttcttaaaatagaaatatattatgattgcataaatcttaaaatgaattatgttatttgctctaataagaaaattctaaatcaattattgaaacaggatacacacaattactaaagtacagacatcctagcatttgtgtcgggctcattttgctcaacatggtatttgtggttttcagcctttctaaaagttgcatgttatgtgagtcagcttataggaagtaccaagaacagtcaaacccatggagacagaaagtagaatagtggttgccaatgtctgagggaggttgaaataggagatgacctctaactgatagaacgttactttgtgtcgtgatgaaaactttctaaatttcagtagtggtgatggttgtaactctgcgaatatactaaacatcattgatttttaatcattttaagtgcatgaaatgtatgctttgtacacgacacttcaataaagctatccag

SEQ ID NO: 146555 - DNA, 1179 bp, Homo sapiens
  Payload ID: 8989
  Gene Symbol: KLRC1
  Gene Name: killer cell lectin-like receptor subfamily C, member 1
  ENST ID: ENST00000536188
  CDS Start-End: 458-1144
acagttgagaggagtttgagtggagattcagggccattttagtatcttctgtaggacagaggtcagcaagcatgccccagaggtacagatgtatatgtctcccaggaagtctctgtgggtgaaggactgatctcaagttgtggctgacactagttaaagccaagttagagggctgtttcagggtctacattgagactacagttgatatgcctacctcctgagacactagtgtgtgagtctcctcctgggcccctgggcaaatggttttggcagcatgaccaaggcctaaatggggctgaaggcaagcacaggaggatgggtcccttttcaggtctggagatggaatcactgttgctatagcaggcctttttatgagactaacctggcctctccactaaaggatgtgtgactttctggggacagaagagtacagtccctgacatcacacactgcagagatggataaccaaggagtaatctactcagacctgaatctgcccccaaacccaaagaggcagcaacgaaaacctaaaggcaataaaaactccattttagcaactgaacaggaaataacctatgcggaattaaaccttcaaaaagcttctcaggattttcaagggaatgacaaaacctatcactgcaaagatttaccatcagctccagagaagctcattgttgggatcctgggaattatctgtcttatcttaatggcctctgtggtaacgatagttgttattccctctacattaatacagaggcacaacaattcttccctgaatacaagaactcagaaagcacgtcattgtggccattgtcctgaggagtggattacatattccaacagttgttactacattggtaaggaaagaagaacttgggaagagagtttgctggcctgtacttcgaagaactccagtctgctttctatagataatgaagaagaaatgaaatttctgtccatcatttcaccatcctcatggattggtgtgtttcgtaacagcagtcatcatccatgggtgacaatgaatggtttggctttcaaacatgagataaaagactcagataatgctgaacttaactgtgcagtgctacaagtaaatcgacttaaatcagcccagtgtggatcttcaataatatatcattaaacttgttaatttaatacaatttacaacacacctgc

SEQ ID NO: 146556 - DNA, 530 bp, Homo sapiens
  Payload ID: 8989
  Gene Symbol: KLRC1
  Gene Name: killer cell lectin-like receptor subfamily C, member 1
  ENST ID: ENST00000543893
  CDS Start-End: 1-233
aggagtggattacatattccaacagttgttactacattggtaaggaaagaagaacttgggaagagagtttgctggcctgtacttcgaagaactccagtctgctttctatagataatgaagaagaaatgaaatttctgtccatcatttcaccatcctcatggattggtgtgtttcgtaacagcagtcatcatccatgggtgacaatgaatggtttggctttcaaacatgagtaagttgttttgtatggcgctatataacaatatatatataaaggataaattcagaagaataatatgaataaatctatgtggaatcatagagatgaagaaagatgtggaaagttagtgaaatgctgacataaatattttacaatagaccatagtagtccatatatttcaaccgctcattggtcagctagtaaccttcttgattatcaggtgtccaatctttggcttctgtgggccacattggaagaagaagagtcttgggccacacataaaatacactaacactaacgatagctgacgagc

SEQ ID NO: 146557 - DNA, 1211 bp, Homo sapiens
  Payload ID: 8990
  Gene Symbol: KLRC2
  Gene Name: killer cell lectin-like receptor subfamily C, member 2
  ENST ID: ENST00000381901
  CDS Start-End: 8-703
tgcagagatgaataaacaaagaggaaccttctcagaagtgagtctggcccaggacccaaagcggcagcaaaggaaacctaaaggcaataaaagctccatttcaggaaccgaacaggaaatattccaagtagaattaaatcttcaaaatccttccctgaatcatcaagggattgataaaatatatgactgccaaggtttactgccacctccagagaagctcactgccgaggtcctaggaatcatttgcattgtcctgatggccactgtgttaaaaacaatagttcttattcctttcctggagcagaacaattcttccccaaatacaagaacccagaaaacacgtcattgtggccattgtcctgaggagtggattacatattccaacagttgttattacattggtaaggaaagaagaacttgggaagagagtttgctggcctgtacttcgaagaactccagtctgctttctatagataatgaagaagaaatgaaatttctggccagcattttaccttcctcatggattggtgtgtttcgtaacagcagtcatcatccatgggtgacaataaatggtttggctttcaaacataagataaaagactcagataatgctgaacttaactgtgcagtgctacaagtaaatcgacttaaatcagcccagtgtggatcttcaatgatatatcattgtaagcataagctttagaagtaaagcatttgcgtttgcagtgcatcagatacattttatatttcttaaaatagaaatattatgattgcataaatctgaaaatgaattatgttatttgctctgatacaaaaattctaaatcaattattgaaataggatgcacacaattactaaagtacagacatcctagcatttgtgtcgggctcattttgctcaacatggtatttgtggttttcagcctttctaaaagttgcatgttatgtgagtcagcttataggaagtaccaagaacagtcaaacccatggagacagaaagtagaatagtggttgccaatgtctcagggaggttgaaataggagatgaccactaattgatagaacgtttctttgtgtcgtgatgaaaactttctaaatttcagtagtggtgatggttgtaactctgcgaatatactaaacatcattgatttttaatcattttaagtgcatgaaatgtatgctttgtacatgacacttcaataaagctatccag

SEQ ID NO: 146558 - DNA, 1221 bp, Homo sapiens
  Payload ID: 8990
  Gene Symbol: KLRC2
  Gene Name: killer cell lectin-like receptor subfamily C, member 2
  Uniprot ID: P26717
  ENST ID: ENST00000381902
  CDS Start-End: 8-703
tgcagagatgaataaacaaagaggaaccttctcagaagtgagtctggcccaggacccaaagcggcagcaaaggaaacctaaaggcaataaaagctccatttcaggaaccgaacaggaaatattccaagtagaattaaatcttcaaaatccttccctgaatcatcaagggattgataaaatatatgactgccaaggtttactgccacctccagagaagctcactgccgaggtcctaggaatcatttgcattgtcctgatggccactgtgttaaaaacaatagttcttattcctttcctggagcagaacaatttttccccgaatacaagaacgcagaaagcacgtcattgtggccattgtcctgaggagtggattacatattccaacagttgttattacattggtaaggaaagaagaacttgggaagagagtttgctggcctgtacttcgaagaactccagtctgctttctatagataatgaagaagaaatgaaatttctggccagcattttaccttcctcatggattggtgtgtttcgtaacagcagtcatcatccatgggtgacaataaatggtttggctttcaaacataagataaaagactcagataatgctgaacttaactgtgcagtgctacaagtaaatcgacttaaatcagcccagtgtggatcttcaatgatatatcattgtaagcataagctttagaagtaaagcatttgcgtttgcagtgcatcagatacattttatatttcttaaaatagaaatattatgattgcataaatctgaaaatgaattatgttatttgctctgatacaaaaattctaaatcaattattgaaataggatgcacacaattactaaagtacagacatcctagcatttgtgtcgggctcattttgctcaacatggtatttgtggttttcagcctttctaaaagttgcatgttatgtgagtcagcttataggaagtaccaagaacagtcaaacccatggagacagaaagtagaatagtggttgccaatgtctcagggaggttgaaataggagatgaccactaattgatagaacgtttctttgtgtcgtgatgaaaactttctaaatttcagtagtggtgatggttgtaactctgcgaatatactaaacatcattgatttttaatcattttaagtgcatgaaatgtatgctttgtacatgacacttcaataaagctatccagaaaaaaaaaa

SEQ ID NO: 146559 - DNA, 549 bp, Homo sapiens
  Payload ID: 8990
  Gene Symbol: KLRC2
  Gene Name: killer cell lectin-like receptor subfamily C, member 2
  ENST ID: ENST00000535069
  CDS Start-End: 1-312
aaaagctccatttcaggaaccgaacaggaaatattccaagtagaattaaatcttcaaaatccttccctgaatcatcaagggattgataaaatatatgactgccaaggtttactgccacctccagagaagctcactgccgaggtcctaggaatcatttgcattgtcctgatggccactgtgttaaaaacaatagttcttattcctttcctggagcagaacaatttttccccgaatacaagaacgcagaaagaagaacttgggaagagagtttgctggcctgtacttcgaagaactccagtctgctttctatagataatgaagaagaaatgaaatttctggccagcattttaccttcctcatggattggtgtgtttcgtaacagcagtcatcatccatgggtgacaataaatggtttggctttcaaacataagataaaagactcagataatgctgaacttaactgtgcagtgctacaagtaaatcgacttaaatcagcccagtgtggatcttcaatgatatatcattaaacttgttaatttaatacaattt

SEQ ID NO: 146560 - DNA, 771 bp, Homo sapiens
  Payload ID: 8990
  Gene Symbol: KLRC2
  Gene Name: killer cell lectin-like receptor subfamily C, member 2
  ENST ID: ENST00000536833
  CDS Start-End: 116-634
aaacttgttaatttaatacaatttacaacacacctgctggcactttgatctgggacctccctgttgtctgaactaggtaacctgacctctccactgaagggcgtgtggctttctgatgacagtaggtttactgccacctccagagaagctcactgccgaggtcctaggaatcatttgcattgtcctgatggccactgtgttaaaaacaatagttcttattcctttcctggagcagaacaatttttccccgaatacaagaacgcagaaagcacgtcattgtggccattgtcctgaggagtggattacatattccaacagttgttattacattggtaaggaaagaagaacttgggaagagagtttgctggcctgtacttcgaagaactccagtctgctttctatagataatgaagaagaaatgaaatttctggccagcattttaccttcctcatggattggtgtgtttcgtaacagcagtcatcatccatgggtgacaataaatggtttggctttcaaacataagataaaagactcagataatgctgaacttaactgtgcagtgctacaagtaaatcgacttaaatcagcccagtgtggatcttcaatgatatatcattgtaagcataagctttagaagtaaagcatttgcgtttgcagtgcatcagatacattttatatttcttaaaatagaaatattatgattgcataaatctgaaaatgaattatgttatttgctctgatacaaaaattctaaatcaattattgaaatag

SEQ ID NO: 146561 - DNA, 500 bp, Homo sapiens
  Payload ID: 8990
  Gene Symbol: KLRC2
  Gene Name: killer cell lectin-like receptor subfamily C, member 2
  ENST ID: ENST00000537017
  CDS Start-End: 1-257
catattccaacagttgttattacattggtaaggaaagaagaacttgggaagagagtttgctggcctgtacttcgaagaactccagtctgctttctatagataatgaagaagaaatgaaatttctggccagcattttaccttcctcatggattggtgtgtttcgtaacagcagtcatcatccatgggtgacaataaatggtttggctttcaaacataatacatggaaaatgctttcgtctcatgaatcatttgcttaaaatgtaacagaaaatggatttttctccattacaggataaaagactcagataatgctgaacttaactgtgcagtgctacaagtaaatcgacttaaatcagcccagtgtggatcttcaatgatatatcattgtaagcataagctttagaagtaaagcatttgcgtttgcagtgcatcagatacattttatatttcttaaaatagaaatattatgattgcataaatctgaaaatgaattatgttat

SEQ ID NO: 146562 - DNA, 883 bp, Homo sapiens
  Payload ID: 8990
  Gene Symbol: KLRC2
  Gene Name: killer cell lectin-like receptor subfamily C, member 2
  ENST ID: ENST00000619500
  CDS Start-End: 1-375
atgataccaacacgtcattgtggccattgtcctgaggagtggattacatattccaacagttgttattacattggtaaggaaagaagaacttgggaagagagtttgctggcctgtacttcgaagaactccagtctgctttctatagataatgaagaagaaatgaaatttctggccagcattttaccttcctcatggattggtgtgtttcgtaacagcagtcatcatccatgggtgacaataaatggtttggctttcaaacataagataaaagactcagataatgctgaacttaactgtgcagtgctacaagtaaatcgacttaaatcagcccagtgtggatcttcaatgatatatcattgtaagcataagctttagaagtaaagcatttgcgtttgcagtgcatcagatacattttatatttcttaaaatagaaatattatgattgcataaatctgaaaatgaattatgttatttgctctgatacaaaaattctaaatcaattattgaaataggatgcacacaattactaaagtacagacatcctagcatttgtgtcgggctcattttgctcaacatggtatttgtggttttcagcctttctaaaagttgcatgttatgtgagtcagcttataggaagtaccaagaacagtcaaacccatggagacagaaagtagaatagtggttgccaatgtctcagggaggttgaaataggagatgaccactaattgatagaacgtttctttgtgtcgtgatgaaaactttctaaatttcagtagtggtgatggttgtaactctgcgaatatactaaacatcattgatttttaatcattttaagtgcatgaaatgtatgctttgtacatgacacttcaataaagctatccag

SEQ ID NO: 146563 - DNA, 798 bp, Homo sapiens
  Payload ID: 8991
  Gene Symbol: KLRC3
  Gene Name: killer cell lectin-like receptor subfamily C, member 3
  Uniprot ID: Q07444
  ENST ID: ENST00000381903
  CDS Start-End: 1-774
atgagtaaacaaagaggaaccttctcagaagtgagtctggcccaggacccaaagtggcagcaaaggaaacctaaaggcaataaaagctccatttcaggaaccgaacaggaaatattccaagtagaattaaaccttcaaaatgcttctctgaatcatcaagggattgataaaatatatgactgccaaggtttactgccacctccagaaaagctcactgccgaggtcctaggaatcatttgcattgtcctgatggccactgtgttaaaaacaatagttcttattcctttcctggagcagaacaattcttccccgaatgcaagaacccagaaagcacgtcattgtggccattgtcctgaggagtggattacatattccaacagttgttattacattggtaaggaaagaagaacttgggaagagagtttgcaggcctgtgcttcaaagaactcttctagtctgctttgtatagataatgaagaagaaatgaaatttctggccagcattttaccttcctcatggattggtgtgtttcgtaacagcagtcatcatccatgggtgacaataaatggtttggctttcaaacatgagataaaagactcagatcatgctgaacgtaactgtgcaatgctacatgtacgtggacttatatcagaccagtgtggatcttcaagaatcattgtgagcataagctttagaattaaagcgcttgagcttgcagtgcatcagataaaattttatatttgttcaaacagaaatgatattatgattgcataagccttaaaatgaattgtgttattt

SEQ ID NO: 146564 - DNA, 1028 bp, Homo sapiens
  Payload ID: 8991
  Gene Symbol: KLRC3
  Gene Name: killer cell lectin-like receptor subfamily C, member 3
  Uniprot ID: Q07444
  ENST ID: ENST00000396439
  CDS Start-End: 46-768
gcagttatcatagagcacagtccctcacatcacacagctgcagagatgagtaaacaaagaggaaccttctcagaagtgagtctggcccaggacccaaagtggcagcaaaggaaacctaaaggcaataaaagctccatttcaggaaccgaacaggaaatattccaagtagaattaaaccttcaaaatgcttctctgaatcatcaagggattgataaaatatatgactgccaaggtttactgccacctccagaaaagctcactgccgaggtcctaggaatcatttgcattgtcctgatggccactgtgttaaaaacaatagttcttattcctttcctggagcagaacaattcttccccgaatgcaagaacccagaaagcacgtcattgtggccattgtcctgaggagtggattacatattccaacagttgttattacattggtaaggaaagaagaacttgggaagagagtttgcaggcctgtgcttcaaagaactcttctagtctgctttgtatagataatgaagaagaaatgaaatttctggccagcattttaccttcctcatggattggtgtgtttcgtaacagcagtcatcatccatgggtgacaataaatggtttggctttcaaacatgagataaaagactcagatcatgctgaacgtaactgtgcaatgctacatgtacgtggacttatatcagaccagtgtggatcttcaagaatcattagacggggtttcatcatgttgaccaggctggtcttgaactcctgagctcaagaaatcaacacatcttggcctcccaagttgctgggattactgacacaagccaccgcccctgagtgctcatgtaccatttagcttgtgttttaaaaatctactttttctgccctccctatttttaactagatgatgttttaaaaattacttttccctctctatatagtttgatttaagcattagtcatttacaacaaatattaatattaaaatgcagaccgttatgattggaaaataaatcaatgaacaatataa

SEQ ID NO: 146565 - DNA, 930 bp, Homo sapiens
  Payload ID: 8992
  Gene Symbol: KLRC4
  Gene Name: killer cell lectin-like receptor subfamily C, member 4
  Uniprot ID: O43908
  ENST ID: ENST00000309384
  CDS Start-End: 183-659
taaaactttaggaaattagtaccagacttttatattggtcaacagcaaaatgaacattactactcagcctccaacacatgcagtttgcctataccagggatcctgtcaaaatatacaccacttatagcttcttaagtgcagttatcatagagcacagtccctgacatcacacagctgcagagatgaataaacaaagaggaacctactcagaagtgagtctggcccaggacccaaagaggcagcaaaggaaacttaagggcaataaaatctccatttcaggaaccaaacaggaaatattccaagtagaattaaaccttcaaaatgcttcttcggatcatcaagggaatgacaagacatatcactgcaaaggtttactgccacctccagagaagctcactgctgaggtcctaggaatcatttgcattgtcctgatggccactgtgttaaaaacaatagttcttattccttgtattggagtactggagcagaacaatttttccctgaatagaagaatgcagaaagcacgtcattgtggccattgtcctgaggagtggattacatattccaacagttgttattacattggtaaggaaagaagaacttgggaagaaagagtttgctggcctgtgcttcgaagaactctgatctgctttctatagataatgaggaagaaatggtaagacgtaaatgtttcaacactttactaaaagcttatttctgtcaatatcatatttgtagaaatcatccatatgtttatacatatatttacttcatatatttttaagtctgtgtagtattcaactgacttcataatatttttatattcatatactgttaatgcacatttggttatttccagttttgcttttcatggaaacccatgcttctataaatgtttttatcacaaaataaatataaagaaaactaagc

SEQ ID NO: 146566 - DNA, 3165 bp, Homo sapiens
  Payload ID: 8993
  Gene Symbol: KLRD1
  Gene Name: killer cell lectin-like receptor subfamily D, member 1
  Uniprot ID: Q13241
  ENST ID: ENST00000350274
  CDS Start-End: 261-707
ctgtattgtggttcctggaacacttcagaggcttgtgattctactgcttcttattcacactataatacatgtctcaccaatagatgattcaagaacatcatttaaatacacaatttttcattctctatttttgctaaatttcttcatactcaactttcagattctttaatctccagctcagcttcaacaattcaacgctgttctttctgaaaaagtacacatcgtgccttctctacttcgctcttggaacataatttctcatggcagcttttactaaactgagtattgagccagcatttactccaggacccaacatagaactccagaaagactctgactgctgttcttgccaagaaaaatgggttgggtaccggtgcaactgttacttcatttccagtgaacagaaaacttggaacgaaagtcggcatctctgtgcttctcagaaatccagcctgcttcagcttcaaaacacagatgaactggattttatgagctccagtcaacaattttactggattggactctcttacagtgaggagcacaccgcctggttgtgggagaatggctctgcactctcccagtatctatttccatcatttgaaacttttaatacaaagaactgcatagcgtataatccaaatggaaatgctttagatgaatcctgtgaagataaaaatcgttatatctgtaagcaacagctcatttaaatgtttcttggggcagagaaggtggagagtaaagacccaacattactaacaatgatacagttgcatgttatattattactaattgtctacttctggagtctataaaatgtttttaaacagtgtcatatacaattgtcatgtatgtgaaacaatgtgttttaaaattgatgaaattcgttcacctacatttgagaattataaaattaacataaagaattttgtattttcatttaatgtatatatttaatgttaaattcaatgtagttttattacacatttatgtaattttatttacattcttgctaattctcagcagaaatttaaataagatttaattcacatcaaataaaatttagaaaataaaatttaactcacactgcccaggctggagcatagtggcaagatcatagctcattgcaagctcaagtgatcctcctgactcagcctcccaagtagctaggactgcaggcaccatgtcactatgcccgactaatttttaatttttaattttttgtcaagacaaggtcttgctatgttgcccaggctggtcttgaactcctggcctcaagggattctcccaccttggattcccaaagtgctgggattataggtgtgaaccaccatccctggccctcttcacattcttgtatgaagattgatttgggaaaaatgcatttcaggtaactgacaaaagatataggatgaaaaataatatctttcaaatgtttaatttgaactaagagagcttatgcattgcactttctggagatttgtaatgttttggttttgttgtccatgtgactacaaaataatatattttttaattaaaaaatttaaaataatacaggcaagcatgtaatgattatcaatatttttttccaccaactatcctatacccctgacctcctttcattaggcattatcttctgttttgattttaacacttagagtggttttctctgttatgaatcaaagctgatctattttcatcatttttgtgatgaaaaaattaattttgattgacttaggatggaaggatttggactgggtgtggtggtttatgcctgtaatcgcagcactttgggaggccaaggcgggtggatcacttgaggtcaggagtttgagaccagcctggccaacatggtgaaaccctgtctctactaaaaatacaaaaattggctgggtgtggtagtgcacacctgtaatcccagctatttgggaggctgagtcgagaggatcgcttgaacctaggaggtggaggttgcagtgagtcgagattgcaccactgcactccagcctgggtgacagagccagactcctctccaaaaaaaaaaaaaaaaaaaaaagatgaaaggatttggaaccttaattgcatctgaaaaactgcctcacctttgttatttagtgtactccaaccacggagtaacatcccatcataatcccaaatcctactcaaacaaaaggggaagggattatgcaggtgtacactaggccactggtgtaccaattagaaaccactttagagttatgcctactgtacccacataatcctaaaaatatgttacaactgctacttcatagtttatgccacttattttattttttacttttattatttttttttctgagacacggtttcattcccattgcccaggctgtagtgcaatgatgcaatcatggttcactgcagcttcaacttcccaggctcaagggatcctcccacctcagccttctgagtacttgggactcaggtgcgagccatcatgctcagctaattttttgtatcatttgtagaaatggggttttgtattgttgcccaggctgatcttgaactcctggggtcaaggattctgcccgccttggcctcctaaagggctggaattacaggcataagccactgtgcccggccagtttatataatttaaacactgccttttggttccttgattcccatatgctaggacaagtaattattattttattttattttactttaagttctgggttacatgtgcagaacctgcaggtttgttacataggtatacatgttccaaggtggtttgctgcacctattgacccatcatctaggttttaagtcccacatgcattaggtatttgtcctaatgctcttcctccccttgccccccaccccccgacaggccttggtctgtgatgttcacctccctgtgtccatgtgttctcattgttcaactcccacttattagtaagaacatgtggtgtttggttttctgttcctgtgttagtttgctgagaatgatggtttccagcttcatccatgtcgctgcaaaggacatgaactcattctttttatggctgcatagtattccatggtgtatatgtgccatattttctttatccagtctatcactgatgggcatttgggttggttccaagtctttgctatggtaaatagtgctgcaataaacatacgtgtgca

SEQ ID NO: 146567 - DNA, 3258 bp, Homo sapiens
  Payload ID: 8993
  Gene Symbol: KLRD1
  Gene Name: killer cell lectin-like receptor subfamily D, member 1
  Uniprot ID: Q13241
  ENST ID: ENST00000336164
  CDS Start-End: 261-800
ctgtattgtggttcctggaacacttcagaggcttgtgattctactgcttcttattcacactataatacatgtctcaccaatagatgattcaagaacatcatttaaatacacaatttttcattctctatttttgctaaatttcttcatactcaactttcagattctttaatctccagctcagcttcaacaattcaacgctgttctttctgaaaaagtacacatcgtgccttctctacttcgctcttggaacataatttctcatggcagtgtttaagaccactctgtggaggttaatttctgggaccttagggataatatgcctttcgttgatgtctacgttgggaattttgttgaaaaattcttttactaaactgagtattgagccagcatttactccaggacccaacatagaactccagaaagactctgactgctgttcttgccaagaaaaatgggttgggtaccggtgcaactgttacttcatttccagtgaacagaaaacttggaacgaaagtcggcatctctgtgcttctcagaaatccagcctgcttcagcttcaaaacacagatgaactggattttatgagctccagtcaacaattttactggattggactctcttacagtgaggagcacaccgcctggttgtgggagaatggctctgcactctcccagtatctatttccatcatttgaaacttttaatacaaagaactgcatagcgtataatccaaatggaaatgctttagatgaatcctgtgaagataaaaatcgttatatctgtaagcaacagctcatttaaatgtttcttggggcagagaaggtggagagtaaagacccaacattactaacaatgatacagttgcatgttatattattactaattgtctacttctggagtctataaaatgtttttaaacagtgtcatatacaattgtcatgtatgtgaaacaatgtgttttaaaattgatgaaattcgttcacctacatttgagaattataaaattaacataaagaattttgtattttcatttaatgtatatatttaatgttaaattcaatgtagttttattacacatttatgtaattttatttacattcttgctaattctcagcagaaatttaaataagatttaattcacatcaaataaaatttagaaaataaaatttaactcacactgcccaggctggagcatagtggcaagatcatagctcattgcaagctcaagtgatcctcctgactcagcctcccaagtagctaggactgcaggcaccatgtcactatgcccgactaatttttaatttttaattttttgtcaagacaaggtcttgctatgttgcccaggctggtcttgaactcctggcctcaagggattctcccaccttggattcccaaagtgctgggattataggtgtgaaccaccatccctggccctcttcacattcttgtatgaagattgatttgggaaaaatgcatttcaggtaactgacaaaagatataggatgaaaaataatatctttcaaatgtttaatttgaactaagagagcttatgcattgcactttctggagatttgtaatgttttggttttgttgtccatgtgactacaaaataatatattttttaattaaaaaatttaaaataatacaggcaagcatgtaatgattatcaatatttttttccaccaactatcctatacccctgacctcctttcattaggcattatcttctgttttgattttaacacttagagtggttttctctgttatgaatcaaagctgatctattttcatcatttttgtgatgaaaaaattaattttgattgacttaggatggaaggatttggactgggtgtggtggtttatgcctgtaatcgcagcactttgggaggccaaggcgggtggatcacttgaggtcaggagtttgagaccagcctggccaacatggtgaaaccctgtctctactaaaaatacaaaaattggctgggtgtggtagtgcacacctgtaatcccagctatttgggaggctgagtcgagaggatcgcttgaacctaggaggtggaggttgcagtgagtcgagattgcaccactgcactccagcctgggtgacagagccagactcctctccaaaaaaaaaaaaaaaaaaaaaagatgaaaggatttggaaccttaattgcatctgaaaaactgcctcacctttgttatttagtgtactccaaccacggagtaacatcccatcataatcccaaatcctactcaaacaaaaggggaagggattatgcaggtgtacactaggccactggtgtaccaattagaaaccactttagagttatgcctactgtacccacataatcctaaaaatatgttacaactgctacttcatagtttatgccacttattttattttttacttttattatttttttttctgagacacggtttcattcccattgcccaggctgtagtgcaatgatgcaatcatggttcactgcagcttcaacttcccaggctcaagggatcctcccacctcagccttctgagtacttgggactcaggtgcgagccatcatgctcagctaattttttgtatcatttgtagaaatggggttttgtattgttgcccaggctgatcttgaactcctggggtcaaggattctgcccgccttggcctcctaaagggctggaattacaggcataagccactgtgcccggccagtttatataatttaaacactgccttttggttccttgattcccatatgctaggacaagtaattattattttattttattttactttaagttctgggttacatgtgcagaacctgcaggtttgttacataggtatacatgttccaaggtggtttgctgcacctattgacccatcatctaggttttaagtcccacatgcattaggtatttgtcctaatgctcttcctccccttgccccccaccccccgacaggccttggtctgtgatgttcacctccctgtgtccatgtgttctcattgttcaactcccacttattagtaagaacatgtggtgtttggttttctgttcctgtgttagtttgctgagaatgatggtttccagcttcatccatgtcgctgcaaaggacatgaactcattctttttatggctgcatagtattccatggtgtatatgtgccatattttctttatccagtctatcactgatgggcatttgggttggttccaagtctttgctatggtaaatagtgctgcaataaacatacgtgtgca

SEQ ID NO: 146568 - DNA, 703 bp, Homo sapiens
  Payload ID: 8993
  Gene Symbol: KLRD1
  Gene Name: killer cell lectin-like receptor subfamily D, member 1
  ENST ID: ENST00000344825
  CDS Start-End: 129-347
gctaaatttcttcatactcaactttcagattctttaatctccagctcagcttcaacaattcaacgctgttctttctgaaaaagtacacatcgtgccttctctacttcgctcttggaacataatttctcatggcagtgtttaagaccactctgtggaggttaatttctgggaccttagggataatatgcctttcgttgatgtctacgttgggaattttgttgaaaaattcttttactaaactgagtattgagccagcatttactccaggacccaacatagaactccagaaagcaggattttatgagctccagtcaacaattttactggattggactctcttacagtgaggagcacaccgcctggttgtgggagaatggctctgcactctcccagtatctatttccatcatttgaaacttttaatacaaagaactgcatagcgtataatccaaatggaaatgctttagatgaatcctgtgaagataaaaatcgttatatctgtaagcaacagctcatttaaatgtttcttggggcagagaaggtggagagtaaagacccaacattactaacaatgatacagttgcatgttatattattactaattgtctacttctggagtctataaaatgtttttaaacagtgtcatatacaattgtcatgtatgtgaaacaatgtgttttaaaattgatgaaattcgttcacct

SEQ ID NO: 146569 - DNA, 15549 bp, Homo sapiens
  Payload ID: 8993
  Gene Symbol: KLRD1
  Gene Name: killer cell lectin-like receptor subfamily D, member 1
  Uniprot ID: Q13241
  ENST ID: ENST00000381908
  CDS Start-End: 203-742
gttttgctcttgtcacccaggctggagtgcaatggtgcgatctcagctcatcaagttcaagagactctaatgcctcagcctcccaagtagcaggggttacagattctttaatctccagctcagcttcaacaattcaacgctgttctttctgaaaaagtacacatcgtgccttctctacttcgctcttggaacataatttctcatggcagtgtttaagaccactctgtggaggttaatttctgggaccttagggataatatgcctttcgttgatgtctacgttgggaattttgttgaaaaattcttttactaaactgagtattgagccagcatttactccaggacccaacatagaactccagaaagactctgactgctgttcttgccaagaaaaatgggttgggtaccggtgcaactgttacttcatttccagtgaacagaaaacttggaacgaaagtcggcatctctgtgcttctcagaaatccagcctgcttcagcttcaaaacacagatgaactggattttatgagctccagtcaacaattttactggattggactctcttacagtgaggagcacaccgcctggttgtgggagaatggctctgcactctcccagtatctatttccatcatttgaaacttttaatacaaagaactgcatagcgtataatccaaatggaaatgctttagatgaatcctgtgaagataaaaatcgttatatctgtaagcaacagctcatttaaatgtttcttggggcagagaaggtggagagtaaagacccaacattactaacaatgatacagttgcatgttatattattactaattgtctacttctggagtctataaaatgtttttaaacagtgtcatatacaattgtcatgtatgtgaaacaatgtgttttaaaattgatgaaattcgttcacctacatttgagaattataaaattaacataaagaattttgtattttcatttaatgtatatatttaatgttaaattcaatgtagttttattacacatttatgtaattttatttacattcttgctaattctcagcagaaatttaaataagatttaattcacatcaaataaaatttagaaaataaaatttaactcacactgcccaggctggagcatagtggcaagatcatagctcattgcaagctcaagtgatcctcctgactcagcctcccaagtagctaggactgcaggcaccatgtcactatgcccgactaatttttaatttttaattttttgtcaagacaaggtcttgctatgttgcccaggctggtcttgaactcctggcctcaagggattctcccaccttggattcccaaagtgctgggattataggtgtgaaccaccatccctggccctcttcacattcttgtatgaagattgatttgggaaaaatgcatttcaggtaactgacaaaagatataggatgaaaaataatatctttcaaatgtttaatttgaactaagagagcttatgcattgcactttctggagatttgtaatgttttggttttgttgtccatgtgactacaaaataatatattttttaattaaaaaatttaaaataatacaggcaagcatgtaatgattatcaatatttttttccaccaactatcctatacccctgacctcctttcattaggcattatcttctgttttgattttaacacttagagtggttttctctgttatgaatcaaagctgatctattttcatcatttttgtgatgaaaaaattaattttgattgacttaggatggaaggatttggactgggtgtggtggtttatgcctgtaatcgcagcactttgggaggccaaggcgggtggatcacttgaggtcaggagtttgagaccagcctggccaacatggtgaaaccctgtctctactaaaaatacaaaaattggctgggtgtggtagtgcacacctgtaatcccagctatttgggaggctgagtcgagaggatcgcttgaacctaggaggtggaggttgcagtgagtcgagattgcaccactgcactccagcctgggtgacagagccagactcctctccaaaaaaaaaaaaaaaaaaaaaagatgaaaggatttggaaccttaattgcatctgaaaaactgcctcacctttgttatttagtgtactccaaccacggagtaacatcccatcataatcccaaatcctactcaaacaaaaggggaagggattatgcaggtgtacactaggccactggtgtaccaattagaaaccactttagagttatgcctactgtacccacataatcctaaaaatatgttacaactgctacttcatagtttatgccacttattttattttttacttttattatttttttttctgagacacggtttcattcccattgcccaggctgtagtgcaatgatgcaatcatggttcactgcagcttcaacttcccaggctcaagggatcctcccacctcagccttctgagtacttgggactcaggtgcgagccatcatgctcagctaattttttgtatcatttgtagaaatggggttttgtattgttgcccaggctgatcttgaactcctggggtcaaggattctgcccgccttggcctcctaaagggctggaattacaggcataagccactgtgcccggccagtttatataatttaaacactgccttttggttccttgattcccatatgctaggacaagtaattattattttattttattttactttaagttctgggttacatgtgcagaacctgcaggtttgttacataggtatacatgttccaaggtggtttgctgcacctattgacccatcatctaggttttaagtcccacatgcattaggtatttgtcctaatgctcttcctccccttgccccccaccccccgacaggccttggtctgtgatgttcacctccctgtgtccatgtgttctcattgttcaactcccacttattagtaagaacatgtggtgtttggttttctgttcctgtgttagtttgctgagaatgatggtttccagcttcatccatgtcgctgcaaaggacatgaactcattctttttatggctgcatagtattccatggtgtatatgtgccatattttctttatccagtctatcactgatgggcatttgggttggttccaagtctttgctatggtaaatagtgctgcaataaacatacgtgtgcatgtgaggacaagtaattattttctgtttttctcaatacattaattattagttcctccgttagttgtgaagtcctaattagggaaaaggagttaggctggcgggagcagggaaaagcagaaagagaaagcagataagctatgagtctgcctttcttcatggtccaggatatgggccatgtgctaaactattaccagacacctgcaagttacctcaccgcaaccttggcattatcagtactggacaaagccctctgcagcatacagcataaacactattccataaaatcctaagcaagcctttgtttctttgcagtcagcttttcttctgctgatgctgcctgttgcctccctggaaacatattttcctacttttctttaataaatctgccttcctttacctacagctgtcttggtaaattcttttacctcaatgccaccggcccaggtagccgttgctcacccacaacattagtgtattagtccgttcttatgctgctactaaagatatacccaagactgggaaatttataaaataaagacatttaattgactcacagttctgcagggttggagaagcctcaggaaacttacagtaatgacagaagggaaagcaaacacatccctctacgcatggcagcagaaaggagacgtgctgagcaaaaggaaaaataccctcttattaaatcatcagatctagtgagaactcactcactatcatgagaacagcaaagaggtaactacccccatgattaaattacctcctaccagttccctcacatgatacgtgaggattaggggcactacaattcaagatgagatttgggtggggacacagccaagccatatcagttagtgacatctgtattctcatattgcatgcataagaaagtgagttattttacagctgaactgggacagctctttgcttatttccagagatgcctaggtgtctgtttttgactcttggccatgatatgggtagtaggctaactaactagctaacaaatggtttatggtgagttctttaaagttcaaaatccctcagtggaatccagggtcaatttgtttattgatagcttccatatgagataattacagatcttgtctctgctgtgtgaccagacacagataaaagactgcaagaaatttcagtttcagctctcatgaaaccaagtttcatctcacaaatatcaggtttcatccagagatgaatggtgtctttgcgcaaatatctcttggtcccacactgcttgtttgaattctctttctcatacggtatcatattcctttcacttattaaaaagtttttcatggctgggcgcggtggctcaagcctgtaatcccagcactttgggaggctgaggcgggtggatcacgaggtcaggagattgagaccatcctggctaacacggtgaaaccccgtgtgtactacaagtacaaaaaaattagccaggcgtggtgacaggcacctgtagtcccagctactcgggaggctgaggcaggagaatggcgagaacccgggagacggagtttacagtgagctgagatcgcgccactgcactccagcctgggtgacagaggagactccgtctccaaaaaaaaaaaaaaaaaaaaagcttttcataagtatgctcattagaaccttataattcatttcagttatctacacctggaaatgttagttctataattttggactttctgaaacttttctctttatatcctaacgcaggggttgaaaaacttttctcaaaaagctctatagcatatattttcaactttgtggaccagtctctgttgaaacttctcaaccttgccatggtggtgctaaagaagacataaataatacaaaaatgaatggtttgactgtgttacaaaagaattttattgacaaaacatatggtgagacagatttggtccacaggccatagtttgccaacatgtgcccaagtatgtaagatgagaatataaggccataaattctactctctgctttattcttttccaggtcacttcttaccagttgtaaatgtacttacaaattttgctatatgaaaacagttatgtctgttactatcaatctgtgttcattttaaagggtgacaatctacaaattatgtgttatagacaagttgcaagatgttcaccaatgattcccaccttgtgctatacatgccttggtggaatttctttccacattgtatcaaggttgctctgtgtgaccaatgaaataaagtggaaatgatgatatttcatttctgagaataggtcatcaaagatagtatgacttcctttttcctctctcccagattacttgatctggggaaaaccagttataatgtcatgagcagccctgttgaaaggaccatgcggcaaggaactgaagactcttacacacagccagcaaggaactgaagtctatttccaatagccatgctatgagccttctttgcttgtataggctccagtcttagtcaagccttcagatgattacagcccccagccaacaccttgacggcaacctcatgagagaccctgagctaggtccatcgtgctatgctgttcgaggattcctcactctcagaagctgtgtgaaatagtaaagtgtttattcttttttttttttttttttttgacagagtctcactctgtcacctgggctggagtgcagtggggccatgtcggctcactgcaacttctgcctcctggattcaagcaattctcctgcctcagcctcctgagcagctgggattacaggtgtgcaccaccactcctggctaatttttttgtatttttagtacagacggggtttcaccatgttggtcaggctggtcttgaactcctgacctcaggtgatctgcctacctcaccctcccaaagtgctgggattacaggcgtgagccactgcgcccagacataacttttattcttttaagtcactaaatattaacgtgtcacatagcaataatcaatacatattttggtaccaagaatgaagttactattataaagaaaaaaaaaaaccactaaaattttggagtgcttgaaaacaggcagtggatggaggccaaaaggacaggaaagactgaaaccttctagtatgggcttatagtagggaagtgaaaacatattagaaactggagaaagtaaaaatctttctatttagtaccagaaagtttagcaacacttttgtctgtagcattgtggaaagtagaaaatgtacttaatgatttaagagaatgctctaaacttatttccaactagagtgttgaatatcttgtctgatttcttcctactacttatattacaatgctatagaacacacataagctaatggaagggctgttgagcaaaagaagacagaacttgatagttttgagattcctggactctcaaatgttagcatgtcaaaaatgctaaaattgagaaatagattctgagcaaagatccaatctagagtgctctcaggaaagcatgattctaaacaagaaggtgtgggtgtgactgaaatttcctgtaaatatcatagaaagaacacaagtagtgcctcaattcagtcagatgaagatctataaaggtcaaataatagggcttctaggaagccccagggtattgtccctcaggtatctcagcagaagctccaggtagagagaagattgaagagatttatgtgtgcggtttttacaaatagagttcatagaaaacctcaaaacacttttgagatgactatgtcagtagaaaattgacaatgaattgctaccttttattcaaaagtaagaataattcaaaggacagaactaagagcctgtaaggtggatccaagagttatgaagagtgattttataagcagaaataggactgagtcctaatcaaatgagtcccgacatttgctatgctagattttaaattattatgcatcagtgactcctttgtaattctcatgcccctccctcttttgaacaaggatgtctatagtttgttctttcgaatgttgagtgtataagggaaggaaatctctagtattgttaatttcacaagccttcacatggagaaaaatgatactcaagaagctaaacttaaggaacttcacctgatgagtctcactcatacctggatgtgacaaatttcggactttgaactgacattgtaacggaatgagatttggcagttggtgtggattttgtatgtgggagggacataaatcatttggggccaaagattagactcttgtaaacagcttcctatatgctcccaatgatccctgtttcttggaatttaacccttttgatataatcaattacattgtataagggttgatcactgtgaccaagagaataaggcagaagttatcgcatatcacttttgaggctagattataaaagacagtatgtctttggcgttgccctttctcatatcatctgatttggtggaagccagctaccttgtcgtgagcaactcttttaagcgttccatgtggcaaagaactgaggcctcctataaacagctagcaaggaactgcagccatcttgtagacagccttgtgcacgagcctccttggttcaactcttcagccagtgtcaagccttagaaaatacaacccaacctacatttttactgcaacctcatgagggatcctgagctagaaccacctagcacagttgctcttgatttctgacctcagaaactgtgaagtgaaatattttgttgttttaagcttacgagtttgaggataatttgttctttatagtagttagctgatacaatatgcttcatcatcatgacctcatgaatagagaacatttatttatttattgagatggagtctcactctgtcacccaggctggagtgcagtggcacagtcttggctcactgcaacctctgcctcgctggttcaagcgattctcatgcctcagcctccccagtagctgggattacaggcacccaccaccatgcctggctaatttttgtattttcagtagacatgaggttttgccatgttggccaggctggtctccaactcctggcctcaagtgatccacctgcctcggcctcctgaagtgctgggattacaggcatgagccattgtgtctggccaaatagaggacattttagagcccaatagtaagctaggattatatttccttctttgaggttctattgttataacccttatacaataaaaaacaactcttctgccagattaaaattttttgttttttggtttttttagttctcaattatgttgtataacccatgagtgtcactttattctcattggaaatatcctcccaagagctcttacccacctgctgttgtttggactggcaccttactagacctgctccacaaactgccgtcatgaaatttttcttcactaattttctcatttacactaaatacttcattgattacagtttacctcttcatatattttaattgagcaaaaacacaataaagaatacctatcttaaatttactcgtaaacatttaagctatgtctacacttacacgattactaccagattgcaatagagactacctaccaccaccaagactctcttgctgtttgctaattgatactgtctcccctgttccaagaaaactgctactctgatttctgaaaatataggtttatttagcctgttctttaatttcatataaatggaagcttagcatgtatgatctttgtggcttctgttgctaagcattacgtctgtgagatacatccatatattcgtgcagcagtagctcctcacttttattgtcatgtagaattcataagaatgtatcacaatttgcttatttattctaatattgttcaacatttgagtcatttccacttttcactattatgagtaaaattgctataaacattttaatatagctcttgtgggacatgtggcttcatatcttttgagtgtacgcctaggagttgaatttctaagtcataagctgtcatatatttaggccctttagttcacgctttaaaaactagtgataatttattcataaagcttatttataatttcactggcagtttatgtgagtgttactctgtattcttgacaatacatagtattatgaattattttagtctaaggaccttctggatactatgcatttgcatacaattgtacatttaatttccatcttccaaatgaataatgatgcttatccctcatctttttttttcatttttatatccccttctatgtagtgcttgtttaagcttttagccattatttatttttaacagcgctgttgcagtataattgagatactttaagcatactttatatgcttaaagtatgacatttgatgtatttccatatctatgcatctgtgaaaccatcacctcagcaatatataaaacacctactaacctcaaaagtatcctttcccctatgtataaaatacttcctcttgctcctcccctcacagatgaatattctgttactatagatttgcctttctatgttttatatagatagaatcatataatatgtacatctgtgttctagatttttcattcagcatcataatagtttttatactcatctatgttgatacatgtatcaatagttaattcccttttatttcttatttctttcctttttttttttttttgagactgagtattgctctgtcacccagattagagtgcagtggtgtgatctcagctcactgcaaccttcaccacctgggttcaagttattctcatgcctcagcctccccagtagccgagattacagatgcccaccaccacgcccagctaatttttgtatttttagtagagacggggtttcaccatgttgaccagtcttgtcttgaactcctgacctcaactgctccacctgccttgacctcccaaagtgctggaattacaggcgtgagccaccacatccagccgattcctttttacttctgagagtcttctgatccttgagtaaagtatgtttcttgtacctcaatatgcttaattttttccttctggctttcgttttaggttcagggtatatatgtaggcttcttatatgagtacattgcatgttgcagtggtttggtgtacagataattttgtcatcctggtaatcagcatagtacctgacaggcagtttttctatcctcatccttctccctctcccccccaagtaggccccagtgtctattgtttcctttttttgtgtgcctgtgtactccatggttagctcccacttataagggagaatatgtggtttttggttttctgttcttccattgatttgcttaggataatggcctctagttctatccatgttcctgcaaaggacatgatttttttcttttttatgtctgcatagtattccatggtgtatatgtaccacattttctttacctagtccattgtctcaatatacttaagttatactcagtaatgttttgtagtttttaatattcaggccttttatgtttttatgagatttccccaaagtagtctattgtttttaaagctattatacattttattttctaatttcaaatgttttattttaaaattgtaagtatatatgtatatgtgtgtgtgtgtatatatatatatatatatatatattcatttacacagttgattctaagtgtatcttttattgtttaacctgcctaaattcacttatcctagcagcatttctgtagatttcattgggttatctgcatagatgaataaagacagtttttacctctttcttttgaaaactgtgtgcctttaattctttttatcaccttgtcacagtggccagaatattcaacacaaagttgaatacaagtggtgagtaaacacccttgttttgctattgatcttagagcatgaatattcactttttttacctttatacttaattttagctgtaggattttcataaatgacctttactaggttgagaaagttccctcctattcctagtctgatgagaatttttataaggagtacatatgacatatgcttttattaaatgttttattctgcctcgattgaaatcagatagtttttatttcccagttataaacctcagttgttcatgttatcttttttacgtatctttgcagatgctttgctaattttttaaaattttattttattgaggtaaatacaacataagatctatcctcttaacaaattttcaagtctacagtacagtattattaacaataggtacaatgttgtatagtagatctctataatttattcatcttgcataattgaggctttatgccctttgattaacgacgtcccattttttcctctctccattcctggcaaccaccattctattctctgattttataagcttgaccactttagatatttcacgtaagtggaatcatatagtatttatcctgtgacttgtttatttcatttagcataatgtcctcaagtttcatccacattgttacatattgcaggatttcatttttaaggctggataatattctattgtatgtgtatgtacacattggctactgtgactagtatagcaatggacagtagtatactaatatttctttgagattcttatttcaattcttttgcataattacccagaaaggggattggtggatcatatggtagttctatttttaattttttgagaaatcaccatcctgttttccacagaagcagcacaatttttcattcccaccaaagtgttcaaggggtctaattaccccacgtacttctcaacacttgtctttcatttgtttgataatagccatccttataagtgagagatgatatttggtggttataatttgcatttccctgatgattagtgatattgagcatcatttcatatgcccattgaccctttgtatgttttttatgaagaaatgaccattcaagtctttgatacattttttaattgggttacttgtgttttttttaatattgagttgtaggagttctttatatgttttggatattgactccttttctgatatatgatttgcaattattttctcccattctgtagatcatcctttcattccattggttatttcctttgtgaaccctgaaaatttgagacaggtctcagttaatttagaaagtttattttgcaaaggttgagaacatatgcccataacacagcctcacctcaggaggtcctgctgacatgtgcccaaggtggtcagggcacagtttggttttatacattttagggagacatgagacatcaatcaacatatgtaaaatgaacagtggtttggtctagaaaggtgggacaattcaaagcagaagtgaaacaactggaagcaaggagggggcttccaggtcacaggtaagagacaaatggttgcacctttttgtttctgattagcctttccaaaggaggcaatcagatatgcatttatctcagtgagcaaagagatgactttgaatagaatggggggctcccaggtcacaggtaagggacaaatggttgcatctttttgtttctgattagcctttccaaaggaggcaatcagatacgtatttatctcagtgagcaaagagatgactttgaatagaatgggaggcagttttgccctaagcagttcccagcttgaattttcccttttgttgagtgattttgggggcccaagatattttcctttcacacctttgatgcgaacaagctgtttgtttgctatagtcctacttgtctattcttgcttttgttgcctgtgcttttggtgtcagattgatgatatcattgccaaaaccaatgtcaaaaggttttcctctatgttttctttgaagggctttacattttcagtacttacatttaggcttttaatccatttgaaatttatttttgcatatggtgtaagataagcaatttctttgcaatatggatgttcatttttcccgtcactgtttgttgaagaaactgtcatttccccttaaatagtcctgccacccaaagaccgtttaaccatatttgcaaagtttattcccaagttctccaatctgtttaattggtctatatgttcatctttatgccagtgccatattgtttcaattattgtagctttgtaatatattttgatatcaggaagtttgaggcctctggccttctgtttcttgctcaagatttgtttggctattcagggctttttgtggttccatgtatattttagtatcattgttttcctaattctaaaatgccattgaggtcttgataggtattgcactaaatctgcagatcacattgtgaaatacaaatattttaactatatgaagtcttttaataaatgaatataggaggatttttgcatgttgattttgtaccctgcaactttacttggttttaggaggcttttttgtggattctttagagcatgccataggcaaacagggaccattgtacttcttcttttacaatctgtatgttgttaatttcttttccttgcctaagagctttaagtaggacaagggttaaatagaaatggcaagtgcaaacatccttgccatgtttctgatgtcagaggaaaagttcagctttttccatagcatgatattagctatgcactttacatatagggccttcaaaatgttgaaatatttttctcaaattctaggttggcaggagttatcatcataaaatgggtattaaattttgtgaaaactttttttctgaatctattgagatgcacaggtgacatttatccttcattctattaatgtggtatattacattaattgattttgtatgttaggctatccttgcaccccagggataaatgccacttgcttatggcatatactccttttagtgtactgttgaattaattttgctactactttgttgaggatttttgcatctacgtttactagacatattggcttatagttttcttgtggtatctttgacaagctttggtgtaatggtaatgctggccacataaaattagtttgaaagtatttattctttttaaatttttatataatagcttgggaaagatggccattaatttctccttaaatatttggtggcttcaccagaagagccatcttgtcctgggaatttttttgttgtaagtttcttgattactgattcaatcttcattctagttatagatacgctcatattttctatttcttcataattcagtcttggtaggtccttgtctttgtgaattttttcatttcttctaggttatccaatttgttggcctataattgttcttagttgtctcttaccatcttttatatttctgtggcatcagttgcaatgtcttatttctgatttcatttatttaaggcctctcttctttttcttagtctagctaaaggtttgtcaagttatttatattttccaaaaactaactcttagttttgtttactttttatatatcctttccattcactattttatttctgaactaatctttattattttctttattcttctaaatttgaactttgtttgttcttttctacatttctagttgcttgggatatgtattagtccattttcacactgttgataaagacttaactgagagactgggtaatttgtaaagaaaaagaggtttaatggactcacagttccacgtggctggggaggcctcactatcatggcagaaggtaaaacacatgtctcacatggcggcagacaagagagaatgaaagccaagccaaagggggtttccccttataaaaccatctgatttcataagactgattcactaccatgagaacagtatgggggaaaccacccccatgattcaattatctcccactgggtccctccaccaacatgggggaattatgggagctacaattcaagatgagatttgggtggggacacagccaaaccatatcaaggtataaagtgcattgtttgagacctttcttttttcttaatgcagatattcatcactataaacttttcttttagccctacttttactacatcccataagttttgttagactttatttttgttttcatttattctaatgtgtttttaaatttcccttttgatttattctttgcagattggttgttcaaaaatgtattgttaaattatcacatatttattagttttccttttgcaactgatttctagtttcattcccttgatgctgtaaaagatacttgatatgacttcaattttcttaattttcttaagacttcttttatgacctaacatatgatctatcctgcagaatgatccatgtgcacttgagaagaatgtatactctgctgctgttggatggaatgttctgcacatgtctgtaggtgacttgacttgcagtgttgatcaggtcatctgggtctttgttgcctttatgtttggttgttctatccattattaaaagtgagcactg

SEQ ID NO: 146570 - DNA, 446 bp, Homo sapiens
  Payload ID: 8993
  Gene Symbol: KLRD1
  Gene Name: killer cell lectin-like receptor subfamily D, member 1
  ENST ID: ENST00000539792
  CDS Start-End: 1-156
tctgcactctcccagtatctatttccatcatttgaaacttttaatacaaagaactgcatagcgtataatccaaatggaaatgctttagatgaatcctgtgaagataaaaatcgttatatctacaaggtcttgctatgttgcccaggctggtcttgaactcctggcctcaagggattctcccaccttggattcccaaagtgctgggattataggtgtgaaccaccatccctggccctcttcacattcttgtatgaagattgatttgggaaaaatgcatttcaggtaactgacaaaagatataggatgaaaaataatatctttcaaatgtttaatttgaactaagagagcttatgcattgcactttctggagatttgtaatgttttggttttgttgtccatgtgactacaaaataatatattttttaattaaaaaatttaaaataata

SEQ ID NO: 146571 - DNA, 597 bp, Homo sapiens
  Payload ID: 8993
  Gene Symbol: KLRD1
  Gene Name: killer cell lectin-like receptor subfamily D, member 1
  ENST ID: ENST00000539374
  CDS Start-End: 29-349
ctacttcgctcttggaacataatttctcatggcagtgtttaagaccactctgtggaggttaatttctgggaccttagggataatatgcctttcgttgatgtctacgttgggaattttgttgaaaaattcttttactaaactgagtattgagccagcatttactccaggacccaacatagaactccagaaagactctgactgctgttcttgccaagaaaaatgggttgggtaccggtgcaactgttacttcatttccagtgaacagaaaacttggaacgaaagtcggcatctctgtgcttctcagaaatccagcctgcttcagcttcaaaacacagatgaactggcatgattttatgagctccagtcaacaattttactggattggactctcttacagtgaggagcacaccgcctggttgtgggagaatggctctgcactctcccagtatctatttccatcatttgaaacttttaatacaaagaactgcatagcgtataatccaaatggaaatgctttagatgaatcctgtgaagataaaaatcgttatatctgtaagcaacagctcatttaaatgtttcttggggcagagaaggtgg

SEQ ID NO: 146572 - DNA, 749 bp, Homo sapiens
  Payload ID: 8993
  Gene Symbol: KLRD1
  Gene Name: killer cell lectin-like receptor subfamily D, member 1
  ENST ID: ENST00000544747
  CDS Start-End: 277-694
gccagcccagaaaggggctcccacagtgcagtgggggggctgaagggctcctcaaatgccaccaaagtgggagcccaggcaggggaggtgccgagagcaagcgagggctctgaggactgccagcatgctgtcacttctcagcaggctggattggatttggcacttctttactgaagattctttaatctccagctcagcttcaacaattcaacgctgttctttctgaaaaagtacacatcgtgccttctctacttcgctcttggaacataatttctcatggcagcttttactaaactgagtattgagccagcatttactccaggacccaacatagaactccagaaagactctgactgctgttcttgccaagaaaaatgggttgggtaccggtgcaactgttacttcatttccagtgaacagaaaacttggaacgaaagtcggcatctctgtgcttctcagaaatccagcctgcttcagcttcaaaacacagatgaactggattttatgagctccagtcaacaattttactggattggactctcttacagtgaggagcacaccgcctggttgtgggagaatggctctgcactctcccagtatctatttccatcatttgaaacttttaatacaaagaactgcatagcgtataatccaaatggaaatgctttagatgaatcctgtgaagataaaaatcgttatatctgtaagcaacagctcatttaaatgtttcttggggcagagaaggtgga

SEQ ID NO: 146573 - DNA, 802 bp, Homo sapiens
  Payload ID: 8993
  Gene Symbol: KLRD1
  Gene Name: killer cell lectin-like receptor subfamily D, member 1
  ENST ID: ENST00000543420
  CDS Start-End: 129-449
gctaaatttcttcatactcaactttcagattctttaatctccagctcagcttcaacaattcaacgctgttctttctgaaaaagtacacatcgtgccttctctacttcgctcttggaacataatttctcatggcagtgtttaagaccactctgtggaggttaatttctgggaccttagggataatatgcctttcgttgatgtctacgttgggaattttgttgaaaaattcttttactaaactgagtattgagccagcatttactccaggacccaacatagaactccagaaagactctgactgctgttcttgccaagaaaaatgggttgggtaccggtgcaactgttacttcatttccagtgaacagaaaacttggaacgaaagtcggcatctctgtgcttctcagaaatccagcctgcttcagcttcaaaacacagatgaactggcatgagcacaccgcctggttgtgggagaatggctctgcactctcccagtatctatttccatcatttgaaacttttaatacaaagaactgcatagcgtataatccaaatggaaatgctttagatgaatcctgtgaagataaaaatcgttatatctgtaagcaacagctcatttaaatgtttcttggggcagagaaggtggagagtaaagacccaacattactaacaatgatacagttgcatgttatattattactaattgtctacttctggagtctataaaatgtttttaaacagtgtcatatacaattgtcatgtatgtgaaacaatgtgttttaaaattgatgaaattcgttcacct

SEQ ID NO: 146574 - DNA, 789 bp, Homo sapiens
  Payload ID: 8993
  Gene Symbol: KLRD1
  Gene Name: killer cell lectin-like receptor subfamily D, member 1
  ENST ID: ENST00000543777
  CDS Start-End: 129-605
gctaaatttcttcatactcaactttcagattctttaatctccagctcagcttcaacaattcaacgctgttctttctgaaaaagtacacatcgtgccttctctacttcgctcttggaacataatttctcatggcagtgtttaagaccactctgtggaggttaatttctgggaccttagggataatatgcctttcgttgatgtctacgttgggaattttgttgaaaaattactctgactgctgttcttgccaagaaaaatgggttgggtaccggtgcaactgttacttcatttccagtgaacagaaaacttggaacgaaagtcggcatctctgtgcttctcagaaatccagcctgcttcagcttcaaaacacagatgaactggattttatgagctccagtcaacaattttactggattggactctcttacagtgaggagcacaccgcctggttgtgggagaatggctctgcactctcccagtatctatttccatcatttgaaacttttaatacaaagaactgcatagcgtataatccaaatggaaatgctttagatgaatcctgtgaagataaaaatcgttatatctgtaagcaacagctcatttaaatgtttcttggggcagagaaggtggagagtaaagacccaacattactaacaatgatacagttgcatgttatattattactaattgtctacttctggagtctataaaatgtttttaaacagtgtcatatacaattgtcatgtatgtgaaacaatgtgttttaaaattgatgaaattcgttcacct

SEQ ID NO: 146575 - DNA, 1091 bp, Homo sapiens
  Payload ID: 8994
  Gene Symbol: KLRF1
  Gene Name: killer cell lectin-like receptor subfamily F, member 1
  ENST ID: ENST00000279545
  CDS Start-End: 65-610
atttcatgttatacttaataaaacaaaacatacctgtatacacacacattcactcacattgaagatgcaagatgaagaaagatacatgacattgaatgtacagtcaaagaaaaggagttctgcccaaacatctcaacttacatttaaagattattcagtgacgttgcactggtataaaatcttactgggaatatctggaaccgtgaatggtattctcactttgactttgatctccttgatcctgttggtactatgccaatcagaatggctcaaataccaagggaagtgttattggttctctaatgagatgaaaagctggagtgacagttatgtgtattgtttggaaagaaaatctcatctactaatcatacatgaccaacttgaaatggcttttatacagaaaaacctaagacaattaaactacgtatggattgggcttaactttacctccttgaaaatgacatggacttgggtggatggttctccaatagattcaaagatattcttcataaagggaccagctaaagaaaacagctgtgctgccattaaggaaagcaaaattttctctgaaacctgcagcagtgttttcaaatggatttgtcagtattagagtttgacaaaattcacagtgaaataatcaatgatcactatttttggcctattagtttctaatattaatctccaggtgtaagattttaaagtgcaattaaatgccaaaatctcttctcccttctccctccatcatcgacactggtctagcctcagagtaacccctgttaacaaactaaaatgtacacttcaaaatttttacgtgatagtataaaccaatgtgacttcatgtgatcatatccaggatttttattcgtcgcttattttatgccaaatgtgatcaaattatgcctgtttttctgtatcttgcgttttaaattcttaataaggtcctaaacaaaatttcttatatttctaatggttgaattataatgtgggtttatacattttttacccttttgtcaaagagaattaactttgtttccaggcttttgctactcttcactcagctacaataaacatcctgaatgttttcttaaata

SEQ ID NO: 146576 - DNA, 838 bp, Homo sapiens
  Payload ID: 8994
  Gene Symbol: KLRF1
  Gene Name: killer cell lectin-like receptor subfamily F, member 1
  Uniprot ID: Q9NZS2
  ENST ID: ENST00000354855
  CDS Start-End: 65-259
atttcatgttatacttaataaaacaaaacatacctgtatacacacacattcactcacattgaagatgcaagatgaagaaagatacatgacattgaatgtacagtcaaagaaaaggagttctgcccaaacatctcaacttacatttaaagattattcagtgacgttgcactggtataaaatcttactgggaatatctggaaccgtgaatggtattctcactttgactttgatctccttgatcctgttggattcttcataaagggaccagctaaagaaaacagctgtgctgccattaaggaaagcaaaattttctctgaaacctgcagcagtgttttcaaatggatttgtcagtattagagtttgacaaaattcacagtgaaataatcaatgatcactatttttggcctattagtttctaatattaatctccaggtgtaagattttaaagtgcaattaaatgccaaaatctcttctcccttctccctccatcatcgacactggtctagcctcagagtaacccctgttaacaaactaaaatgtacacttcaaaatttttacgtgatagtataaaccaatgtgacttcatgtgatcatatccaggatttttattcgtcgcttattttatgccaaatgtgatcaaattatgcctgtttttctgtatcttgcgttttaaattcttaataaggtcctaaacaaaatttcttatatttctaatggttgaattataatgtgggtttatacattttttacccttttgtcaaagagaattaactttgtttccaggcttttgctactcttcactcagctacaataaacatcctgaatgttttcttaaata

SEQ ID NO: 146577 - DNA, 598 bp, Homo sapiens
  Payload ID: 8994
  Gene Symbol: KLRF1
  Gene Name: killer cell lectin-like receptor subfamily F, member 1
  ENST ID: ENST00000537723
  CDS Start-End: 25-369
cacacacattcactcacattgaagatgcaagatgaagaaagatacatgacattgaatgtacagtcaaagaaaaggagttctgcccaaacatctcaacttacatttaaagattattcagtgacgttgcactggtataaaatcttactgggaatatctggaaccgtgaatggtattctcactttgactttgatctccttgatcctgttggtttctcagggagtattgctaaaatgccaaaaaggaagttgttcaaatgccactcagtatgaggacactggagatctaaaagtgaataatggcacaagaagaaatataagtaataaggacctttgtgcttcgagatctgcagaccagacagattcttcataaagggaccagctaaagaaaacagctgtgctgccattaaggaaagcaaaattttctctgaaacctgcagcagtgttttcaaatggatttgtcagtattagagtttgacaaaattcacagtgaaataatcaatgatcactatttttggcctattagtttctaatattaatctccaggtgtaagattttaaagtgcaattaaatgccaaaatctcttctcccttctccctcca

SEQ ID NO: 146578 - DNA, 730 bp, Homo sapiens
  Payload ID: 8994
  Gene Symbol: KLRF1
  Gene Name: killer cell lectin-like receptor subfamily F, member 1
  ENST ID: ENST00000545196
  CDS Start-End: 25-399
cacacacattcactcacattgaagatgcaagatgaagaaagatacatgacattgaatgtacagtcaaagaaaaggagttctgcccaaacatctcaacttacatttaaagattattcagtgacgttgcactggtataaaatcttactgggaatatctggaaccgtgaatggtattctcactttgactttgatctccttgatcctgttggtttctcagggagtattgctaaaatgccaaaaaggaagttgttcaaatgccactcagtatgaggacactggagatctaaaagtgaataatggcacaagaagaaatataagtaataaggacctttgtgcttcgagatctgcagaccagacagtccctcgtccacattttaggcttttatacagaaaaacctaagacaattaaactacgtatggattgggcttaactttacctccttgaaaatgacatggacttgggtggatggttctccaatagattcaaagatattcttcataaagggaccagctaaagaaaacagctgtgctgccattaaggaaagcaaaattttctctgaaacctgcagcagtgttttcaaatggatttgtcagtattagagtttgacaaaattcacagtgaaataatcaatgatcactatttttggcctattagtttctaatattaatctccaggtgtaagattttaaagtgcaattaaatgccaaaatctcttctcccttctccctcca

SEQ ID NO: 146579 - DNA, 1241 bp, Homo sapiens
  Payload ID: 8994
  Gene Symbol: KLRF1
  Gene Name: killer cell lectin-like receptor subfamily F, member 1
  ENST ID: ENST00000617889
  CDS Start-End: 65-760
atttcatgttatacttaataaaacaaaacatacctgtatacacacacattcactcacattgaagatgcaagatgaagaaagatacatgacattgaatgtacagtcaaagaaaaggagttctgcccaaacatctcaacttacatttaaagattattcagtgacgttgcactggtataaaatcttactgggaatatctggaaccgtgaatggtattctcactttgactttgatctccttgatcctgttggtttctcagggagtattgctaaaatgccaaaaaggaagttgttcaaatgccactcagtatgaggacactggagatctaaaagtgaataatggcacaagaagaaatataagtaataaggacctttgtgcttcgagatctgcagaccagacagtactatgccaatcagaatggctcaaataccaagggaagtgttattggttctctaatgagatgaaaagctggagtgacagttatgtgtattgtttggaaagaaaatctcatctactaatcatacatgaccaacttgaaatggcttttatacagaaaaacctaagacaattaaactacgtatggattgggcttaactttacctccttgaaaatgacatggacttgggtggatggttctccaatagattcaaagatattcttcataaagggaccagctaaagaaaacagctgtgctgccattaaggaaagcaaaattttctctgaaacctgcagcagtgttttcaaatggatttgtcagtattagagtttgacaaaattcacagtgaaataatcaatgatcactatttttggcctattagtttctaatattaatctccaggtgtaagattttaaagtgcaattaaatgccaaaatctcttctcccttctccctccatcatcgacactggtctagcctcagagtaacccctgttaacaaactaaaatgtacacttcaaaatttttacgtgatagtataaaccaatgtgacttcatgtgatcatatccaggatttttattcgtcgcttattttatgccaaatgtgatcaaattatgcctgtttttctgtatcttgcgttttaaattcttaataaggtcctaaacaaaatttcttatatttctaatggttgaattataatgtgggtttatacattttttacccttttgtcaaagagaattaactttgtttccaggcttttgctactcttcactcagctacaataaacatcctgaatgttttcttaaata

SEQ ID NO: 146580 - DNA, 951 bp, Homo sapiens
  Payload ID: 8994
  Gene Symbol: KLRF1
  Gene Name: killer cell lectin-like receptor subfamily F, member 1
  Uniprot ID: Q9NZS2
  ENST ID: ENST00000612321
  CDS Start-End: 65-301
atttcatgttatacttaataaaacaaaacatacctgtatacacacacattcactcacattgaagatgcaagatgaagaaagatacatgacattgaatgtacagtcaaagaaaaggagttctgcccaaacatctcaacttacatttaaagattattcagtgacgttgcactggtataaaatcttactgggaatatctggaaccgtgaatggtattctcactttgactttgatctccttgatcctgttgggcttttatacagaaaaacctaagacaattaaactacgtatggattgggcttaactttacctccttgaaaatgacatggacttgggtggatggttctccaatagattcaaagatattcttcataaagggaccagctaaagaaaacagctgtgctgccattaaggaaagcaaaattttctctgaaacctgcagcagtgttttcaaatggatttgtcagtattagagtttgacaaaattcacagtgaaataatcaatgatcactatttttggcctattagtttctaatattaatctccaggtgtaagattttaaagtgcaattaaatgccaaaatctcttctcccttctccctccatcatcgacactggtctagcctcagagtaacccctgttaacaaactaaaatgtacacttcaaaatttttacgtgatagtataaaccaatgtgacttcatgtgatcatatccaggatttttattcgtcgcttattttatgccaaatgtgatcaaattatgcctgtttttctgtatcttgcgttttaaattcttaataaggtcctaaacaaaatttcttatatttctaatggttgaattataatgtgggtttatacattttttacccttttgtcaaagagaattaactttgtttccaggcttttgctactcttcactcagctacaataaacatcctgaatgttttcttaaata

SEQ ID NO: 146581 - DNA, 1096 bp, Homo sapiens
  Payload ID: 8994
  Gene Symbol: KLRF1
  Gene Name: killer cell lectin-like receptor subfamily F, member 1
  ENST ID: ENST00000617793
  CDS Start-End: 65-451
atttcatgttatacttaataaaacaaaacatacctgtatacacacacattcactcacattgaagatgcaagatgaagaaagatacatgacattgaatgtacagtcaaagaaaaggagttctgcccaaacatctcaacttacatttaaagattattcagtgacgttgcactggtataaaatcttactgggaatatctggaaccgtgaatggtattctcactttgactttgatctccttgatcctgttggtttctcagggagtattgctaaaatgccaaaaaggaagttgttcaaatgccactcagtatgaggacactggagatctaaaagtgaataatggcacaagaagaaatataagtaataaggacctttgtgcttcgagatctgcagaccagacaggcttttatacagaaaaacctaagacaattaaactacgtatggattgggcttaactttacctccttgaaaatgacatggacttgggtggatggttctccaatagattcaaagatattcttcataaagggaccagctaaagaaaacagctgtgctgccattaaggaaagcaaaattttctctgaaacctgcagcagtgttttcaaatggatttgtcagtattagagtttgacaaaattcacagtgaaataatcaatgatcactatttttggcctattagtttctaatattaatctccaggtgtaagattttaaagtgcaattaaatgccaaaatctcttctcccttctccctccatcatcgacactggtctagcctcagagtaacccctgttaacaaactaaaatgtacacttcaaaatttttacgtgatagtataaaccaatgtgacttcatgtgatcatatccaggatttttattcgtcgcttattttatgccaaatgtgatcaaattatgcctgtttttctgtatcttgcgttttaaattcttaataaggtcctaaacaaaatttcttatatttctaatggttgaattataatgtgggtttatacattttttacccttttgtcaaagagaattaactttgtttccaggcttttgctactcttcactcagctacaataaacatcctgaatgttttctt

SEQ ID NO: 146582 - DNA, 731 bp, Homo sapiens
  Payload ID: 8995
  Gene Symbol: KLRF2
  Gene Name: killer cell lectin-like receptor subfamily F, member 2
  Uniprot ID: D3W0D1
  ENST ID: ENST00000535540
  CDS Start-End: 108-731
agttttcttttagtaccttgtgccaaagagacatatccaaggttgagattagtttccattttctttgtactattttctggataataagacattagacatttgaagagatggagaatgaagatgggtatatgacgctgagtttcaagaatcgttgtaaatcgaagcagaaatctaaagatttctccctatatccacaatattattgtcttctgctcatatttggatgcattgtgatccttatattcattatgacagggattgacctgaagttctggcataaaaaaatggatttctcccagaatgtaaacgtcagcagtctatcaggacacaattacttgtgcccaaatgactggctgttgaacgaagggaaatgttactggttttcaacttcttttaaaacgtggaaagagagtcaacgtgattgtacacagctacaggcacatttactggtgattcaaaatttggatgagctggagttcatacagaacagtttaaaacctggacattttggttggattggactatatgttacattccaagggaacctatggatgtggatagatgaacactttttagttccagaattgttttcagtgattggaccaactgatgacaggagctgtgccgttatcacaggaaactgggtgtattctgaagactgtagctccacatttaagggcatttgccagagagatgcgatcttgacgcacaatggaaccagtggtgtgtaa

SEQ ID NO: 146583 - DNA, 1335 bp, Homo sapiens
  Payload ID: 8996
  Gene Symbol: KLRG1
  Gene Name: killer cell lectin-like receptor subfamily G, member 1
  Uniprot ID: Q96E93
  ENST ID: ENST00000266551
  CDS Start-End: 16-603
agatcttagctgaagatgactgacagtgttatttattccatgttagagttgcctacggcaacccaagcccagaatgactatggaccacagcaaaaatcttcctcttccaggccttcttgttcttgccttgtggcaatagctttggggcttctgactgcagttcttctgagtgtgctgctataccagtggatcctgtgccagggctccaactactccacttgtgccagctgtcctagctgcccagaccgctggatgaaatatggtaaccattgttattatttctcagtggaggaaaaggactggaattctagtctggaattctgcctagccagagactcacacctccttgtgataacggacaatcaggaaatgagcctgctccaagttttcctcagtgaggccttttgctggattggtctgaggaacaattctggctggaggtgggaagatggatcacctctaaacttctcaaggatttcttctaatagctttgtgcagacatgcggtgccatcaacaaaaatggtcttcaagcctcaagctgtgaagttcctttacactgggtgtgtaagaagtgtccctttgcagatcaagctttattctgaagaataaacctagctggcatgctggtgtgtacctgtagtcctagctatttgggaagctgaggtgggagggtcgcttgagcccaggagtttgaggctgcagtgagctatgattgtgccactgtactccagcctgggagatagagcaagactccatctctaaaaaaaaaaaaaaatgctaatgtgagaatataaattgtgggaaatgagtgagggcaaggtggtacttcctccttctgagctcttcacacgtaatgcaaaaacccggtcttaactgattttgttttttttctgagtatgcatatatgtggttgaatgaaccaatgtgtgattgtatcttttccattatgtgactgtttgacctgcatattaatttcaagatagcagtcaattcgataaggcattttcatagaggaaagtttacagaaacagtttatgtggttggatcaccaaattatcttaggtactaaggcctcaaaaataagaaaaactttattatttctcctcagtagagtttggacatacataaggagagaaggtacagtgatgaaggagaccataattctgtagtgttgatgatcctggattataatctttttctctttatctttcatagtttttttaaaaacatggactgtatcttatctaccactatatcccaaatacctaagatagtgcttacgttcagtgactattaaataaataaatggatgaattaaaaagtaagaatgaaaa

SEQ ID NO: 146584 - DNA, 1206 bp, Homo sapiens
  Payload ID: 8996
  Gene Symbol: KLRG1
  Gene Name: killer cell lectin-like receptor subfamily G, member 1
  Uniprot ID: Q96E93
  ENST ID: ENST00000356986
  CDS Start-End: 96-665
agtttagagattgggctgtttcctcactgatacatatcccttcacacttctataatttaactctctcaactgcatgtgaaagatcttagctgaagatgactgacagtgttatttattccatgttagagttgcctacggcaacccaagcccagaatgactatggaccacagcaaaaatcttcctcttccaggccttcttgttcttgccttgtggcaatagctttggggcttctgactgcagttcttctgagtgtgctgctataccagtggatcctgtgccagggctccaactactccacttgtgccagctgtcctagctgcccagaccgctggatgaaatatggtaaccattgttattatttctcagtggaggaaaaggactggaattctagtctggaattctgcctagccagagactcacacctccttgtgataacggacaatcaggaaatgagcctgctccaagttttcctcagtgaggccttttgctggattggtctgaggaacaattctggctggaggtgggaagatggatcacctctaaacttctcaaggatttcttctaatagctttgtgcagacatgcggtgccatcaacaaaaatggtcttcaagcctcaagctgtgaagttcctttacactgggtgtgtaagaaggtcagactttgatagatgaccactctgtcctgaccctcagatctgtcatgtatccctaaaaggagggagctggccactggctgttgggaaagccatgagtatatagttagcaaatactgaactttctcagatatggcattagatgcaagacaacctcctagggattgatgcctaactgatggattctctttgagactatttagatattatgtgagcaatttaaagaccagatctaagcaaattttgaaatagatgtttgttttttgtatttctcagtatggaaactaatgctgccactctcatccccgtcccaaccatctctgtcaaaaatatacctttttcatatgatattctgagctaatctgataaaatctatgccaatatatactattgcttgtgtactagagaagtacattattgctgtactcctctgtacattactgatccctgatggtatatttctatcctaacagtgtccctttgcagatcaagctttattctgaagaataaacctagctggcatgctggtgtgtacctgtagtcctagctattt

SEQ ID NO: 146585 - DNA, 532 bp, Homo sapiens
  Payload ID: 8996
  Gene Symbol: KLRG1
  Gene Name: killer cell lectin-like receptor subfamily G, member 1
  ENST ID: ENST00000543895
  CDS Start-End: 292-532
aaaaggaatctttatggcctggatctcagttcccactaggccaaattgctttaagatgcgatatccttccctgactttctcttttctttcaacctgtcatctgactcaggattgtgctttgactctgttgttgcagcttcctcttccaggccttcttgttcttgccttgtggcaatagctttggggcttctgactgcagttcttctgagtgtgctgctataccagtggatcctgtgccagggctccaactactccacttgtgccagctgtcctagctgcccagaccgctggatgaaatatggtaaccattgttattatttctcagtggaggaaaaggactggaattctagtctggaattctgcctagccagagactcacacctccttgtgataacggacaatcaggaaatgagcctgctccaagttttcctcagtgaggccttttgctggattggtctgaggaacaattctggctggaggtgggaagatggatcacctctaaacttctcaaggatttcttctaatagctttg

SEQ ID NO: 146586 - DNA, 592 bp, Homo sapiens
  Payload ID: 8996
  Gene Symbol: KLRG1
  Gene Name: killer cell lectin-like receptor subfamily G, member 1
  ENST ID: ENST00000539240
  CDS Start-End: 349-592
agttctcacgctaggtctcctccgggcgcttccctagcccgttcgccgcctgagagggacgctgttccgccgcgtggaagcttcgagtctcgactccactgttgacccctagacgagagtagtgcagcgacggggccgtgatgtgcgtcctggctttcttaacgacacctctcctctgtatttcctttttccacttcctcttccaggccttcttgttcttgccttgtggcaatagctttggggcttctgactgcagttcttctgagtgtgctgctataccagtggatcctgtgccagggctccaactactccacttgtgccagctgtcctagctgcccagaccgctggatgaaatatggtaaccattgttattatttctcagtggaggaaaaggactggaattctagtctggaattctgcctagccagagactcacacctccttgtgataacggacaatcaggaaatgagcctgctccaagttttcctcagtgaggccttttgctggattggtctgaggaacaattctggctggaggtgggaagatggatcacctctaaacttctcaaggatttcttctaatagctttgtgc

SEQ ID NO: 146587 - DNA, 2197 bp, Homo sapiens
  Payload ID: 8997
  Gene Symbol: KLRG2
  Gene Name: killer cell lectin-like receptor subfamily G, member 2
  Uniprot ID: A4D1S0
  ENST ID: ENST00000340940
  CDS Start-End: 71-1300
ggagagcgaagctcctctgcactgggcccaggtgcgctcctcagcgtctccgggtggcggggcgcgcgggatggaggagtcttgggaggctgcgcccggaggccaagccggggcagagctcccaatggagcccgtgggaagcctggtccccacgctggagcagccgcaggtgcccgcgaaggtgcgacaacctgaaggtcccgaaagcagcccaagtccggccggggccgtggagaaggcggcgggcgcaggcctggagccctcgagcaagaaaaagccgccttcgcctcgccccgggtccccgcgcgtgccgccgctcagcctgggctacggggtctgccccgagccgccgtcaccgggccctgccttggtcaagctgccccggaatggcgaggcgcccggggctgagcctgcgcccagcgcctgggcgcccatggagctgcaggtagatgtgcgcgtgaagcccgtgggcgcggccggtggcagcagcacgccatcgcccaggccctccacgcgcttcctcaaggtgccggtgcccgagtcccctgccttctcccgccacgcggacccggcgcaccagctcctgctgcgcgcaccatcccagggcggcacgtggggccgccgctcgccgctggctgcagcccggacggagagcggctgcgacgcagagggccgggccagccccgcggaaggaagcgccggctccccgggctcccccacgtgctgccgctgcaaggagctggggctggagaaggaggatgcggcgctgttgccccgcgcggggttggacggcgacgagaagctgccccgggccgtaacgcttacggggctacccatgtacgtgaagtccctgtactgggccctggcgttcatggctgtgctcctggcagtctctggggttgtcattgtggtcctggcctcaagagcaggagccagatgccagcagtgccccccaggctgggtgttgtccgaggagcactgttactacttctctgcagaagcgcaggcctgggaagccagccaggctttctgctcagcctaccacgctaccctccccctgctaagccacacccaggacttcctgggcagatacccagtctccaggcactcctgggtgggggcctggcgaggcccccagggctggcactggatcgacgaggccccactcccgccccagctactccctgaggacggcgaggacaatctggatatcaactgtggggccctggaggaaggcacgctggtggctgcaaactgcagcactccaagaccctgggtctgtgccaaggggacccagtgatctgggctctgcctggtcctcagcctgccaggcagatgcagcaccccctacaggggaggccagttgagagcttgggcagcctcttcctggacccagttatccaggtcttcatgctctgctcaagggggccacatgagcgagcctaggagctggacttcaacccaggaagatgcatccgagggaaaggagattttctatggcctcaggcctgagtgccaatattagtctccagcttctgtggatgatcggtttgatgacattgggatggttgtttagcatttctgtgccttggtttcattaaaatgacaatttccccctagaggaaaaagacagggttaacaaccacagcggattccaatctgggttctcattccggctcatggaaatgagtctgccgttgttcagtggcagtgggacttggcagggataacgtcattgctgtgaattctacttcaggcagctgggtgtacatcggacacagcctaccggcagcctctggaaaattaaccaaggaaaaggagcggtcagccctggaaagaggggagagcaaggttttccttccccaccctgagagttggcaaagggttggcagacaggaaggttctgggtggagatcccgcatgtgggctggccagcccctggcacgctgatgcccaagggtgagacaaggcagagaggacagggccacctggcaggagaagccaggagagcaccccagcttggtaggtggaagctgaggagtctgagtgaaaaaggaaatcagagaaatgcaggcacgttccaggcagctcttctacccacagctgcagagacgaccaacctgaagatgtctccatgctggggtgcagtgaagaccttcaggctggaggatgtggctgacagagttgtgtagttcct

SEQ ID NO: 146588 - DNA, 1148 bp, Homo sapiens
  Payload ID: 8997
  Gene Symbol: KLRG2
  Gene Name: killer cell lectin-like receptor subfamily G, member 2
  Uniprot ID: A4D1S0
  ENST ID: ENST00000393039
  CDS Start-End: 22-966
ccgggtggcggggcgcgcgggatggaggagtcttgggaggctgcgcccggaggccaagccggggcagagctcccaatggagcccgtgggaagcctggtccccacgctggagcagccgcaggtgcccgcgaaggtgcgacaacctgaaggtcccgaaagcagcccaagtccggccggggccgtggagaaggcggcgggcgcaggcctggagccctcgagcaagaaaaagccgccttcgcctcgccccgggtccccgcgcgtgccgccgctcagcctgggctacggggtctgccccgagccgccgtcaccgggccctgccttggtcaagctgccccggaatggcgaggcgcccggggctgagcctgcgcccagcgcctgggcgcccatggagctgcaggtagatgtgcgcgtgaagcccgtgggcgcggccggtggcagcagcacgccatcgcccaggccctccacgcgcttcctcaaggtgccggtgcccgagtcccctgccttctcccgccacgcggacccggcgcaccagctcctgctgcgcgcaccatcccagggcggcacgtggggccgccgctcgccgctggctgcagcccggacggagagcggctgcgacgcagagggccgggccagccccgcggaaggaagcgccggctccccgggctcccccacgtgctgccgctgcaaggagctggggctggagaaggaggatgcggcgctgttgccccgcgcggggttggacggcgacgagaagctgccccgggccgtaacgcttacggactccctgaggacggcgaggacaatctggatatcaactgtggggccctggaggaaggcacgctggtggctgcaaactgcagcactccaagaccctgggtctgtgccaaggggacccagtgatctgggctctgcctggtcctcagcctgccaggcagatgcagcaccccctacaggggaggccagttgagagcttgggcagcctcttcctggacccagttatccaggtcttcatgctctgctcaagggggccacatgagcgagcctaggagctggacttcaacccaggaagatgcatccgagggaaaggagattttctatggcctcaggcctgagtgccaatattagtctccagcttctgtggatgatcgg

SEQ ID NO: 146589 - DNA, 1553 bp, Homo sapiens
  Payload ID: 8998
  Gene Symbol: KLRK1
  Gene Name: killer cell lectin-like receptor subfamily K, member 1
  Uniprot ID: P26718
  ENST ID: ENST00000240618
  CDS Start-End: 142-792
tgaggacatatctaaattttctagttttatagaaggcttttatccacaagaatcaagatcttccctctctgagcaggaatcctttgtgcattgaagactttagattcctctctgcggtagacgtgcacttataagtatttgatggggtggattcgtggtcggaggtctcgacacagctgggagatgagtgaatttcataattataacttggatctgaagaagagtgatttttcaacacgatggcaaaagcaaagatgtccagtagtcaaaagcaaatgtagagaaaatgcatctccattttttttctgctgcttcatcgctgtagccatgggaatccgtttcattattatggtaacaatatggagtgctgtattcctaaactcattattcaaccaagaagttcaaattcccttgaccgaaagttactgtggcccatgtcctaaaaactggatatgttacaaaaataactgctaccaattttttgatgagagtaaaaactggtatgagagccaggcttcttgtatgtctcaaaatgccagccttctgaaagtatacagcaaagaggaccaggatttacttaaactggtgaagtcatatcattggatgggactagtacacattccaacaaatggatcttggcagtgggaagatggctccattctctcacccaacctactaacaataattgaaatgcagaagggagactgtgcactctatgcctcgagctttaaaggctatatagaaaactgttcaactccaaatacgtacatctgcatgcaaaggactgtgtaaagatgatcaaccatctcaataaaagccaggaacagagaagagattacaccagcggtaacactgccaactgagactaaaggaaacaaacaaaaacaggacaaaatgaccaaagactgtcagatttcttagactccacaggaccaaaccatagaacaatttcactgcaaacatgcatgattctccaagacaaaagaagagagatcctaaaggcaattcagatatccccaaggctgcctctcccaccacaagcccagagtggatgggctgggggaggggtgctgttttaatttctaaaggtaggaccaacacccaggggatcagtgaaggaagagaaggccagcagatcactgagagtgcaaccccaccctccacaggaaattgcctcatgggcagggccacagcagagagacacagcatgggcagtgccttccctgcctgtgggggtcatgctgccacttttaatgggtcctccacccaacggggtcagggaggtggtgctgccccagtgggccatgattatcttaaaggcattattctccagccttaagtaagatcttaggacgtttcctttgctatgatttgtacttgcttgagtcccatgactgtttctcttcctctctttcttccttttggaatagtaatatccatcctatgtttgtcccactattgtattttggaagcacataacttgtttggtttcacaggttcacagttaagaaggaattttgcctctgaataaatagaatcttgagtctcatgca

SEQ ID NO: 146590 - DNA, 734 bp, Homo sapiens
  Payload ID: 8998
  Gene Symbol: KLRK1
  Gene Name: killer cell lectin-like receptor subfamily K, member 1
  ENST ID: ENST00000396451
  CDS Start-End: 191-433
ccagttggctgtaagttgccatttgaactaaacgaaatagatcaggaactgaggacatatctaaattttctagttttatagaaggcttttatccacaagaatcaagatcttccctctctgagcaggaatcctttgtgcattgaagactttagattcctctctgcggtagacgtgcacttataagtatttgatggggtggattcgtggtcggaggtctcgacacagctgggagatgagtgaatttcataattataacttggatctgaagaagagtgatttttcaacacgatggcaaaagcaaagatgtccagtagtcaaaagcaaatgtagagaaaatgcatctccattttttttctgctgcttcatcgctgtagccatgggaatccgtttcattattatggtaacaatatggagtgctgtattcctaaactaaagttactgtggcccatgtcctaaaaactggatatgttacaaaaataactgctaccaattttttgatgagagtaaaaactggtatgagagccaggcttcttgtatgtctcaaaatgccagccttctgaaagtatacagcaaagaggaccaggatttacttaaactggtgaagtcatatcattggatgggactagtacacattccaacaaatggatcttggcagtgggaagatggctccattctctcacccaacctactaacaataattgaaatgcagaagggagactgtgcactctatgcct

SEQ ID NO: 146591 - DNA, 951 bp, Homo sapiens
  Payload ID: 8998
  Gene Symbol: KLRK1
  Gene Name: killer cell lectin-like receptor subfamily K, member 1
  Uniprot ID: P26718
  ENST ID: ENST00000540818
  CDS Start-End: 167-817
cacaggggaaaagtttctgcattttacttttctattcaaaatattttatctcaccacgggaaagagaacaaaaaacaaatgcccagttttattttattcaggaatcctttgtgcattgaagactttagattcctctctgcggtagacgtgcacttataagtatttgatggggtggattcgtggtcggaggtctcgacacagctgggagatgagtgaatttcataattataacttggatctgaagaagagtgatttttcaacacgatggcaaaagcaaagatgtccagtagtcaaaagcaaatgtagagaaaatgcatctccattttttttctgctgcttcatcgctgtagccatgggaatccgtttcattattatggtaacaatatggagtgctgtattcctaaactcattattcaaccaagaagttcaaattcccttgaccgaaagttactgtggcccatgtcctaaaaactggatatgttacaaaaataactgctaccaattttttgatgagagtaaaaactggtatgagagccaggcttcttgtatgtctcaaaatgccagccttctgaaagtatacagcaaagaggaccaggatttacttaaactggtgaagtcatatcattggatgggactagtacacattccaacaaatggatcttggcagtgggaagatggctccattctctcacccaacctactaacaataattgaaatgcagaagggagactgtgcactctatgcctcgagctttaaaggctatatagaaaactgttcaactccaaatacgtacatctgcatgcaaaggactgtgtaaagatgatcaaccatctcaataaaagccaggaacagagaagagattacaccagcggtaacactgccaactgagactaaaggaaacaaacaaaaacaggacaaaatgaccaaagactgtcagatttcttagactcc

SEQ ID NO: 146592 - DNA, 4277 bp, Homo sapiens
  Payload ID: 8999
  Gene Symbol: KLLN
  Gene Name: killin, p53-regulated DNA replication inhibitor
  Uniprot ID: B2CW77
  ENST ID: ENST00000445946
  CDS Start-End: 951-1487
gcagggcagggcagggggcggtaggagggggcagagcggtagctctgggtgcgagcgcagagtccccaagccgcaggctctactgagcatgcccagtgtagctgcctggggcttgctcgggccggttcccagccgccagcctgcagctgcacttgctgcggcttttgcagcaacgcgaggcgaggataacgagctaagcctcggcctctgcccagaaacccagccggaggcagggtaggctgttgtggggcgggggtggaggactgatgatgaaagctgagatgggtgcgttgagcagtgtcactgactcgagtctgaggttacctgtgcacaggtgaaaaggaccaggtgaccacgctgctcagtgtagagggaaatgcagggacggtccctgcaaggggaataccctccccccttgcctctacccctagatttccgcggcgtggactgcattcgctctttccttttgcaccgctgtcggatcacaatcgttcgcagagatttgactgtaacagcctttgcctagagattcccccttcccccaaatctgtgtcctcatggtgtcagtcttagcacaaagagcaacctgctattgtgtcgccagcgtgtatcacctcatccggctcccttgcagcgccccacctctcgcttccccggtaactcggctcgtttgccctaaaaatgaaagctctcagccgagcgtgctgaacgtgaacacatagccgttgaatttcaagggcccaaagggcacctatctaaatgaactgaaagaggatccctgtgagtgggacgcaccccgcaggcctctcctgcgcccgctccggtgcccccaagagagtcgagcatctttcccctcgggctccaggtcggttcgcggcgtcggagtcaagctcggttctcagagaccacctagccccgcccccccttggccgccgtgaaaacccggcaggatggatcgcccggggccaggctccgcgcgccccggccggaccgtgcacgtttggggttaccgggttgagtggaaagtacggaacggtaggaagctgcagcccagcgagtgggcggggcgaggagacctaggagggttcaaaaggaggtggaaggatacacgggccacagtcggaactactttccgaaggaggtcacgtgtgtccctagttggggaactttccaaattcccactccccagtgatagctccggaggcaagtcgtcttcttcctttgctcggggtgctcttgcctggtgcaggcagcggaaccccaacccttcctgcgccgcggcggaaacaggggctcggaccagcctcccgaaggagcgctgtcggggctggcgcttggggaactggttacacaagcacccacatccaaacacgtgcccccgcctccccgcctgctggctgccgccgattcttacagaacgcggggagagagtccccaaactggtgccactcctcgcctgctaccctaagagcaagccaaaggactgagacctgagactcactccttgctctacatcgacctattctgcgccttcccaaacgtgggaaaaggagctgggcgctagggctctcgggcctctccatcgctgatgccctgccgcttagggtgaacccttttggttctgtgcttgagggtatctcctgctgcagcccagagcgtgcattctccgatgttgcaacaaacgtccagtcactacccctgagctggtgagcgcgccccacctactgtggactcagccaagtgacttatctggtctgagaacctagtcaatggccgtcagcccagaacaaacctgtcaagtctgtttacagccccgattgggctgacctgtcaccgtgagagagctgattcggaaatgctgagagttggatcgcactcctaccccgcaccccacccgtcaaggatctacaaagcaagtagtcgacccgcttaaagagaatgagcatcaacaccagtctgggaatttattgttttttcatttcccttaggaagtagaactacagacgacaatttgagtcaaaaaatatctaacgagacctaggttgaagcactgagttgtttttcaaactttgagagaatgagaatcaatctgcatgtgtgttcaataattgtaagtgcctagcaaagtctaaagagggtttatgctgtatttgagaaagagtactgtatatgtgcacatcatagttgcaggcaacctctgaagactagaaacctcaagagacctagcgcagaaagccacaggccattacctaactccgggactactaattaaacctgggatatttacagtgttcttagagacctctgaggctccataaaactttgcacttatatacagcatttaagatagctgtgcaggagttaacaacctgctgaagcttcagtgttgatatttattgaagactggttttgtgcatagttctggtcagcttgggaaaggcaaggaccacagtggaaaaggaaatggaaagcaaccggaaaagagtaagagaaaggcctccagttgatttccagagatgcagatactgtccacacagcctagcgtgaactacagatttcattattgtataaataaccaaagataaggagttcctgatgtctaggtgttctactagattgcatggtaaaaaccagagctgtgtttaattatcaattactgcgtggtagaaaaagggaaaatgaagatgaacttttaaaaggggagtagattagggaggggtaaaatgtctcacatttgtttcttagattgctgatcttgtctccagagtccctgttattagcactgcccttctctgtccctcccctggagcctaccctaagtgacaattagtctcatagcatctgagaatctctgaaatctgctttcatggaagcaaatgaaacaagggtgcattcctgtcctggtgcgacagaatcctcttggattccatggcacagagttactctggagcagagataatctgcatcaccagcactaaagtgctagaatatgagaccagcctccaagtacttccatccggctgaagaaagaaaatgggaaatgggttttactgcttctctaaacatcaggtccctctacttctctctagtggtgaatgaaaggatcatcaatgttggcagatatttggccagcccaacagcaacatcaggtggttattaggagttggtgaataaaatcctccttctgttcctagtgttaagttgtttctgaaagaaatactgatgcatccttttccaattttttgtttttcttttcctttctacccaaatggctggccctatctaaactaaagaaagtttcaaaaatagtacttttttaaagttcagttgaaaatacctgcttggctgtatagatattacaatacactggtctccaagcacttcagttctttttttttttttctttttttttttttttttttgagacggagtctcacaggctggagtgcagtggcatgatctcggttcactgcaacctctgcctcccaggttcaagcaattcccctgcctcagcctcccgagtagctgggactacaggcgcacaccatcatgccgggctaattttttgtagtttagtaaagacagggtttcaccatgttggtcaggatggtctcgatctcctgacctcgtgatctgcccgccacggcctcccaaagtgctgggattacaggcgtgagccaccgcgcccggccatacttagttctttacctgtctggattcagaaccagaataccatagggagaagtagaagcttgtaacaaagggacaattatataaagcttcagggtgactatgtagattgattagtaagcatggtaaactagctttaattatcgcttctaacagctgattccaaaactctattgttactacaccaaaataatgtcgaaagaaaatttctttcttattttctttgataagcgaaatgaccagcaacttgatgtggatgatataaatacttgatgtgctctttgtaggtcatctgctaagatgtcttttgtgtaaacactctgatctctatagtgcctttctcatctcccatacgctgacctttcaaaaagggatctaactcaatagctttaatttttaaacaatcttctgtatttctgtctgtttaactactgttttctaaataatacagaatataaaaacataataatcattggattgaatgtaaacccattgttccaagggtctgaggttttccccttatttcatttatcctaataacaaacattattgttctttcaataaagataattttaagacattctcca

SEQ ID NO: 146593 - DNA, 4278 bp, Homo sapiens
  Payload ID: 8999
  Gene Symbol: KLLN
  Gene Name: Killin, p53-regulated DNA replication inhibitor
  ENST ID: ENST00000635224
  CDS Start-End: 951-1487
gcagggcagggcagggggcggtaggagggggcagagcggtagctctgggtgcgagcgcagagtccccaagccgcaggctctactgagcatgcccagtgtagctgcctggggcttgctcgggccggttcccagccgccagcctgcagctgcacttgctgcggcttttgcagcaacgcgaggcgaggataacgagctaagcctcggcctctgcccagaaacccagccggaggcagggtaggctgttgtggggcgggggtggaggactgatgatgaaagctgagatgggtgcgttgagcagtgtcactgactcgagtctgaggttacctgtgcacaggtgaaaaggaccaggtgaccacgctgctcagtgtagagggaaatgcagggacggtccctgcaaggggaataccctccccccttgcctctacccctagatttccgcggcgtggactgcattcgctctttccttttgcaccgctgtcggatcacaatcgttcgcagagatttgactgtaacagcctttgcctagagattcccccttcccccaaatctgtgtcctcatggtgtcagtcttagcacaaagagcaacctgctattgtgtcgccagcgtgtatcacctcatccggctcccttgcagcgccccacctctcgcttccccggtaactcggctcgtttgccctaaaaatgaaagctctcagccgagcgtgctgaacgtgaacacatagccgttgaatttcaagggcccaaagggcacctatctaaatgaactgaaagaggatccctgtgagtgggacgcaccccgcaggcctctcctgcgcccgctccggtgcccccaagagagtcgagcatctttcccctcgggctccaggtcggttcgcggcgtcggagtcaagctcggttctcagagaccacctagccccgcccccccttggccgccgtgaaaacccggcaggatggatcgcccggggccaggctccgcgcgccccggccggaccgtgcacgtttggggttaccgggttgagtggaaagtacggaacggtaggaagctgcagcccagcgagtgggcggggcgaggagacctaggagggttcaaaaggaggtggaaggatacacgggccacagtcggaactactttccgaaggaggtcacgtgtgtccctagttggggaactttccaaattcccactccccagtgatagctccggaggcaagtcgtcttcttcctttgctcggggtgctcttgcctggtgcaggcagcggaaccccaacccttcctgcgccgcggcggaaacaggggctcggaccagcctcccgaaggagcgctgtcggggctggcgcttggggaactggttacacaagcacccacatccaaacacgtgcccccgcctccccgcctgctggctgccgccgattcttacagaacgcggggagagagtccccaaactggtgccactcctcgcctgctaccctaagagcaagccaaaggactgagacctgagactcactccttgctctacatcgacctattctgcgccttcccaaacgtgggaaaaggagctgggcgctagggctctcgggcctctccatcgctgatgccctgccgcttagggtgaacccttttggttctgtgcttgagggtatctcctgctgcagcccagagcgtgcattctccgatgttgcaacaaacgtccagtcactacccctgagctggtgagcgcgccccacctactgtggactcagccaagtgacttatctggtctgagaacctagtcaatggccgtcagcccagaacaaacctgtcaagtctgtttacagccccgattgggctgacctgtcaccgtgagagagctgattcggaaatgctgagagttggatcgcactcctaccccgcaccccacccgtcaaggatctacaaagcaagtagtcgacccgcttaaagagaatgagcatcaacaccagtctgggaatttattgttttttcatttcccttaggaagtagaactacagacgacaatttgagtcaaaaaatatctaacgagacctaggttgaagcactgagttgtttttcaaactttgagagaatgagaatcaatctgcatgtgtgttcaataattgtaagtgcctagcaaagtctaaagagggtttatgctgtatttgagaaagagtactgtatatgtgcacatcatagttgcaggcaacctctgaagactagaaacctcaagagacctagcgcagaaagccacaggccattacctaactccgggactactaattaaacctgggatatttacagtgttcttagagacctctgaggctccataaaactttgcacttatatacagcatttaagatagctgtgcaggagttaacaacctgctgaagcttcagtgttgatatttattgaagactggttttgtgcatagttctggtcagcttgggaaaggcaaggaccacagtggaaaaggaaatggaaagcaaccggaaaagagtaagagaaaggcctccagttgatttccagagatgcagatactgtccacacagcctagcgtgaactacagatttcattattgtataaataaccaaagataaggagttcctgatgtctaggtgttctactagattgcatggtaaaaaccagagctgtgtttaattatcaattactgcgtggtagaaaaagggaaaatgaagatgaacttttaaaaggggagtagattagggaggggtaaaatgtctcacatttgtttcttagattgctgatcttgtctccagagtccctgttattagcactgcccttctctgtccctcccctggagcctaccctaagtgacaattagtctcatagcatctgagaatctctgaaatctgctttcatggaagcaaatgaaacaagggtgcattcctgtcctggtgcgacagaatcctcttggattccatggcacagagttactctggagcagagataatctgcatcaccagcactaaagtgctagaatatgagaccagcctccaagtacttccatccggctgaagaaagaaaatgggaaatgggttttactgcttctctaaacatcaggtccctctacttctctctagtggtgaatgaaaggatcatcaatgttggcagatatttggccagcccaacagcaacatcaggtggttattaggagttggtgaataaaatcctccttctgttcctagtgttaagttgtttctgaaagaaatactgatgcatccttttccaattttttgtttttcttttcctttctacccaaatggctggccctatctaaactaaagaaagtttcaaaaatagtacttttttaaagttcagttgaaaatacctgcttggctgtatagatattacaatacactggtctccaagcacttcagttctttttttttttttcttttttttttttttttttttgagacggagtctcacaggctggagtgcagtggcatgatctcggttcactgcaacctctgcctcccaggttcaagcaattcccctgcctcagcctcccgagtagctgggactacaggcgcacaccatcatgccgggctaattttttgtagtttagtaaagacagggtttcaccatgttggtcaggatggtctcgatctcctgacctcgtgatctgcccgccacggcctcccaaagtgctgggattacaggcgtgagccaccgcgcccggccatacttagttctttacctgtctggattcagaaccagaataccatagggagaagtagaagcttgtaacaaagggacaattatataaagcttcagggtgactatgtagattgattagtaagcatggtaaactagctttaattatcgcttctaacagctgattccaaaactctattgttactacaccaaaataatgtcgaaagaaaatttctttcttattttctttgataagcgaaatgaccagcaacttgatgtggatgatataaatacttgatgtgctctttgtaggtcatctgctaagatgtcttttgtgtaaacactctgatctctatagtgcctttctcatctcccatacgctgacctttcaaaaagggatctaactcaatagctttaatttttaaacaatcttctgtatttctgtctgtttaactactgttttctaaataatacagaatataaaaacataataatcattggattgaatgtaaacccattgttccaagggtctgaggttttccccttatttcatttatcctaataacaaacattattgttctttcaataaagataattttaagacattctcca

SEQ ID NO: 146594 - DNA, 2874 bp, Homo sapiens
  Payload ID: 9000
  Gene Symbol: KIRREL
  Gene Name: kin of IRRE like (Drosophila)
  Uniprot ID: Q96J84
  ENST ID: ENST00000359209
  CDS Start-End: 68-2341
ccgctcctctggctcgctcgccaactccgggccccagccgcgggcgggcgcacggcgggcggacagcatgctgagcctcctcgtctggatcctcactctctccgatactttctcccaagggacccagacccgcttcagccaggagccagctgaccagacggtggtggctggacagcgggccgtgctcccctgtgtgctgctcaactactctggaattgtgcaatggaccaaggacgggctggccctgggcatgggccagggcctcaaagcctggccacggtaccgggttgtgggctccgcagacgctgggcagtacaacctggagatcacagatgctgagctctctgacgacgcctcttacgagtgccaggccacggaggccgccctgcgctctcggcgggccaaactcaccgtgctcatccccccagaggacaccaggattgacggaggccctgtgattctactgcaggcaggcaccccccacaacctcacatgccgggccttcaatgcgaagcctgctgccaccatcatctggttccgggacgggacgcagcaggagggcgctgtggccagcacggaattgctgaaggatgggaagagggagaccaccgtgagccaactgcttattaaccccacggacctggacatagggcgtgtcttcacttgccgaagcatgaacgaagccatccctagtggcaaggagacttccatcgagctggatgtgcaccaccctcctacagtgaccctgtccattgagccacagacggtgcaggagggtgagcgtgttgtctttacctgccaggccacagccaaccccgagatcttgggctacaggtgggccaaagggggtttcttgattgaagacgcccacgagagtcgctatgagacaaatgtggattattcctttttcacggagcctgtgtcttgtgaggttcacaacaaagtgggaagcaccaatgtcagcactttagtaaatgtccactttgctccccggattgtagttgaccccaaacccacaaccacagacattggctctgatgtgacccttacctgtgtctgggttgggaatccccccctcactctcacctggaccaaaaaggactcaaatatggtcctgagtaacagcaaccagctgctgctgaagtcggtgactcaggcagacgctggcacctacacctgccgggccatcgtgcctcgaatcggagtggctgagcgggaggtgccgctctatgtgaacgggccccccatcatctccagtgaggcagtgcagtatgctgtgaggggtgacggtggcaaggtggagtgtttcattgggagcacaccacccccagaccgcatagcatgggcctggaaggagaacttcttggaggtggggaccctggaacgctatacagtggagaggaccaactcaggcagtggggtgctatccacgctcaccatcaacaatgtcatggaggccgactttcagactcactacaactgcaccgcctggaacagcttcgggccaggcacagccatcatccagctggaagagcgagaggtgttacctgtgggcatcatagctggggccaccatcggcgcgagcatcctgctcatcttcttcttcatcgccttggtattcttcctctaccggcgccgcaaaggcagtcgcaaagacgtgaccctgaggaagctggatatcaaggtggagacagtgaaccgagagccacttacgatgcattctgaccgggaggatgacaccgccagcgtctccacagcaacccgggtcatgaaggccatctactcgtcgtttaaggatgatgtggatctgaagcaggacctgcgctgcgacaccatcgacacccgggaggagtatgagatgaaggaccccaccaatggctactacaacgtgcgtgcccatgaagaccgcccgtcttccagggcagtgctctatgctgactaccgtgcccctggccctgcccgcttcgacggccgcccctcatcccgtctctcccactccagcggctatgcccagctcaacacctatagccggggccctgcctctgactatggccctgagcccacaccccctggccctgctgccccagctggcactgacacaaccagccagctgtcctacgagaactatgagaagttcaactcccatcccttccctggggcagctgggtaccccacctaccgactgggctacccccaggccccaccctctggcctggagcggaccccatatgaggcgtatgaccccattggcaagtacgccacagccactcgattctcctacacctcccagcactcggactacggccagcgattccagcagcgcatgcagactcacgtgtaggggccagagcctggctggggcatctctgcggggcagaggagaaggctttcacagctgttccctgatattcaggggcattgctcattgctcccttctcggaccagccttcttcctcccaccatggcaggtggggagcaggtctcccagaaacaccccgtcccgaggatggtgctctgtgcatgccccagcctcctgggcctgcccttccctcttcttcgggaggatgtgtctcttctgacctgcactcttgcctgaccctagaatggggacagggaaagtgaaggttagggaaagcagaggggggcactttttagcattccctttctatcccacccctctgatctcccataagtggaaatgggggtacccagggatgggcaggctttggcctagggacatgaagtatgggagtgggtggctgtggcacagacaggtggaaaacgggatagcctggccagtccctctgttgtctgcattcgtgccctgggtgcctctctccttcctcagggtactgcagaagggagcgaacaggg

SEQ ID NO: 146595 - DNA, 3304 bp, Homo sapiens
  Payload ID: 9000
  Gene Symbol: KIRREL
  Gene Name: kin of IRRE like (Drosophila)
  ENST ID: ENST00000360089
  CDS Start-End: 592-2373
ggcgccgtcggagggagagtagacgtcaggcggagggagggaggcaggcaggcagggaggcagggagggagagagggaaggaagagaaggggagagaaagggggagcaaagaccgaaagagacccagagagatacagcttgagaggagaaataattaaagggggagggcgaccaggaggagaaaaaggtctgggaggaaagagagataaagagaatcggagggcagggaaatgagtttgtgcgcgtgagtgtgcgcgcgcgcgtgtgtgtgtgcaggggcgggcgcgggcgggcggggggcgggctcccgggctcccgggctcccctcctccccagcccgctcctctggctcgctcgccaactccgggccccagccgcgggcgggcgcacggcgggcggacagcatgctgagcctcctcgtctggatcctcactctctccgatactttctcccaaggtaaggacccagacccgcttcagccaggagccagctgaccagacggtggtggctggacagcgggccgtgctcccctgtgtgctgctcaactactctggaattgtgcaatggaccaaggacgggctggccctgggcatgggccagggcctcaaagcctggccacggtaccgggttgtgggctccgcagacgctgggcagtacaacctggagatcacagatgctgagctctctgacgacgcctcttacgagtgccaggccacggaggccgccctgcgctctcggcgggccaaactcaccgtgctcaaccctcctacagtgaccctgtccattgagccacagacggtgcaggagggtgagcgtgttgtctttacctgccaggccacagccaaccccgagatcttgggctacaggtgggccaaagggggtttcttgattgaagacgcccacgagagtcgctatgagacaaatgtggattattcctttttcacggagcctgtgtcttgtgaggttcacaacaaagtgggaagcaccaatgtcagcactttagtaaatgtccactttgctccccggattgtagttgaccccaaacccacaaccacagacattggctctgatgtgacccttacctgtgtctgggttgggaatccccccctcactctcacctggaccaaaaaggactcaaatatggtcctgagtaacagcaaccagctgctgctgaagtcggtgactcaggcagacgctggcacctacacctgccgggccatcgtgcctcgaatcggagtggctgagcgggaggtgccgctctatgtgaacgggccccccatcatctccagtgaggcagtgcagtatgctgtgaggggtgacggtggcaaggtggagtgtttcattgggagcacaccacccccagaccgcatagcatgggcctggaaggagaacttcttggaggtggggaccctggaacgctatacagtggagaggaccaactcaggcagtggggtgctatccacgctcaccatcaacaatgtcatggaggccgactttcagactcactacaactgcaccgcctggaacagcttcgggccaggcacagccatcatccagctggaagagcgagaggtgttacctgtgggcatcatagctggggccaccatcggcgcgagcatcctgctcatcttcttcttcatcgccttggtattcttcctctaccggcgccgcaaaggcagtcgcaaagacgtgaccctgaggaagctggatatcaaggtggagacagtgaaccgagagccacttacgatgcattctgaccgggaggatgacaccgccagcgtctccacagcaacccgggtcatgaaggccatctactcgtcgtttaaggatgatgtggatctgaagcaggacctgcgctgcgacaccatcgacacccgggaggagtatgagatgaaggaccccaccaatggctactacaacgtgcgtgcccatgaagaccgcccgtcttccagggcagtgctctatgctgactaccgtgcccctggccctgcccgcttcgacggccgcccctcatcccgtctctcccactccagcggctatgcccagctcaacacctatagccggggccctgcctctgactatggccctgagcccacaccccctggccctgctgccccagctggcactgacacaaccagccagctgtcctacgagaactatgagaagttcaactcccatcccttccctggggcagctgggtaccccacctaccgactgggctacccccaggccccaccctctggcctggagcggaccccatatgaggcgtatgaccccattggcaagtacgccacagccactcgattctcctacacctcccagcactcggactacggccagcgattccagcagcgcatgcagactcacgtgtaggggccagagcctggctggggcatctctgcggggcagaggagaaggctttcacagctgttccctgatattcaggggcattgctcattgctcccttctcggaccagccttcttcctcccaccatggcaggtggggagcaggtctcccagaaacaccccgtcccgaggatggtgctctgtgcatgccccagcctcctgggcctgcccttccctcttcttcgggaggatgtgtctcttctgacctgcactcttgcctgaccctagaatggggacagggaaagtgaaggttagggaaagcagaggggggcactttttagcattccctttctatcccacccctctgatctcccataagtggaaatgggggtacccagggatgggcaggctttggcctagggacatgaagtatgggagtgggtggctgtggcacagacaggtggaaaacgggatagcctggccagtccctctgttgtctgcattcgtgccctgggtgcctctctccttcctcagggtactgcagaagggagcgaacagggtactgttcgctcttgtctacagaacagccctggcactgcattcaaatccagtcttcattcagctgggatcaaaatgccagtcaccttggctacccactgtggacagctgtctgtcagcatgcagagggatccaggaatccccccggcagcacggcccgctttccttctcctccatgctgggccagccagataagtcagggtcctggtggagaaagaaaggctaggaccatgtcctcattgacccagatactgctgtgtgctgcacagcagtgaaccaacactagagggagccacacaagcctcctctccccagtctgccccacttcctggctttaactcttgagctggtttggggagtggtgaggtaggggtgggggtgctgtaggctctttttcaaa

SEQ ID NO: 146596 - DNA, 6870 bp, Homo sapiens
  Payload ID: 9000
  Gene Symbol: KIRREL
  Gene Name: kin of IRRE like (Drosophila)
  ENST ID: ENST00000368172
  CDS Start-End: 13-1728
acttgccgaagcatgaacgaagccatccctagtggcaaggagacttccatcgagctggatgtgcaccaccctcctacagtgaccctgtccattgagccacagacggtgcaggagggtgagcgtgttgtctttacctgccaggccacagccaaccccgagatcttgggctacaggtgggccaaagggggtttcttgattgaagacgcccacgagagtcgctatgagacaaatgtggattattcctttttcacggagcctgtgtcttgtgaggttcacaacaaagtgggaagcaccaatgtcagcactttagtaaatgtccactttgctccccggattgtagttgaccccaaacccacaaccacagacattggctctgatgtgacccttacctgtgtctgggttgggaatccccccctcactctcacctggaccaaaaaggactcaaatatggggcccaggcctcctggctccccacccgaggctgctctctctgcccaggtcctgagtaacagcaaccagctgctgctgaagtcggtgactcaggcagacgctggcacctacacctgccgggccatcgtgcctcgaatcggagtggctgagcgggaggtgccgctctatgtgaacgggccccccatcatctccagtgaggcagtgcagtatgctgtgaggggtgacggtggcaaggtggagtgtttcattgggagcacaccacccccagaccgcatagcatgggcctggaaggagaacttcttggaggtggggaccctggaacgctatacagtggagaggaccaactcaggcagtggggtgctatccacgctcaccatcaacaatgtcatggaggccgactttcagactcactacaactgcaccgcctggaacagcttcgggccaggcacagccatcatccagctggaagagcgagaggtgttacctgtgggcatcatagctggggccaccatcggcgcgagcatcctgctcatcttcttcttcatcgccttggtattcttcctctaccggcgccgcaaaggcagtcgcaaagacgtgaccctgaggaagctggatatcaaggtggagacagtgaaccgagagccacttacgatgcattctgaccgggaggatgacaccgccagcgtctccacagcaacccgggtcatgaaggccatctactcgtcgtttaaggatgatgtggatctgaagcaggacctgcgctgcgacaccatcgacacccgggaggagtatgagatgaaggaccccaccaatggctactacaacgtgcgtgcccatgaagaccgcccgtcttccagggcagtgctctatgctgactaccgtgcccctggccctgcccgcttcgacggccgcccctcatcccgtctctcccactccagcggctatgcccagctcaacacctatagccggggccctgcctctgactatggccctgagcccacaccccctggccctgctgccccagctggcactgacacaaccagccagctgtcctacgagaactatgagaagttcaactcccatcccttccctggggcagctgggtaccccacctaccgactgggctacccccaggccccaccctctggcctggagcggaccccatatgaggcgtatgaccccattggcaagtacgccacagccactcgattctcctacacctcccagcactcggactacggccagcgattccagcagcgcatgcagactcacgtgtaggggccagagcctggctggggcatctctgcggggcagaggagaaggctttcacagctgttccctgatattcaggggcattgctcattgctcccttctcggaccagccttcttcctcccaccatggcaggtggggagcaggtctcccagaaacaccccgtcccgaggatggtgctctgtgcatgccccagcctcctgggcctgcccttccctcttcttcgggaggatgtgtctcttctgacctgcactcttgcctgaccctagaatggggacagggaaagtgaaggttagggaaagcagaggggggcactttttagcattccctttctatcccacccctctgatctcccataagtggaaatgggggtacccagggatgggcaggctttggcctagggacatgaagtatgggagtgggtggctgtggcacagacaggtggaaaacgggatagcctggccagtccctctgttgtctgcattcgtgccctgggtgcctctctccttcctcagggtactgcagaagggagcgaacagggtactgttcgctcttgtctacagaacagccctggcactgcattcaaatccagtcttcattcagctgggatcaaaatgccagtcaccttggctacccactgtggacagctgtctgtcagcatgcagagggatccaggaatccccccggcagcacggcccgctttccttctcctccatgctgggccagccagataagtcagggtcctggtggagaaagaaaggctaggaccatgtcctcattgacccagatactgctgtgtgctgcacagcagtgaaccaacactagagggagccacacaagcctcctctccccagtctgccccacttcctggctttaactcttgagctggtttggggagtggtgaggtaggggtgggggtgctgtaggctctttttcaaagaaaacaaaaaacaatgaaaacctcatttgggaagaaaagctgtagggattcccccacccaaatacaagtcccagtggaaaggaaaggtagtacctattcttctccatggggttcctaacaccctccattactctttcagtctccaagcactttgaatccatttttaaacattcaggttgccagacctgtcacacagtggactctgatagggttacggagggggcctggctctcagtctctactctcctatgtcccatcagttggttggaggccaccttccagggggtatgggagacaggttttggtttttaagtgtcttttttttttttcttggaccaatcagattccttcttccactttcagtgccttgagtgtcaagctttggatgaccgaccctatgtgggcggttgtgtggggagtgggtacttgtgagcctcggacacactgttaagtgttacagtgttaggagagagatgggtgaggggacctggagaggtaaggggcctggaaatggccctgacagagaacttgtgctgaccgggagaaggtggtgcggaagggcaccgcaggcattacacaggccatttctcctcctccatgtgcacgcacatccaacacacaccttccatgtgactgcttctcagccaccactttctgaccaaagagaacaggcgctccaaggagaacctgtacccctgccccagcctcgccttcctaaaaagcagtgtctggagttggctgtttcccgcctccccagctgcatgtccagcccagtgggagacagggcctctggtgcagttcccaaaatgttcctcgccctttctccgtggtcaccattcataattcatgttcgctttaatgagttacatgcttatcagccacaggccattaccacccttatggatgggtctggggggcgacattcctggccaaccccttgtaggaaggaccagataatacccaggaagcaagtagctctaattttaacttcacaggaagtctgtgcatcctccttcatttcagcagggaaaactcctgtggagtgggccctatctggggcatttacaggcttccagctgtattccatccctggaagctgatacctttctatagagtccttttatgagagctcagtgggaaggtctgtcaagaaattcaggttcttgtacagacaaattcatgcaaatttctattattttcacaaaaaccagaaaccatgggggaatccaaagacttgaagtctaaagatggtggcttttaaaacatgcatattccaaaaagaattcatttttgttttgggtttggctagattctcttatttatccccttttagcttaagtattagtttcattctactgaaatgatggagagagggcctaaggttactaggtaattgagctgatggtgcagggagaattgttgagaaaggaagcctagtttccagaagcctgacacagagctacttcactgtcctctactccttaacaaggtaactggagcctcttgggtgtcaaacaagcaccctggaaggcacagggaagcatcagcaaccaaggtagtctctgccctctgtaacttacgtgttggtgcatcagaatctgaattggaacctacctgatgggcccagtggaatagcttttctggggagtggaaggcgtccttgatcacagagctttgctgtcgaatcctggagtcctgcaacatggtgatgcctcagtagttggtgatcctgatcacctttggtggcttgttttagtggaaagagcaagggactaaaggtcaggagacccaggacccagtcctgaagctgcaaaggttagatctcggcctaactttctgttcattgcccccaatttgtctggcctgtaaaatgaagggggagggttgcataaacctaaaactattctggttttgttatacccatagggttgggggtagggatgggactgcccattgctggcaaggaactgggaacagtagcaagcatggtgagggctggagagctggctgggggggttctctcctgttcaaagaagctttcaccatgggcttcattatcttgtcagaagtgaattagtttccaccagggacccctttatcccaaacagcaacacaaaatacaccctaaacctcagagtaaaattgatgtggggctatcctttggctatcgggtcatctgtgctgctccccactcatttctgatgggtttgcaaaggtgccttttgccagggcaggacatagtatgcacatagggatattgttatgtgcctaggtttcaggcactccttctgtaggggaaaatgggaggagccttcctccaccctgatccttaggaacattcctctggcccagggacagcttgttcttctcaccaaacaggtgaagcctgcagtccaaggtgcctggagccagaggtcggggagtaagcacagctgcccctgcctgagaaggagcagcttgcaaggggagccggtggagggaaaggggtacaacagctttggaatacattctggatcttgaggaggatcttgtgattttggctgagccacggtcacttccctcgtgaaggacccgccctatatcctaaattctggatccctcaaagtccagccacagagtttgcatgaagcaaaaagcctagtaagtgagaaaggaaaggggccagggatgggagcagtgctgtgctgttatcactgtcttgcttggaatgaaaacatctgagcaccctgtcttcaagcggtacgctctccccttattccagcagggctactttcctcttcactctgatgaggggagctttatctgctttcaaaatggagcacgtcgcactggagtttcgtgccctctcgttaacctgtcaggagccacagggctccataaaacggaatcagtgtctcaatatacatgacctatgttcatagcaatgttcagccatttgggtttgaagaaaaccacattaaagccaagacccgtttggagcgaactgccttgttctttgctgtgtggaaggttctgtccctactgctgaactccagttcctccccaagcaccctggcctcagaaatcctggcttccccaagttagtgctgtctgacctgagccaggccactgcttggtgcctctacaggccactgtgcatgttgagaattgcccaaaaggattagtgaagctcctgaccctggcgaggccataatgaacactgaagtgcacaggccaagggatgtaattgaaaggcatttatttttgtgaagatgctgtaaaattagcatttaaatatcccattcccttctcttggcctcctcctatccccctatggtatttctcctcctctcctcaaggccaggctttttgtgaaaggcattggctcatctttgtcagcgtggtcctgacgttcacctctgggctgctggagaggactgagagatgtgtggtttggtaggaagggggtgtgtgtgggggttagtggggaatcccatttttttgcatcactgtgaggtagcttcaggccctgtccctggagaaataattgctgcgcagaagtcacaggccatactgggcagttctggtacaaacctgcccttattaataataacaataataataataactccatttgcatagaactgtcactcattcctgccagtctgctgtccctaccctggttttttgctggccccaaccactggccttgttgagtatcgatgggccctgagctcttctgtttgcttttggagctcttcagatgctgtcccccctgagaataccctaactctggggaaagagcagccaaaatcccaatacagtaaaactccacacaatcttgttagcaacagtgacccagaaaattttgagaagtccaatttcaccagaagaggcccagggctccctgtggtcacattttctacccagccattcttggcattgcaacctccatttctagctcctgttgaattttctccacccagaccccaaaaataaatggatccatgatgataattaagagaagagaaaaaaagatattatttttgttaggacaaaccattgtaggtttttagcaatgtgtatctgtgtgtccctcacaccttttcctattctacttttttttcctttttttaaaaatattatgtactatatttttagtctcaaacacactatatattatatatatttaatttttttatatatataaatataaatgttttaaaaagta

SEQ ID NO: 146597 - DNA, 7519 bp, Homo sapiens
  Payload ID: 9000
  Gene Symbol: KIRREL
  Gene Name: kin of IRRE like (Drosophila)
  ENST ID: ENST00000368173
  CDS Start-End: 405-2378
ggcgccgtcggagggagagtagacgtcaggcggagggagggaggcaggcaggcagggaggcagggagggagagagggaaggaagagaaggggagagaaagggggagcaaagaccgaaagagacccagagagatacagcttgagaggagaaataattaaagggggagggcgaccaggaggagaaaaaggtctgggaggaaagagagataaagagaatcggagggcagggaaatgagtttgtgcgcgtgagtgtgcgcgcgcgcgtgtgtgtgtgcaggggcgggcgcgggcgggcggggggcgggctcccgggctcccgggctcccctcctccccagcccgctcctctggctcgctcgccaactccgggccccagccgcgggcgggcgcacggcgggcggacagcatgctgagcctcctcgtctggatcctcactctctccgatactttctcccaagtccccccagaggacaccaggattgacggaggccctgtgattctactgcaggcaggcaccccccacaacctcacatgccgggccttcaatgcgaagcctgctgccaccatcatctggttccgggacgggacgcagcaggagggcgctgtggccagcacggaattgctgaaggatgggaagagggagaccaccgtgagccaactgcttattaaccccacggacctggacatagggcgtgtcttcacttgccgaagcatgaacgaagccatccctagtggcaaggagacttccatcgagctggatgtgcaccaccctcctacagtgaccctgtccattgagccacagacggtgcaggagggtgagcgtgttgtctttacctgccaggccacagccaaccccgagatcttgggctacaggtgggccaaagggggtttcttgattgaagacgcccacgagagtcgctatgagacaaatgtggattattcctttttcacggagcctgtgtcttgtgaggttcacaacaaagtgggaagcaccaatgtcagcactttagtaaatgtccactttgctccccggattgtagttgaccccaaacccacaaccacagacattggctctgatgtgacccttacctgtgtctgggttgggaatccccccctcactctcacctggaccaaaaaggactcaaatatggtcctgagtaacagcaaccagctgctgctgaagtcggtgactcaggcagacgctggcacctacacctgccgggccatcgtgcctcgaatcggagtggctgagcgggaggtgccgctctatgtgaacgggccccccatcatctccagtgaggcagtgcagtatgctgtgaggggtgacggtggcaaggtggagtgtttcattgggagcacaccacccccagaccgcatagcatgggcctggaaggagaacttcttggaggtggggaccctggaacgctatacagtggagaggaccaactcaggcagtggggtgctatccacgctcaccatcaacaatgtcatggaggccgactttcagactcactacaactgcaccgcctggaacagcttcgggccaggcacagccatcatccagctggaagagcgagaggtgttacctgtgggcatcatagctggggccaccatcggcgcgagcatcctgctcatcttcttcttcatcgccttggtattcttcctctaccggcgccgcaaaggcagtcgcaaagacgtgaccctgaggaagctggatatcaaggtggagacagtgaaccgagagccacttacgatgcattctgaccgggaggatgacaccgccagcgtctccacagcaacccgggtcatgaaggccatctactcgtcgtttaaggatgatgtggatctgaagcaggacctgcgctgcgacaccatcgacacccgggaggagtatgagatgaaggaccccaccaatggctactacaacgtgcgtgcccatgaagaccgcccgtcttccagggcagtgctctatgctgactaccgtgcccctggccctgcccgcttcgacggccgcccctcatcccgtctctcccactccagcggctatgcccagctcaacacctatagccggggccctgcctctgactatggccctgagcccacaccccctggccctgctgccccagctggcactgacacaaccagccagctgtcctacgagaactatgagaagttcaactcccatcccttccctggggcagctgggtaccccacctaccgactgggctacccccaggccccaccctctggcctggagcggaccccatatgaggcgtatgaccccattggcaagtacgccacagccactcgattctcctacacctcccagcactcggactacggccagcgattccagcagcgcatgcagactcacgtgtaggggccagagcctggctggggcatctctgcggggcagaggagaaggctttcacagctgttccctgatattcaggggcattgctcattgctcccttctcggaccagccttcttcctcccaccatggcaggtggggagcaggtctcccagaaacaccccgtcccgaggatggtgctctgtgcatgccccagcctcctgggcctgcccttccctcttcttcgggaggatgtgtctcttctgacctgcactcttgcctgaccctagaatggggacagggaaagtgaaggttagggaaagcagaggggggcactttttagcattccctttctatcccacccctctgatctcccataagtggaaatgggggtacccagggatgggcaggctttggcctagggacatgaagtatgggagtgggtggctgtggcacagacaggtggaaaacgggatagcctggccagtccctctgttgtctgcattcgtgccctgggtgcctctctccttcctcagggtactgcagaagggagcgaacagggtactgttcgctcttgtctacagaacagccctggcactgcattcaaatccagtcttcattcagctgggatcaaaatgccagtcaccttggctacccactgtggacagctgtctgtcagcatgcagagggatccaggaatccccccggcagcacggcccgctttccttctcctccatgctgggccagccagataagtcagggtcctggtggagaaagaaaggctaggaccatgtcctcattgacccagatactgctgtgtgctgcacagcagtgaaccaacactagagggagccacacaagcctcctctccccagtctgccccacttcctggctttaactcttgagctggtttggggagtggtgaggtaggggtgggggtgctgtaggctctttttcaaagaaaacaaaaaacaatgaaaacctcatttgggaagaaaagctgtagggattcccccacccaaatacaagtcccagtggaaaggaaaggtagtacctattcttctccatggggttcctaacaccctccattactctttcagtctccaagcactttgaatccatttttaaacattcaggttgccagacctgtcacacagtggactctgatagggttacggagggggcctggctctcagtctctactctcctatgtcccatcagttggttggaggccaccttccagggggtatgggagacaggttttggtttttaagtgtcttttttttttttcttggaccaatcagattccttcttccactttcagtgccttgagtgtcaagctttggatgaccgaccctatgtgggcggttgtgtggggagtgggtacttgtgagcctcggacacactgttaagtgttacagtgttaggagagagatgggtgaggggacctggagaggtaaggggcctggaaatggccctgacagagaacttgtgctgaccgggagaaggtggtgcggaagggcaccgcaggcattacacaggccatttctcctcctccatgtgcacgcacatccaacacacaccttccatgtgactgcttctcagccaccactttctgaccaaagagaacaggcgctccaaggagaacctgtacccctgccccagcctcgccttcctaaaaagcagtgtctggagttggctgtttcccgcctccccagctgcatgtccagcccagtgggagacagggcctctggtgcagttcccaaaatgttcctcgccctttctccgtggtcaccattcataattcatgttcgctttaatgagttacatgcttatcagccacaggccattaccacccttatggatgggtctggggggcgacattcctggccaaccccttgtaggaaggaccagataatacccaggaagcaagtagctctaattttaacttcacaggaagtctgtgcatcctccttcatttcagcagggaaaactcctgtggagtgggccctatctggggcatttacaggcttccagctgtattccatccctggaagctgatacctttctatagagtccttttatgagagctcagtgggaaggtctgtcaagaaattcaggttcttgtacagacaaattcatgcaaatttctattattttcacaaaaaccagaaaccatgggggaatccaaagacttgaagtctaaagatggtggcttttaaaacatgcatattccaaaaagaattcatttttgttttgggtttggctagattctcttatttatccccttttagcttaagtattagtttcattctactgaaatgatggagagagggcctaaggttactaggtaattgagctgatggtgcagggagaattgttgagaaaggaagcctagtttccagaagcctgacacagagctacttcactgtcctctactccttaacaaggtaactggagcctcttgggtgtcaaacaagcaccctggaaggcacagggaagcatcagcaaccaaggtagtctctgccctctgtaacttacgtgttggtgcatcagaatctgaattggaacctacctgatgggcccagtggaatagcttttctggggagtggaaggcgtccttgatcacagagctttgctgtcgaatcctggagtcctgcaacatggtgatgcctcagtagttggtgatcctgatcacctttggtggcttgttttagtggaaagagcaagggactaaaggtcaggagacccaggacccagtcctgaagctgcaaaggttagatctcggcctaactttctgttcattgcccccaatttgtctggcctgtaaaatgaagggggagggttgcataaacctaaaactattctggttttgttatacccatagggttgggggtagggatgggactgcccattgctggcaaggaactgggaacagtagcaagcatggtgagggctggagagctggctgggggggttctctcctgttcaaagaagctttcaccatgggcttcattatcttgtcagaagtgaattagtttccaccagggacccctttatcccaaacagcaacacaaaatacaccctaaacctcagagtaaaattgatgtggggctatcctttggctatcgggtcatctgtgctgctccccactcatttctgatgggtttgcaaaggtgccttttgccagggcaggacatagtatgcacatagggatattgttatgtgcctaggtttcaggcactccttctgtaggggaaaatgggaggagccttcctccaccctgatccttaggaacattcctctggcccagggacagcttgttcttctcaccaaacaggtgaagcctgcagtccaaggtgcctggagccagaggtcggggagtaagcacagctgcccctgcctgagaaggagcagcttgcaaggggagccggtggagggaaaggggtacaacagctttggaatacattctggatcttgaggaggatcttgtgattttggctgagccacggtcacttccctcgtgaaggacccgccctatatcctaaattctggatccctcaaagtccagccacagagtttgcatgaagcaaaaagcctagtaagtgagaaaggaaaggggccagggatgggagcagtgctgtgctgttatcactgtcttgcttggaatgaaaacatctgagcaccctgtcttcaagcggtacgctctccccttattccagcagggctactttcctcttcactctgatgaggggagctttatctgctttcaaaatggagcacgtcgcactggagtttcgtgccctctcgttaacctgtcaggagccacagggctccataaaacggaatcagtgtctcaatatacatgacctatgttcatagcaatgttcagccatttgggtttgaagaaaaccacattaaagccaagacccgtttggagcgaactgccttgttctttgctgtgtggaaggttctgtccctactgctgaactccagttcctccccaagcaccctggcctcagaaatcctggcttccccaagttagtgctgtctgacctgagccaggccactgcttggtgcctctacaggccactgtgcatgttgagaattgcccaaaaggattagtgaagctcctgaccctggcgaggccataatgaacactgaagtgcacaggccaagggatgtaattgaaaggcatttatttttgtgaagatgctgtaaaattagcatttaaatatcccattcccttctcttggcctcctcctatccccctatggtatttctcctcctctcctcaaggccaggctttttgtgaaaggcattggctcatctttgtcagcgtggtcctgacgttcacctctgggctgctggagaggactgagagatgtgtggtttggtaggaagggggtgtgtgtgggggttagtggggaatcccatttttttgcatcactgtgaggtagcttcaggccctgtccctggagaaataattgctgcgcagaagtcacaggccatactgggcagttctggtacaaacctgcccttattaataataacaataataataataactccatttgcatagaactgtcactcattcctgccagtctgctgtccctaccctggttttttgctggccccaaccactggccttgttgagtatcgatgggccctgagctcttctgtttgcttttggagctcttcagatgctgtcccccctgagaataccctaactctggggaaagagcagccaaaatcccaatacagtaaaactccacacaatcttgttagcaacagtgacccagaaaattttgagaagtccaatttcaccagaagaggcccagggctccctgtggtcacattttctacccagccattcttggcattgcaacctccatttctagctcctgttgaattttctccacccagaccccaaaaataaatggatccatgatgataattaagagaagagaaaaaaagatattatttttgttaggacaaaccattgtaggtttttagcaatgtgtatctgtgtgtccctcacaccttttcctattctacttttttttcctttttttaaaaatattatgtactatatttttagtctcaaacacactatatattatatatatttaatttttttatatatataaatataaatgttttaaaaagt

SEQ ID NO: 146598 - DNA, 1969 bp, Homo sapiens
  Payload ID: 9001
  Gene Symbol: KIRREL2
  Gene Name: kin of IRRE like 2 (Drosophila)
  ENST ID: ENST00000262625
  CDS Start-End: 15-1916
accttgggggacgaatgctcaggatgcgggtccccgccctcctcgtcctcctcttctgcttcagagggagagcaggcccgtcgccccatttcctgcaacagccagaggacctggtggtgctgctgggggaggaagcccggctgccgtgtgctctgggcgcctactgggggctagttcagtggactaagagtgggctggccctagggggccaaagggacctaccagggtggtcccggtactggatatcagggaatgcagccaatggccagcatgacctccacattaggcccgtggagctagaggatgaagcatcatatgaatgtcaggctacacaagcaggcctccgctccagaccagcccaactgcacgtgctggtccccccagaagccccccaggtgctgggcggcccctctgtgtctctggttgctggagttcctgcgaacctgacatgtcggagccgtggggatgcccgccctacccctgaattgctgtggttccgagatggggtcctgttggatggagccaccttccatcagaccctgctgaaggaagggacccctgggtcagtggagagcaccttaaccctgacccctttcagccatgatgatggagccacctttgtctgccgggcccggagccaggccctgcccacaggaagagacacagctatcacactgagcctgcagtaccccccagaggtgactctgtctgcttcgccacacactgtgcaggagggagagaaggtcattttcctgtgccaggccacagcccagcctcctgtcacaggctacaggtgggcaaaagggggctctccggtgctcggggcccgcgggccaaggttagaggtcgtggcagacgcctcgttcctgactgagcccgtgtcctgcgaggtcagcaacgccgtgggtagcgccaaccgcagtactgcgctggatgtgctgtttgggccgattctgcaggcaaagccggagcccgtgtccgtggacgtgggggaagacgcttccttcagctgcgcctggcgcgggaacccgcttccacgggtaacctggacccgccgcggtggcgcgcaggtgctgggctctggagccacactgcgtcttccgtcggtggggcccgaggacgcaggcgactatgtgtgcagagctgaggctgggctatcgggcctgcggggcggcgccgcggaggctcggctgactgtgaacgctcccccagtagtgaccgccctgcactctgcgcctgccttcctgaggggccctgctcgcctccagtgtctggttttcgcctctcccgccccagatgccgtggtctggtcttgggatgagggcttcctggaggcggggtcgcagggccggttcctggtggagacattccctgccccagagagccgcgggggactgggtccgggcctgatctctgtgctacacatttcggggacccaggagtctgactttagcaggagctttaactgcagtgcccggaaccggctgggcgagggaggtgcccaggccagcctgggccgtagagacttgctgcccactgtgcggatagtggccggagtggccgctgccaccacaactctccttatggtcatcactggggtggccctctgctgctggcgccacagcaaggcctcagcctctttctccgagcaaaagaacctgatgcgaatccctggcagcagcgacggctccagttcacgaggtcctgaagaagaggagacaggcagccgcgaggaccggggccccattgtgcacactgaccacagtgatctggttctggaggaggaagggactctggagaccaaggacccaaccaacggttactacaaggtccgaggagtcagtccacccgcgtctccagactcacgtgtgacatctttccaatggaagagtcctgggatctccaacttgccataatggattgttctgatttctgaggagccaggacaagttggcgaccttactcctcc

SEQ ID NO: 146599 - DNA, 2015 bp, Homo sapiens
  Payload ID: 9001
  Gene Symbol: KIRREL2
  Gene Name: kin of IRRE like 2 (Drosophila)
  ENST ID: ENST00000347900
  CDS Start-End: 211-1962
cagagacccaggccgcggaactggcaggcgtttcagagcgtcagaggctgcggatgagcagacttggaggactccaggccagagactaggctgggcgaagagtcgagcgtgaagggggctccgggccagggtgacaggaggcgtgcttgagaggaagaagttgacgggaaggccagtgcgacggcaaatctcgtgaaccttgggggacgaatgctcaggatgcgggtccccgccctcctcgtcctcctcttctgcttcagagggagagcagggtggtcccggtactggatatcagggaatgcagccaatggccagcatgacctccacattaggcccgtggagctagaggatgaagcatcatatgaatgtcaggctacacaagcaggcctccgctccagaccagcccaactgcacgtgctggtccccccagaagccccccaggtgctgggcggcccctctgtgtctctggttgctggagttcctgcgaacctgacatgtcggagccgtggggatgcccgccctacccctgaattgctgtggttccgagatggggtcctgttggatggagccaccttccatcagaccctgctgaaggaagggacccctgggtcagtggagagcaccttaaccctgacccctttcagccatgatgatggagccacctttgtctgccgggcccggagccaggccctgcccacaggaagagacacagctatcacactgagcctgcagtaccccccagaggtgactctgtctgcttcgccacacactgtgcaggagggagagaaggtcattttcctgtgccaggccacagcccagcctcctgtcacaggctacaggtgggcaaaagggggctctccggtgctcggggcccgcgggccaaggttagaggtcgtggcagacgcctcgttcctgactgagcccgtgtcctgcgaggtcagcaacgccgtgggtagcgccaaccgcagtactgcgctggatgtgctgtttgggccgattctgcaggcaaagccggagcccgtgtccgtggacgtgggggaagacgcttccttcagctgcgcctggcgcgggaacccgcttccacgggtaacctggacccgccgcggtggcgcgcaggtgctgggctctggagccacactgcgtcttccgtcggtggggcccgaggacgcaggcgactatgtgtgcagagctgaggctgggctatcgggcctgcggggcggcgccgcggaggctcggctgactgtgaacgctcccccagtagtgaccgccctgcactctgcgcctgccttcctgaggggccctgctcgcctccagtgtctggttttcgcctctcccgccccagatgccgtggtctggtcttgggatgagggcttcctggaggcggggtcgcagggccggttcctggtggagacattccctgccccagagagccgcgggggactgggtccgggcctgatctctgtgctacacatttcggggacccaggagtctgactttagcaggagctttaactgcagtgcccggaaccggctgggcgagggaggtgcccaggccagcctgggccgtagagacttgctgcccactgtgcggatagtggccggagtggccgctgccaccacaactctccttatggtcatcactggggtggccctctgctgctggcgccacagcaaggcctcagcctctttctccgagcaaaagaacctgatgcgaatccctggcagcagcgacggctccagttcacgaggtcctgaagaagaggagacaggcagccgcgaggaccggggccccattgtgcacactgaccacagtgatctggttctggaggaggaagggactctggagaccaaggacccaaccaacggttactacaaggtccgaggagtcagtccacccgcgtctccagactcacgtgtgacatctttccaatggaagagtcctgggatctccaacttgccataatggattgttctgatttctgaggagccaggacaagttggcgaccttactcctcc

SEQ ID NO: 146600 - DNA, 2942 bp, Homo sapiens
  Payload ID: 9001
  Gene Symbol: KIRREL2
  Gene Name: kin of IRRE like 2 (Drosophila)
  Uniprot ID: Q6UWL6
  ENST ID: ENST00000360202
  CDS Start-End: 199-2325
ccgcggaactggcaggcgtttcagagcgtcagaggctgcggatgagcagacttggaggactccaggccagagactaggctgggcgaagagtcgagcgtgaagggggctccgggccagggtgacaggaggcgtgcttgagaggaagaagttgacgggaaggccagtgcgacggcaaatctcgtgaaccttgggggacgaatgctcaggatgcgggtccccgccctcctcgtcctcctcttctgcttcagagggagagcaggcccgtcgccccatttcctgcaacagccagaggacctggtggtgctgctgggggaggaagcccggctgccgtgtgctctgggcgcctactgggggctagttcagtggactaagagtgggctggccctagggggccaaagggacctaccagggtggtcccggtactggatatcagggaatgcagccaatggccagcatgacctccacattaggcccgtggagctagaggatgaagcatcatatgaatgtcaggctacacaagcaggcctccgctccagaccagcccaactgcacgtgctggtccccccagaagccccccaggtgctgggcggcccctctgtgtctctggttgctggagttcctgcgaacctgacatgtcggagccgtggggatgcccgccctacccctgaattgctgtggttccgagatggggtcctgttggatggagccaccttccatcagaccctgctgaaggaagggacccctgggtcagtggagagcaccttaaccctgacccctttcagccatgatgatggagccacctttgtctgccgggcccggagccaggccctgcccacaggaagagacacagctatcacactgagcctgcagtaccccccagaggtgactctgtctgcttcgccacacactgtgcaggagggagagaaggtcattttcctgtgccaggccacagcccagcctcctgtcacaggctacaggtgggcaaaagggggctctccggtgctcggggcccgcgggccaaggttagaggtcgtggcagacgcctcgttcctgactgagcccgtgtcctgcgaggtcagcaacgccgtgggtagcgccaaccgcagtactgcgctggatgtgctgtttgggccgattctgcaggcaaagccggagcccgtgtccgtggacgtgggggaagacgcttccttcagctgcgcctggcgcgggaacccgcttccacgggtaacctggacccgccgcggtggcgcgcaggtgctgggctctggagccacactgcgtcttccgtcggtggggcccgaggacgcaggcgactatgtgtgcagagctgaggctgggctatcgggcctgcggggcggcgccgcggaggctcggctgactgtgaacgctcccccagtagtgaccgccctgcactctgcgcctgccttcctgaggggccctgctcgcctccagtgtctggttttcgcctctcccgccccagatgccgtggtctggtcttgggatgagggcttcctggaggcggggtcgcagggccggttcctggtggagacattccctgccccagagagccgcgggggactgggtccgggcctgatctctgtgctacacatttcggggacccaggagtctgactttagcaggagctttaactgcagtgcccggaaccggctgggcgagggaggtgcccaggccagcctgggccgtagagacttgctgcccactgtgcggatagtggccggagtggccgctgccaccacaactctccttatggtcatcactggggtggccctctgctgctggcgccacagcaaggcctcagcctctttctccgagcaaaagaacctgatgcgaatccctggcagcagcgacggctccagttcacgaggtcctgaagaagaggagacaggcagccgcgaggaccggggccccattgtgcacactgaccacagtgatctggttctggaggaggaagggactctggagaccaaggacccaaccaacggttactacaaggtccgaggagtcagtgtgagcctgagccttggcgaagcccctggaggaggtctcttcctgccaccaccctccccccttgggcccccagggacccctaccttctatgacttcaacccacacctgggcatggtccccccctgcagactttacagagccagggcaggctatctcaccacaccccaccctcgagctttcaccagctacatcaaacccacatcctttgggcccccagatctggcccccgggactccccccttcccatatgctgccttccccacacctagccacccgcgtctccagactcacgtgtgacatctttccaatggaagagtcctgggatctccaacttgccataatggattgttctgatttctgaggagccaggacaagttggcgaccttactcctccaaaactgaacacaaggggagggaaagatcattacatttgtcaggagcatttgtatacagtcagctcagccaaaggagatgccccaagtgggagcaacatggccacccaatatgcccacctattccccggtgtaaaagagattcaagatggcaggtaggccctttgaggagagatggggacagggcagtgggtgttgggagtttggggccgggatggaagttgtttctagccactgaaagaagatatttcaagatgaccatctgcattgagaggaaaggtagcataggatagatgaagatgaagagcataccaggccccaccctggctctccctgaggggaactttgctcggccaatggaaatgcagccaagatggccatatactccctaggaacccaagatggccaccatcttgattttactttccttaaagactcagaaagacttggacccaaggagtggggatacagtgagaattaccactgttggggcaaaatattgggataaaaatatttatgttt

SEQ ID NO: 146601 - DNA, 2563 bp, Homo sapiens
  Payload ID: 9001
  Gene Symbol: KIRREL2
  Gene Name: kin of IRRE like 2 (Drosophila)
  ENST ID: ENST00000592409
  CDS Start-End: 534-2555
cactgagcgcagtccctctaggacctgggctgagcaagtttcttccactctctcccttccctcctcctcaccccttgcctgcccctcaaccccggcagggcgcaggtgtccaacccagccgggaccccctccctcctcgaacccaggtgttccggctcccagaccccaattgagctgggggcgcccacccgccgggggatcccgccctgcgtcccccattcatccgcgtctcagccgcgggagtttctcaacgggaagagggcggagctcccggggggcggacccgggcggggcgagcgggatcgggccctcttggggtctcccagagacccaggccgcggaactggcaggcgtttcagagcgtcagaggctgcggatgagcagacttggaggactccaggccagagactaggctgggcgaagagtcgagcgtgaagggggctccgggccagggtgacaggaggcgtgcttgagaggaagaagttgacgggaaggccagtgcgacggcaaatctcgtgaaccttgggggacgaatgctcaggatgcgggtccccgccctcctcgtcctcctcttctgcttcagagggagagcaggcccgtcgccccatttcctgcaacagccagaggacctggtggtgctgctgggggaggaagcccggctgccgtgtgctctgggcgcctactgggggctagttcagtggactaagagtgggctggccctagggggccaaagggacctaccagggtggtcccggtactggatatcagggaatgcagccaatggccagcatgacctccacattaggcccgtggagctagaggatgaagcatcatatgaatgtcaggctacacaagcaggcctccgctccagaccagcccaactgcacgtgctggtccccccagaagccccccaggtgctgggcggcccctctgtgtctctggttgctggagttcctgcgaacctgacatgtcggagccgtggggatgcccgccctacccctgaattgctgtggttccgagatggggtcctgttggatggagccaccttccatcagaccctgctgaaggaagggacccctgggtcagtggagagcaccttaaccctgacccctttcagccatgatgatggagccacctttgtctgccgggcccggagccaggccctgcccacaggaagagacacagctatcacactgagcctgcagtaccccccagaggtgactctgtctgcttcgccacacactgtgcaggagggagagaaggtcattttcctgtgccaggccacagcccagcctcctgtcacaggctacaggtgggcaaaagggggctctccggtgctcggggcccgcgggccaaggttagaggtcgtggcagacgcctcgttcctgactgagcccgtgtcctgcgaggtcagcaacgccgtgggtagcgccaaccgcagtactgcgctggatgtgctgtttgggccgattctgcaggcaaagccggagcccgtgtccgtggacgtgggggaagacgcttccttcagctgcgcctggcgcgggaacccgcttccacgggtaacctggacccgccgcggtggcgcgcaggtgctgggctctggagccacactgcgtcttccgtcggtggggcccgaggacgcaggcgactatgtgtgcagagctgaggctgggctatcgggcctgcggggcggcgccgcggaggctcggctgactgtgaacgctcccccagtagtgaccgccctgcactctgcgcctgccttcctgaggggccctgctcgcctccagtgtctggttttcgcctctcccgccccagatgccgtggtctggtcttgggatgagggcttcctggaggcggggtcgcagggccggttcctggtggagacattccctgccccagagagccgcgggggactgggtccgggcctgatctctgtgctacacatttcggggacccaggagtctgactttagcaggagctttaactgcagtgcccggaaccggctgggcgagggaggtgcccaggccagcctgggccgtagagcctcagcctctttctccgagcaaaagaacctgatgcgaatccctggcagcagcgacggctccagttcacgaggtcctgaagaagaggagacaggcagccgcgaggaccggggccccattgtgcacactgaccacagtgatctggttctggaggaggaagggactctggagaccaaggacccaaccaacggttactacaaggtccgaggagtcagtgtgagcctgagccttggcgaagcccctggaggaggtctcttcctgccaccaccctccccccttgggcccccagggacccctaccttctatgacttcaacccacacctgggcatggtccccccctgcagactttacagagccagggcaggctatctcaccacaccccaccctcgagctttcaccagctacatcaaacccacatcctttgggcccccagatctggcccccgggactccccccttcccatatgctgccttccccacacctagccacccgcgtctccagactcacgtgtgacatctttc

SEQ ID NO: 146602 - DNA, 767 bp, Homo sapiens
  Payload ID: 9001
  Gene Symbol: KIRREL2
  Gene Name: kin of IRRE like 2 (Drosophila)
  ENST ID: ENST00000586102
  CDS Start-End: 195-767
tgcacttgagtgcaccttgagtctccagcctctcaaggaaccgggagatcaggccatcagcgtctcagccagcaaaggcctgaaccaccagtcccttataaccctgcgtttcagagcgtcagaggcgtgcttgagaggaagaagttgacgggaaggccagtgcgacggcaaatctcgtgaaccttgggggacgaatgctcaggatgcgggtccccgccctcctcgtcctcctcttctgcttcagagggagagcaggcccgtcgccccatttcctgcaacagccagaggacctggtggtgctgctgggggaggaagcccggctgccgtgtgctctgggcgcctactgggggctagttcagtggactaagagtgggctggccctagggggccaaagggacctaccagggtggtcccggtactggatatcagggaatgcagccaatggccagcatgacctccacattaggcccgtggagctagaggatgaagcatcatatgaatgtcaggctacacaagcaggcctccgctccagaccagcccaactgcacgtgctggtccccccagaagccccccaggtgctgggcggcccctctgtgtctctggttgctggagttcctgcgaacctgacatgtcggagccgtggggatgcccgccctacccctgaattgctgtggttccgagatggggtcctgttggatggagccaccttccatcagaccctgctgaaggaagggacccctgggtcagtggagagcaccttaaccctg

SEQ ID NO: 146603 - DNA, 3508 bp, Homo sapiens
  Payload ID: 9002
  Gene Symbol: KIRREL3
  Gene Name: kin of IRRE like 3 (Drosophila)
  ENST ID: ENST00000416561
  CDS Start-End: 74-2287
tccagagctgggcctccagaagagaggatgctgtctggtgctgggctacatggccaaggacaagtttcggagaatgaatgaaggccaagtctattccttcagccagcagccccaggaccaggtggtggtgtcgggacagccagtgacgctactttgcgccatccccgaatacgatggcttcgttctgtggatcaaggacggcttggctctgggtgtgggcagggacctctcaagttacccacagtacctggtggtagggaaccacctgtcaggggagcaccacctgaagatcctgagggcagagctgcaagacgatgcggtgtacgagtgccaggccatccaggccgccatccgctcccgccccgcacgcctcacagtcctggtgccgcctgatgaccccgtcatcctggggggccctgtgatcagcctgcgtgcgggggaccctctcaacctcacctgccacgcagacaatgccaagcctgcagcctccatcatctggttgcgaaagggagaggtcatcaatggggccacctactccaagaccctgcttcgggacggcaagcgggagagcatcgtcagcaccctcttcatctcccctggtgacgtggagaatggccagagcatcgtgtgtcgtgccaccaacaaagccatccccggaggaaaggagacgtcggtcaccattgacatccagcaccctccactggtcaacctctcggtggagccacagccagtgctggaggacaacgtcgtcactttccactgctctgcaaaggccaacccagctgtcacccagtacaggtgggccaagcggggccagatcatcaaggaggcatctggagaggtgtacaggaccacagtggactacacgtacttctcagagcccgtctcctgtgaggtgaccaacgccctgggcagcaccaacctcagccgcacggttgacgtctactttgggccccggatgaccacagaaccccaatccttgctcgtggatctgggctctgatgccatcttcagctgcgcctggaccggcaacccatccctgaccatcgtctggatgaagcggggctccggagtggtcctgagcaatgagaagaccctgaccctcaaatccgtgcgccaggaggacgcgggcaagtacgtgtgccgggctgtggtgccccgtgtgggagccggggagagagaggtgaccctgaccgtcaatggaccccccatcatctccagcacccagacccagcacgccctccacggcgagaagggccagatcaagtgcttcatccggagcacgccgccgccggaccgcatcgcctggtcctggaaggagaacgttctggagtcgggcacatcggggcgctatacggtggagaccatcagcaccgaggagggcgtcatctccaccctgaccatcagcaacatcgtgcgggccgacttccagaccatctacaactgcacggcctggaacagcttcggctccgacactgagatcatccggctcaaggagcaaggttcggaaatgaagtcgggagccgggctggaagcagagtctgtgccgatggccgtcatcattggggtggccgtaggagctggtgtggccttcctcgtccttatggcaaccatcgtggcgttctgctgtgcccgttcccagagaaatctcaaaggtgttgtgtcagccaaaaatgatatccgagtggaaattgtccacaaggaaccagcctctggtcgggagggtgaggagcactccaccatcaagcagctgatgatggaccggggtgaattccagcaagactcagtcctgaaacagctggaggtcctcaaagaagaggagaaagagtttcagaacctgaaggaccccaccaatggctactacagcgtcaacaccttcaaagagcaccactcaaccccgaccatctccctctccagctgccagcccgacctgcgtcctgcgggcaagcagcgtgtgcccacaggcatgtccttcaccaacatctacagcaccctgagcggccagggccgcctctacgactacgggcagcggtttgtgctgggcatgggcagctcgtccatcgagctttgtgagcgggagttccagagaggctccctcagcgacagcagctccttcctggacacgcagtgtgacagcagcgtcagcagcagcggcaagcaggatggctatgtgcagttcgacaaggccagcaaggcttctgcttcctcctcccaccactcccagtcctcgtcccagaactctgaccccagtcgacccctgcagcggcggatgcagactcacgtctaaggatcacacaccgcgggtggggacgggccagggaagaggtcagggcacgttctggttgtccagggacgaggggtactttgcagaggacaccagaattggccacttccaggacagcctcccagcgcctctgccactgccttccttcgaagctctgatcaagcacaaatctgggtccccaggtgctgtgtgccagaggtgggcgggtggggagacagacagaggctgcggctgagtgcgctgtgcttagtgctggacacccgtgtccccggccctttcctggaggcccctctaccacctgctctgcccacaggcacaagtggcagctataactctgctttcatgaaactgcggtccactctctggtctctctgtgggctctacccctcgctgaccagaagctctacctacccctgtgcctgtgctcccatacagccctggggagaaggggatgacgtcttcccagcactgagctgccccagaaaccccggctccccactgctgctcatagcccataccctggaggctgacaagccagaaatggccttggctaaaggagcctctctctcaccaggctggccgggagcccacccccaatttgtttggtgttttgtgtccatactcttgcagttctgtccttggacttgatgccgctgaactctgcggtgggaccggtccggtcagagcctggtgtactggggggagggagggaggagggagcctgtgctgacggagcacctcgccgggtgtgcccctcctgggctgtgtgaccccagcctccccacccacctcctgctttgtgtactcctcccctccccctcagcacaatcggagttcatataagaagtgcgggagcttctctggtcagggttctctgaacacttatggagagagtgcttcctgggaagtgtggcgtttgaaggggctggagggcaggtctttaagatggcgagactgcccttctcagctgataaacacaagaacggcgatcctgtcttcagtaaggctccacgagaagagaggaagtatatctacacctcaaccctcctagtcaccacctgaaataaatgttagggacactactccaacatgtttgttctgttcttttgttcctacaaagccacaggaagaacccaagagctcatagaatgcgttgggaacccaaggttctctgccctcctttgattcaatcttcctagacaataaaggcagttgatagctctg

SEQ ID NO: 146604 - DNA, 3397 bp, Homo sapiens
  Payload ID: 9002
  Gene Symbol: KIRREL3
  Gene Name: kin of IRRE like 3 (Drosophila)
  ENST ID: ENST00000529097
  CDS Start-End: 12-2312
tgcgctaaggaatgaaacccttccagctcgatctgctcttcgtctgcttcttcctcttcagtcaagagctgggcctccagaagagaggatgctgtctggtgctgggctacatggccaaggacaagtttcggagaatgaatgaaggccaagtctattccttcagccagcagccccaggaccaggtggtggtgtcgggacagccagtgacgctactttgcgccatccccgaatacgatggcttcgttctgtggatcaaggacggcttggctctgggtgtgggcagggacctctcaagttacccacagtacctggtggtagggaaccacctgtcaggggagcaccacctgaagatcctgagggcagagctgcaagacgatgcggtgtacgagtgccaggccatccaggccgccatccgctcccgccccgcacgcctcacagtcctggtgccgcctgatgaccccgtcatcctggggggccctgtgatcagcctgcgtgcgggggaccctctcaacctcacctgccacgcagacaatgccaagcctgcagcctccatcatctggttgcgaaagggagaggtcatcaatggggccacctactccaagaccctgcttcgggacggcaagcgggagagcatcgtcagcaccctcttcatctcccctggtgacgtggagaatggccagagcatcgtgtgtcgtgccaccaacaaagccatccccggaggaaaggagacgtcggtcaccattgacatccagcaccctccactggtcaacctctcggtggagccacagccagtgctggaggacaacgtcgtcactttccactgctctgcaaaggccaacccagctgtcacccagtacaggtgggccaagcggggccagatcatcaaggaggcatctggagaggtgtacaggaccacagtggactacacgtacttctcagagcccgtctcctgtgaggtgaccaacgccctgggcagcaccaacctcagccgcacggttgacgtctactttgggccccggatgaccacagaaccccaatccttgctcgtggatctgggctctgatgccatcttcagctgcgcctggaccggcaacccatccctgaccatcgtctggatgaagcggggctccggagtggtcctgagcaatgagaagaccctgaccctcaaatccgtgcgccaggaggacgcgggcaagtacgtgtgccgggctgtggtgccccgtgtgggagccggggagagagaggtgaccctgaccgtcaatggaccccccatcatctccagcacccagacccagcacgccctccacggcgagaagggccagatcaagtgcttcatccggagcacgccgccgccggaccgcatcgcctggtcctggaaggagaacgttctggagtcgggcacatcggggcgctatacggtggagaccatcagcaccgaggagggcgtcatctccaccctgaccatcagcaacatcgtgcgggccgacttccagaccatctacaactgcacggcctggaacagcttcggctccgacactgagatcatccggctcaaggagcaagagtctgtgccgatggccgtcatcattggggtggccgtaggagctggtgtggccttcctcgtccttatggcaaccatcgtggcgttctgctgtgcccgttcccagagaaatctcaaaggtgttgtgtcagccaaaaatgatatccgagtggaaattgtccacaaggaaccagcctctggtcgggagggtgaggagcactccaccatcaagcagctgatgatggaccggggtgaattccagcaagactcagtcctgaaacagctggaggtcctcaaagaagaggagaaagagtttcagaacctgaaggaccccaccaatggctactacagcgtcaacaccttcaaagagcaccactcaaccccgaccatctccctctccagctgccagcccgacctgcgtcctgcgggcaagcagcgtgtgcccacaggcatgtccttcaccaacatctacagcaccctgagcggccagggccgcctctacgactacgggcagcggtttgtgctgggcatgggcagctcgtccatcgagctttgtgagcgggagttccagagaggctccctcagcgacagcagctccttcctggacacgcagtgtgacagcagcgtcagcagcagcggcaagcaggatggctatgtgcagttcgacaaggccagcaaggcttctgcttcctcctcccaccactcccagtcctcgtcccagaactctgaccccagtcgacccctgcagcggcggatgcagactcacgtctaaggatcacacaccgcgggtggggacgggccagggaagaggtcagggcacgttctggttgtccagggacgaggggtactttgcagaggacaccagaattggccacttccaggacagcctcccagcgcctctgccactgccttccttcgaagctctgatcaagcacaaatctgggtccccaggtgctgtgtgccagaggtgggcgggtggggagacagacagaggctgcggctgagtgcgctgtgcttagtgctggacacccgtgtccccggccctttcctggaggcccctctaccacctgctctgcccacaggcacaagtggcagctataactctgctttcatgaaactgcggtccactctctggtctctctgtgggctctacccctcgctgaccagaagctctacctacccctgtgcctgtgctcccatacagccctggggagaaggggatgacgtcttcccagcactgagctgccccagaaaccccggctccccactgctgctcatagcccataccctggaggctgacaagccagaaatggccttggctaaaggagcctctctctcaccaggctggccgggagcccacccccaatttgtttggtgttttgtgtccatactcttgcagttctgtccttggacttgatgccgctgaactctgcggtgggaccggtccggtcagagcctggtgtactggggggagggagggaggagggagcctgtgctgacggagcacctcgccgggtgtgcccctcctgggctgtgtgaccccagcctccccacccacctcctgctttgtgtactcctcccctccccctcagcacaatcggagttcatataagaagtgcgggagcttctctggtcagggttctctgaacacttatggagagagtgcttcctgggaagtgtggcgtttgaaggggctggagggcaggtctttaagatggcgagactgcccttctcagctgataaacacaagaacggcgatcctgtcttcagtaaggctccacgagaagagaggaagtatatctacacctcaaccctcctagtcaccacctgaaataaatgttagggacactactccaa

SEQ ID NO: 146605 - DNA, 2474 bp, Homo sapiens
  Payload ID: 9002
  Gene Symbol: KIRREL3
  Gene Name: kin of IRRE like 3 (Drosophila)
  Uniprot ID: Q8IZU9
  ENST ID: ENST00000525704
  CDS Start-End: 302-2104
gcccgcctgaggaagccgtgtgcctgggatgccaagagccagagaatggatcttctccgagtggggacattgctgacaatcccggcttcccgaggcggctaagaacaggcagtttgtgtcggctggctgcagatacccagaggcacaaagagaccgaagccacccggagggacccacggacggacagatggtaggcgcgaacccgagaggaccggcggaggctgagcaccgagagccgccaaggaagagaaactaaccacagccaagttaccccgccggctttccttcgctgcgctaaggaatgaaacccttccagctcgatctgctcttcgtctgcttcttcctcttcagtcaagagctgggcctccagaagagaggatgctgtctggtgctgggctacatggccaaggacaagtttcggagaatgaatgaaggccaagtctattccttcagccagcagccccaggaccaggtggtggtgtcgggacagccagtgacgctactttgcgccatccccgaatacgatggcttcgttctgtggatcaaggacggcttggctctgggtgtgggcagggacctctcaagttacccacagtacctggtggtagggaaccacctgtcaggggagcaccacctgaagatcctgagggcagagctgcaagacgatgcggtgtacgagtgccaggccatccaggccgccatccgctcccgccccgcacgcctcacagtcctggtgccgcctgatgaccccgtcatcctggggggccctgtgatcagcctgcgtgcgggggaccctctcaacctcacctgccacgcagacaatgccaagcctgcagcctccatcatctggttgcgaaagggagaggtcatcaatggggccacctactccaagaccctgcttcgggacggcaagcgggagagcatcgtcagcaccctcttcatctcccctggtgacgtggagaatggccagagcatcgtgtgtcgtgccaccaacaaagccatccccggaggaaaggagacgtcggtcaccattgacatccagcaccctccactggtcaacctctcggtggagccacagccagtgctggaggacaacgtcgtcactttccactgctctgcaaaggccaacccagctgtcacccagtacaggtgggccaagcggggccagatcatcaaggaggcatctggagaggtgtacaggaccacagtggactacacgtacttctcagagcccgtctcctgtgaggtgaccaacgccctgggcagcaccaacctcagccgcacggttgacgtctactttgggccccggatgaccacagaaccccaatccttgctcgtggatctgggctctgatgccatcttcagctgcgcctggaccggcaacccatccctgaccatcgtctggatgaagcggggctccggagtggtcctgagcaatgagaagaccctgaccctcaaatccgtgcgccaggaggacgcgggcaagtacgtgtgccgggctgtggtgccccgtgtgggagccggggagagagaggtgaccctgaccgtcaatggaccccccatcatctccagcacccagacccagcacgccctccacggcgagaagggccagatcaagtgcttcatccggagcacgccgccgccggaccgcatcgcctggtcctggaaggagaacgttctggagtcgggcacatcggggcgctatacggtggagaccatcagcaccgaggagggcgtcatctccaccctgaccatcagcaacatcgtgcgggccgacttccagaccatctacaactgcacggcctggaacagcttcggctccgacactgagatcatccggctcaaggagcaaggttcggaaatgaagtcgggagccgggctggaagcagagtctgtgccgatggccgtcatcattggggtggccgtaggagctggtgtggccttcctcgtccttatggcaaccatcgtggcgttctgctgtgcccgttcccagagaagtacgggagggagatccgggatctcagggagggggacagagaaaaaggccaggcttaggctgccccggagagcaagtaagcaggagtgcaatgaacaggggtcctaacagtgctgtgagctcctggggcagggagtgggtctgatgcatcggtgtatgtgagcctgggcaacatggcgcctggcagagtgggcgctaggctgaggttgacctggactagactgaacttcatctgcagggcagccagcattttggattgaacacatagctctttcagtcaggaactgtacagaaagatagggggaaaagcggtttgtggtttgatccttgctctacaagagctgttagtctagagagaccccatctctacaacaaaataaaaataaagagctgctagtctcaccagaaaagcaggtcactcacacagctgtgggggagtgggtggggaagcaataaaggaattgctttgagaaaactt

SEQ ID NO: 146606 - DNA, 3808 bp, Homo sapiens
  Payload ID: 9002
  Gene Symbol: KIRREL3
  Gene Name: kin of IRRE like 3 (Drosophila)
  Uniprot ID: Q8IZU9
  ENST ID: ENST00000525144
  CDS Start-End: 251-2587
cttctccgagtggggacattgctgacaatcccggcttcccgaggcggctaagaacaggcagtttgtgtcggctggctgcagatacccagaggcacaaagagaccgaagccacccggagggacccacggacggacagatggtaggcgcgaacccgagaggaccggcggaggctgagcaccgagagccgccaaggaagagaaactaaccacagccaagttaccccgccggctttccttcgctgcgctaaggaatgaaacccttccagctcgatctgctcttcgtctgcttcttcctcttcagtcaagagctgggcctccagaagagaggatgctgtctggtgctgggctacatggccaaggacaagtttcggagaatgaatgaaggccaagtctattccttcagccagcagccccaggaccaggtggtggtgtcgggacagccagtgacgctactttgcgccatccccgaatacgatggcttcgttctgtggatcaaggacggcttggctctgggtgtgggcagggacctctcaagttacccacagtacctggtggtagggaaccacctgtcaggggagcaccacctgaagatcctgagggcagagctgcaagacgatgcggtgtacgagtgccaggccatccaggccgccatccgctcccgccccgcacgcctcacagtcctggtgccgcctgatgaccccgtcatcctggggggccctgtgatcagcctgcgtgcgggggaccctctcaacctcacctgccacgcagacaatgccaagcctgcagcctccatcatctggttgcgaaagggagaggtcatcaatggggccacctactccaagaccctgcttcgggacggcaagcgggagagcatcgtcagcaccctcttcatctcccctggtgacgtggagaatggccagagcatcgtgtgtcgtgccaccaacaaagccatccccggaggaaaggagacgtcggtcaccattgacatccagcaccctccactggtcaacctctcggtggagccacagccagtgctggaggacaacgtcgtcactttccactgctctgcaaaggccaacccagctgtcacccagtacaggtgggccaagcggggccagatcatcaaggaggcatctggagaggtgtacaggaccacagtggactacacgtacttctcagagcccgtctcctgtgaggtgaccaacgccctgggcagcaccaacctcagccgcacggttgacgtctactttgggccccggatgaccacagaaccccaatccttgctcgtggatctgggctctgatgccatcttcagctgcgcctggaccggcaacccatccctgaccatcgtctggatgaagcggggctccggagtggtcctgagcaatgagaagaccctgaccctcaaatccgtgcgccaggaggacgcgggcaagtacgtgtgccgggctgtggtgccccgtgtgggagccggggagagagaggtgaccctgaccgtcaatggaccccccatcatctccagcacccagacccagcacgccctccacggcgagaagggccagatcaagtgcttcatccggagcacgccgccgccggaccgcatcgcctggtcctggaaggagaacgttctggagtcgggcacatcggggcgctatacggtggagaccatcagcaccgaggagggcgtcatctccaccctgaccatcagcaacatcgtgcgggccgacttccagaccatctacaactgcacggcctggaacagcttcggctccgacactgagatcatccggctcaaggagcaaggttcggaaatgaagtcgggagccgggctggaagcagagtctgtgccgatggccgtcatcattggggtggccgtaggagctggtgtggccttcctcgtccttatggcaaccatcgtggcgttctgctgtgcccgttcccagagaaatctcaaaggtgttgtgtcagccaaaaatgatatccgagtggaaattgtccacaaggaaccagcctctggtcgggagggtgaggagcactccaccatcaagcagctgatgatggaccggggtgaattccagcaagactcagtcctgaaacagctggaggtcctcaaagaagaggagaaagagtttcagaacctgaaggaccccaccaatggctactacagcgtcaacaccttcaaagagcaccactcaaccccgaccatctccctctccagctgccagcccgacctgcgtcctgcgggcaagcagcgtgtgcccacaggcatgtccttcaccaacatctacagcaccctgagcggccagggccgcctctacgactacgggcagcggtttgtgctgggcatgggcagctcgtccatcgagctttgtgagcgggagttccagagaggctccctcagcgacagcagctccttcctggacacgcagtgtgacagcagcgtcagcagcagcggcaagcaggatggctatgtgcagttcgacaaggccagcaaggcttctgcttcctcctcccaccactcccagtcctcgtcccagaactctgaccccagtcgacccctgcagcggcggatgcagactcacgtctaaggatcacacaccgcgggtggggacgggccagggaagaggtcagggcacgttctggttgtccagggacgaggggtactttgcagaggacaccagaattggccacttccaggacagcctcccagcgcctctgccactgccttccttcgaagctctgatcaagcacaaatctgggtccccaggtgctgtgtgccagaggtgggcgggtggggagacagacagaggctgcggctgagtgcgctgtgcttagtgctggacacccgtgtccccggccctttcctggaggcccctctaccacctgctctgcccacaggcacaagtggcagctataactctgctttcatgaaactgcggtccactctctggtctctctgtgggctctacccctcgctgaccagaagctctacctacccctgtgcctgtgctcccatacagccctggggagaaggggatgacgtcttcccagcactgagctgccccagaaaccccggctccccactgctgctcatagcccataccctggaggctgacaagccagaaatggccttggctaaaggagcctctctctcaccaggctggccgggagcccacccccaatttgtttggtgttttgtgtccatactcttgcagttctgtccttggacttgatgccgctgaactctgcggtgggaccggtccggtcagagcctggtgtactggggggagggagggaggagggagcctgtgctgacggagcacctcgccgggtgtgcccctcctgggctgtgtgaccccagcctccccacccacctcctgctttgtgtactcctcccctccccctcagcacaatcggagttcatataagaagtgcgggagcttctctggtcagggttctctgaacacttatggagagagtgcttcctgggaagtgtggcgtttgaaggggctggagggcaggtctttaagatggcgagactgcccttctcagctgataaacacaagaacggcgatcctgtcttcagtaaggctccacgagaagagaggaagtatatctacacctcaaccctcctagtcaccacctgaaataaatgttagggacactactccaacatgtttgttctgttcttttgttcctacaaagccacaggaagaacccaagagctcatagaatgcgttgggaacccaaggttctctgccctcctttgattcaatcttcctagacaataaaggcagttgatagctctg

SEQ ID NO: 146607 - DNA, 6348 bp, Homo sapiens
  Payload ID: 9003
  Gene Symbol: KIN
  Gene Name: Kin17 DNA and RNA binding protein
  Uniprot ID: O60870
  ENST ID: ENST00000379562
  CDS Start-End: 49-1230
ggctggctgagtactggggtccagaaagtgatcgctgccgtggtcgccatggggaagtcggattttcttactcccaaggctatcgccaacaggatcaagtccaaggggctgcagaagctacgctggtattgccagatgtgccagaagcagtgccgggacgagaatggctttaagtgtcattgtatgtccgaatctcatcagagacaactattgctggcttcagaaaatcctcagcagtttatggattatttttcagaggaattccgaaatgactttctagaacttctcaggagacgctttggcactaaaagggtccacaacaacattgtctacaacgaatacatcagccaccgagagcacatccacatgaatgccactcagtgggaaactctgactgattttactaagtggctgggcagagaaggcttgtgcaaagtggacgagacaccaaaaggctggtatattcagtacatagacagggacccagaaactatccgccggcaactggaactggagaaaaagaaaaagcaggaccttgatgatgaagaaaaaactgccaaatttattgaagagcaagtgagaagaggcctggaagggaaggaacaggaggtccctacttttacggaattaagcagagaaaatgatgaagagaaagtcacgtttaatttgagtaaaggagcatgtagctcatccggagcaacatcttccaagtcaagtactctgggaccgagtgcactgaagacgataggaagttcagcatcagtgaaacgaaaagaatcttcccagagctcaactcagtctaaagaaaagaagaaaaagaaatctgcactggatgaaatcatggagattgaagaggaaaagaaaagaactgcccgaacagactactggctacagcctgaaattattgtgaaaattataaccaagaaactgggagagaaatatcataagaaaaaggctattgttaaggaagtaattgacaaatatacagctgttgtgaagatgattgattctggagacaagctgaaacttgaccagactcatttagagacagtaattccagcaccaggaaaaagaattctagttttaaatggaggctacagaggaaatgaaggtaccctagaatccatcaatgagaagactttttcagctactatcgtcattgaaactggccctttaaaaggacgcagagttgaaggaattcaatatgaagacatttctaaacttgcctgagtttgaaaatttgttaacaatacattaaaatcttaaagcatcaaattggtgttcgccaaggcattatgagactctactgtgttagggtatattcttttgtataaaacaaacaggtttttgaaaatattactgtatagttgttcagctaaactttgagaagaatttaattatgtctcatgaggtatcaaactatgtaattttgtccttgttatttttgtttcctttgtaatttacttgatgagtttatatcttcattaaagaatgttattataaagtgttttatctatgacaatttagaatcatgtaattggaggaaatccttcatacactctatattttcagtagtagagtagtaaagttgaactctaagtgtgactaaattttaaatgtcaaactataaatatagaagcagctttattgtggtaataattcatataccatacagttcactcatttaaaatatacatacaattcagtggtttttagtatttttgcagaattgtgcagccatcaccactgtctgattttaaaacactttcataccccaaaatgaaaccctttaatagtcaatcgctatttttcccctctgccctagccctagacagccactaatgtactttctgtctctatggatttgccctttctggacatttcttataaatggaatcatataatatgtgatcttttatgactggcttcttacacttagcatcatgttttcaaggtttatccatgcagtagcatgtaggcgtgcttcatttgtttttatggctgcttaatattccactgtatggatgtaccgtattttgtttgtccattcatcagctgataaacatttagattgtttctactttttggctattgtgaataatgctgccatgatcacccatttacaggattttatgtgaacagaagctttcgcttctgccaaactcttccagagcagctataccattttacagtcctaccagcaatgttgaactatagttttatttgtttttaatttttttacttttagagacatggtctcactgtgttgcccaggctgctgtcaaactcctgggctcaagtgatcctcctgcctcagcctcccaaagtgctaggattgcaggtgtgagccacagcaccctgcctaaccatacagtttgaaataagtagggcagtgtattattagggaatgcaaaagacaggaaacccacatttgcctgtgccaaaggaaaaacgaagggatatttgtagtgcacatgactgaaaggagcagacgctagcttccagggcagcgggaccgggtgtgaacagccttccctgggcttccgctctgtctctggctcctgtgctggctctctacatttacattcttgagcactctaggtttacatcttacccttcagcagcaccgggaagagagagatgatctatcttttctttttctttttttttttttttctgacacagagtctcactctgtcacccaggctgattgcagtagtgcaatctcggctcactgcaacctccacctcccgggttcaagccattctcctgcctcagcctcctgagtagctgggactacaggcatgcgccaccacgcccagctaatttttgtaattttagaagagatgaggtttcaccatgttggccaggatggtctcgatctcttgaccttatgatctgcccgcctcagcctcccaaagtgctgggattacaggcatgagccactacgcctctttttttttgttctgttttttgagatagggtcttgctctgtcatccagcctggagtgcagtggcacaatcatggctcactgcagcctcgtcctcctgggcttaggtcattgattctcccacctcagcctcccgagtagctgggactacaggcatgcactaccatgcctggctaatttttttgatttttagtagagatgaggtcttgctatgttgcccaggctggtctcaaactcttgagctcaagcaatcctcctgcctcggccttctaaaatgttgtgattacaggtgtgagctaccacgccttgcctgagttgatcttctacaagagttcaaacaaaaaacagaccataccaggatgatcacttcaaacatgaggatgggtataagctgacgtcagacacaggtatggtgccaaaccctgggatctctctctttaactgagagtcagggagggctgattgcttctattctcagaagatgggagaacgtatgctgttagcagaaatgtaagaggcagtaaagaaatactaataggatgatggcagaagctttacagaaaatgttcctcagggatgaattaaggtttttccaaagtaacctgacagcacattatggaaagcaactgggttttgggtgtgggcagtctttagatcaaattctggcagttctgttcattggctttgtaatattagaatgttaatgttcttgaattgcaatgtttttaatgtataaattgtcaaaatgtttttcagcagggttgatgggagacctacagaaaatacatataaatcatcagacatgaagtccagcacatagtaggtattgaataaatggcagtgagtggtcatgtccagaaatgaagccaagaagttgagcctggactactaagaatctggtctgaagaatttcaaaaaggagaatggttctccctgataacaaatagtgatgagtaaaaccagacaaattacatatgcctcccccaagtatgtacgtttggaatcaacttggtggttttcttcagagaaaaaatgtttcatgtctgcctcccacatttaattctccaacgtctttctgaaattatttcagaatgaaatgaggcagcatacttgaggttaaattcaataaaaaatatctgaagcataaaaatacgattatagacttcacagtagttttttccctctgagtctgtagaacttgatagagtttatgctaagcaaaatgactgcagataactaacaacaggtctcatattagactttgatttttgaagtatcataagctatttttctttatttcaaacatagactttactttttagagcagtctctgtgggttttgacaaatgtataatgacatgcatctgccactgtagtatcacacagaacagtttcactgccctagaagtttcctgtgttctgtctgttccctgtctccccccaaatccctgctgaccgctgatctttttactgtctccctagttttgtctccatcgaaggtcatatagttggagtcacacagggtgtagctttttcagattggcttctttcacctggtagaacatatgcatgtaaggttcctccatgttgttttggttaggtttttgtggctcgatagcgcacttcattttagcactgcatattctattgtctgaatgcaccacagtttatgcactcacctactgaaggatatcttggttgcttacaaggtttggaaattatgagtaaagctgctacaaacatctgtgcgcaggttttttgtggatagacgttttcaacttatttacgtaacgaccaaagagcacaattgctggatcatatgccaggagtcttctgagaaactaccaacctgtcttccagagtgactgtaccattttgtattcaaacgagcagtgaatgagagttcctgctgctctgcatctccgtcagcatttgatgttgtcagtgttctggattttggccatcttaatagctgtacagtgggatcttgtcattgctttaatttgcatttctttgatgaagtatgatgtggagcatcttttcatgggcttatttgccacctgtatatcttctctggtgagatgtctttcaggttttttgcccattatttaattgggttactcattttcttattgttgaattttaagagttgtttgtatatttcagttgtgttctttatcgaatgtgtcttttgcaagtattttctctcagtcagtggcctgtcttctcattttgttttaagctattcttttttaacaccccaagattttcatcgttacttttttttttttttttttttttttttttttttttttttgagacggagtctcgctctgtcgcccaggccggactgcggactgcagtggcgcaatctcggctcactgcaagctccgcttcccgggttcacgccattctcctgcctcagcctcccgagtagctgggactacaggcgcccgccaccgcgcccggctaattttttgtatttttagtacatcgttacttttaagaccactgtgcacacataaaatactaaaagctaaacttaatatctgcaggtagaagttttaaattcaagattttaaccaaataacagagttaatgctaaaatctcacttttgaagtttatgttgaatattagcattctaatatttaatatttttctatttttgaaataggaaatggaaaagatgcagtaggtttttcaaaagggtatcataggtgagcacttcttatagaagaagaaaactaagaggtagtgctatttacctcttcagcactaagtttatctttatttttatttatttctataaagagatgggagtctcactgtgttgcttaggctggtcttgaactcctggcctccagtgatgctcctgccttggcctccgagagtgctgggattataggcatgaggcaccacacccagccagtaatctttagcttctagaaacaatcagatttccttaagattttgcaattaggtttagaggagctcacttgctttttcaaatatgggttggatatgtccaaaaaaagagttttgcctctacaatgaaaaatgatttttaccagattatggaaaggaagattcataaaaatgtgcctttaaaaagcttttttaaagtgcaagttcaccaatttgacttttgaaaatacgttcattttaggaattgattttttaaggaaagttgtaaacacagcaaagcacagaattacactggttcagacttgcatcttagcaccaaaatccactatacaaatgcagacagcataaagtaacctagtttcgctttaaatttgttgcttattttattctcccttataaatgtcattggtcttttgttagaacataatttactactttattttgaaataaagtctaagatttagcatgtaa

SEQ ID NO: 146608 - DNA, 817 bp, Homo sapiens
  Payload ID: 9003
  Gene Symbol: KIN
  Gene Name: Kin17 DNA and RNA binding protein
  ENST ID: ENST00000498098
  CDS Start-End: 1-327
attgaagaggaaaagaaaagaactgcccgaacagactactggctacagcctgaaattattgtgaaaattataaccaagaaactgggagagaaatatcataagaaaaaggctattgttaaggaagtaattgacaaatatacagctgttgtgaagatgattgattctggagacaagctgaaacttgaccagactcatttagagacagtaattccagcaccaggaaaaagaattctagttttaaatggaggctacagaggaaatgaaggtaccctagaatccatcaatgagaagactttttcagctactatcgtcattgaaactgtgtgagctaccacgccttgcctgagttgatcttctacaagagttcaaacaaaaaacagaccataccaggatgatcacttcaaacatgaggatgggtataagctgacgtcagacacagcagggttgatgggagacctacagaaaatacatataaatcatcagacatgaagtccagcacatagtaggtattgaataaatggcagtgagtggtcatgtccagaaatgaagccaagaagttgagcctggactactaagaatctggtctgaagaatttcaaaaaggagaatggttctccctgataacaaatagtgatgagtaaaaccagacaaattacatatgcctcccccaagtatgtacgtttggaatcaacttggtggttttcttcagagaaaaaatgtttcatgtctgcctcccacatttaattctccaacgtctttctgaaattatttcagaatgaaatgaggcagcatacttgaggttaaattcaataaaaaat

SEQ ID NO: 146609 - DNA, 7361 bp, Homo sapiens
  Payload ID: 9004
  Gene Symbol: KIDINS220
  Gene Name: kinase D-interacting substrate, 220kDa
  Uniprot ID: Q9ULH0
  ENST ID: ENST00000256707
  CDS Start-End: 183-5498
acgtgatctgtcagttcgcggagagggaagaatatggccgccgggtgtggtgagggcgacgcgcttgcagtcgccgtctcttgcttccccgtcctctgacatcgcctgcagccgagcgggcccgttccgccggagctgaggaccaggtattcaaataaagttaattgcagctttctgtgaaaatgtcagttttgatatcacagagcgtcataaattatgtagaggaagaaaacattcctgctctgaaagctcttcttgaaaaatgcaaagatgtagatgagagaaatgagtgtggccagactccactgatgatagctgccgaacaaggcaatctggaaatagtgaaggaattaattaagaatggagctaactgcaatctggaagatttggataattggacagcacttatatctgcatcgaaagaagggcatgtgcacatcgtagaggaactactgaaatgtggggttaacttggagcaccgtgatatgggaggatggacagctcttatgtgggcatgttacaaaggccgtactgacgtagtagagttgcttctttctcatggtgccaatccaagtgtcactggtctgtacagtgtttacccaatcatttgggcagcagggagaggccatgcagatatagttcatcttttactgcaaaatggtgctaaagtcaactgctctgataagtatggaaccacccctttagtttgggctgcacgaaagggtcatttggaatgtgtgaaacatttattggccatgggagctgatgtggatcaagaaggagctaattcaatgactgcacttattgtggcagtgaaaggaggttacacacagtcagtaaaagaaattttgaagaggaatccaaatgtaaacttaacagataaagatggaaatacagctttgatgattgcatcaaaggagggacatacggagattgtgcaggatctgctcgacgctggaacatatgtgaacatacctgacaggagtggggatactgtgttgattggcgctgtcagaggtggtcatgttgaaattgttcgagcgcttctccaaaaatatgctgatatagacattagaggacaggataataaaactgctttgtattgggctgttgagaaaggaaatgcaacaatggtgagagatatcttacagtgcaatcctgacactgaaatatgcacaaaggatggtgaaacgccacttataaaggctaccaagatgagaaacattgaagtggtggagctgctgctagataaaggtgctaaagtgtctgctgtagataagaaaggagatactcccttgcatattgctattcgtggaaggagccggaaactggcagaactgcttttaagaaatcccaaagatgggcgattactttataggcccaacaaagcaggcgagactccttataatattgactgtagccatcagaagagtattttaactcaaatatttggagccagacacttgtctcctactgaaacagacggtgacatgcttggatatgatttatatagcagtgccctggcagatattctcagtgagcctaccatgcagccacccatttgtgtggggttatatgcacagtggggaagtgggaaatctttcttactcaagaaactagaagacgaaatgaaaaccttcgccggacaacagattgagcctctctttcagttctcatggctcatagtgtttcttaccctgctactttgtggagggcttggtttattgtttgccttcacggtccacccaaatcttggaatagcagtgtcactgagcttcttggctctcttatatatattctttattgtcatttactttggtggacgaagagaaggagagagttggaattgggcctgggtcctcagcactagattggcaagacatattggatatttggaactcctccttaaattgatgtttgtgaatccacctgagttgccagagcagactactaaagctttacctgtgaggtttttgtttacagattacaatagactgtccagtgtaggtggagaaacttctctggctgaaatgattgcaaccctctcggatgcttgtgaaagagagtttggctttttggcaaccaggctttttcgagtattcaagactgaagatactcagggtaaaaagaaatggaaaaaaacatgttgtctcccatcttttgtcatcttcctttttatcattggctgcattatatctggaattactcttctggctatatttagagttgacccaaagcatctgactgtaaatgctgtcctcatatcaatcgcatctgtagtgggattggcctttgtgttgaactgtcgtacatggtggcaagtgctggactcgctcctgaattcccaaagaaaacgcctccataatgcagcctccaaactgcacaaattgaaaagtgaaggattcatgaaagttcttaaatgtgaagtggaattgatggccaggatggcaaaaaccattgacagcttcactcagaatcagacaaggctggtggtcatcatcgatggattagatgcctgtgagcaggacaaagtccttcagatgctggacactgtccgagttctgttttcaaaaggcccgttcattgccatttttgcaagtgatccacatattatcataaaggcaattaaccagaacctcaatagtgtgcttcgggattcaaatataaatggccatgactacatgcgcaacatagtccacttgcctgtgttccttaatagtcgtggactaagcaatgcaagaaaatttctcgtaacttcagcaacaaatggagacgttccatgctcagatactacagggatacaggaagatgctgacagaagagtttcacagaacagccttggggagatgacaaaacttggtagcaagacagccctcaatagacgggacacttaccgaagaaggcagatgcagaggaccatcactcgccagatgtcctttgatcttacaaaactgctggttaccgaggactggttcagtgacatcagtccccagaccatgagaagattacttaatattgtttctgtgacaggacgattactgagagccaatcagattagtttcaactgggacaggcttgctagctggatcaaccttactgagcagtggccataccggacttcatggctcatattatatttggaagagactgaaggtattccagatcaaatgacattaaaaaccatctacgaaagaatatcaaagaatattccaacaactaaggatgttgagccacttcttgaaattgatggagatataagaaattttgaagtgtttttgtcttcaaggaccccagttcttgtggctcgagatgtaaaagtctttttgccatgcactgtaaacctagatcccaaactacgggaaattattgcagatgttcgtgctgccagagagcagatcagtattggaggactggcgtaccccccgctccctctacatgagggtcctcctagggcgccatcagggtacagccagcccccatccgtgtgctcttccacgtccttcaatgggcccttcgcaggtggagtggtgtcaccacagcctcacagcagctattacagcggcatgacgggccctcagcatcccttctacaacaggccattctttgccccatacctttacacgccaaggtattaccctggcggctcccaacatctcatctcacgtccatcagtaaaaacgagtttgcccagagatcagaacaatggcctagaagttatcaaggaggatgctgctgaggggctttcttcacccacagactcctcgagggggtcaggcccagccccaggcccagtggtattactgaattcactgaatgtggatgcagtatgtgagaagctgaaacaaatagaagggctggaccagagtatgctgcctcagtattgtaccacgatcaaaaaggcaaacataaatggccgtgtgttagctcagtgtaacattgatgagctgaagaaagagatgaatatgaattttggagactggcaccttttcagaagcacagtactagaaatgagaaacgcagaaagccacgtggtccctgaagacccacgtttcctcagtgagagcagcagtggcccagccccgcacggtgagcctgctcgccgcgcttcccacaacgagctgcctcacaccgagctctccagccagacgccctacacactcaacttcagcttcgaagagctgaacacgcttggcctggatgaaggtgcccctcgtcacagtaatctaagttggcagtcacaaactcgcagaaccccaagtctttcgagtctcaattcccaggattccagtattgaaatttcaaagcttactgataaggtgcaggccgagtatagagatgcctatagagaatacattgctcagatgtcccagttagaagggggccccgggtctacaaccattagtggcagatcttctccacatagcacatattacatgggtcagagttcatcagggggctctattcattcaaacctagagcaagaaaaggggaaggatagtgaaccaaagcccgatgatgggaggaagtcctttctaatgaagaggggagatgttatcgattattcatcatcaggggtttccaccaacgatgcttcccccctggatcctatcactgaagaagatgaaaaatcagatcagtcaggcagtaagcttctcccaggcaagaaatcttccgaaaggtcaagcctcttccagacagatttgaagcttaagggaagtgggctgcgctatcaaaaactcccaagtgacgaggatgaatctggcacagaagaatcagataacactccactgctcaaagatgacaaagacagaaaagccgaagggaaagtagagagagtgccgaagtctccagaacacagtgctgagccgatcagaaccttcattaaagccaaagagtatttatcggatgcgctccttgacaaaaaggattcatcggattcaggagtgagatccagtgaaagttctcccaatcactctctgcacaatgaagtggcggatgactcccagcttgaaaaggcaaatctcatagagctggaagatgacagtcacagcggaaagcggggaatcccacatagcctgagtggcctgcaagatccaattatagctcggatgtccatttgttcagaagacaagaaaagcccttccgaatgcagcttgatagccagcagccctgaagaaaactggcctgcatgccagaaagcctacaacctgaaccgaactcccagcaccgtgactctgaacaacaatagtgctccagccaacagagccaatcaaaatttcgatgagatggagggaattagggagacttctcaagtcattttgaggcctagttccagtcccaacccaaccactattcagaatgagaatctaaaaagcatgacacataagcgaagccaacgttcaagttacacaaggctctccaaagatcctccggagctccatgcagcagcctcttctgagagcacaggctttggagaagaaagagaaagcattctttgagaaaaacaagcaaaggagaagagtgttactgtacctttatgacagaattgtcctggattttgactccatccacgcccatcacctttctacattttgctgacagataactaaccgatgatgaggccgaggtaaaagagacatctgcagtgtgacagaagggagcatgagaagcatggctcaccagccagcctctgtggtctttgtaattagaagcttcagaactcactaatactactgtacctttcattggcgcattaccccataaaactttttgagacgaggtgagatctgagtataaagataggtcagaagtattttaaagggcttaatgtgccaaaaagaaaaaaagctagagaccctttttgcaaacatttggtgaccacacatttgagggaagacgtggcgttaggtgaagcagaagcaaaccctgctcttaggggctcacctaggtgagtgcacagcctgtgacgctacagggagaggctgagtaaaccgagatccagcgttctgtatggcaggggtattgcttatcacagaggttctgaagagtaggaagtacataatgaagagggctttaaaaattgccaacaaagtgagtcaccagggctggcagtagtgtgacggggctgtcctgagctgttaggagagtagatgcggggagggctggtgacctccgtgggtttatatgtcggaaactcttctctccaaatcccaggcctggcttccagcaccatccagctgtgcccaagaagccaccctggtctgttctccaactcttttaaatggtgcccaacttttctaagtgagcttagcaatgagaagaaaaaaaaacatgaattctttttctggaaaatcagggagacatgggtaataataggtactaataaatatttatagatgagtgaatgaggaaataattacatcaaaaaggtcagtgacaattgataaatgacaaggaaatatttaattaggtaaaactaaatcattgctctctatactaggatagactttatctacttcatctgttcctaagtcagcatgttagttctggggaaggatcataagaaaggaaatactttttaaaaaaaaatttggaaacatgtaacaaagcaagggtaaaatatatatatatatctatataagtgctgtgactgtaaaagtgtactttccattaattattagccgagttaagagaatggtcacattgaagtactgtgtggactagaaatgtaccctgtcatcatgcaatgaaatattgttatcgttttaacatagctcatttatgtagaatgaattctggtggtttaccccaagtcacagttaggacggtagatggtgagatcgcagatgcgctattatctagattcagtgttacattttcgatgtttatcactcagtgggtttttattaatatgctgattaagttatttactgggccagtcattgtgctaaatagttgctcttttgtgtttcattgccttgatgtttgagtgtaatctagcattttaatacagtgtttattttgcatgatctttaacaaatgttttaagcaattttaaaaaggcaggatgttattgacattatacactgaagtcttaacattttaacatttatagtgcttatttgcaaaattgtataattaggaattatttcagagacaatgttttctttttcaggtgagtagttgccgcgtaatatcattggagtacattctttatactgtttgtgaaattaatactagcatattaagtgtacaaatagatttagaaaacaataaaaaattgcatgctattctgactcatgaatttttattcactatgatgattcacattttgattaaaaataaaagtagtttgtgtgttt

SEQ ID NO: 146610 - DNA, 3765 bp, Homo sapiens
  Payload ID: 9004
  Gene Symbol: KIDINS220
  Gene Name: kinase D-interacting substrate, 220kDa
  Uniprot ID: Q9ULH0
  ENST ID: ENST00000319688
  CDS Start-End: 158-3253
ggaagaatatggccgccgggtgtggtgagggcgacgcgcttgcagtcgccgtctcttgcttccccgtcctctgacatcgcctgcagccgagcgggcccgttccgccggagctgaggaccaggtattcaaataaagttaattgcagctttctgtgaaaatgtcagttttgatatcacagagcgtcataaattatgtagaggaagaaaacattcctgctctgaaagctcttcttgaaaaatgcaaagatgtagatgagagaaatgagtgtggccagactccactgatgatagctgccgaacaaggcaatctggaaatagtgaaggaattaattaagaatggagctaactgcaatctggaagatttggataattggacagcacttatatctgcatcgaaagaagggcatgtgcacatcgtagaggaactactgaaatgtggggttaacttggagcaccgtgatatgggaggatggacagctcttatgtgggcatgttacaaaggccgtactgacgtagtagagttgcttctttctcatggtgccaatccaagtgtcactggtctgcagtacagtgtttacccaatcatttgggcagcagggagaggccatgcagatatagttcatcttttactgcaaaatggtgctaaagtcaactgctctgataagtatggaaccacccctttagtttgggctgcacgaaagggtcatttggaatgtgtgaaacatttattggccatgggagctgatgtggatcaagaaggagctaattcaatgactgcacttattgtggcagtgaaaggaggttacacacagtcagtaaaagaaattttgaagaggaatccaaatgtaaacttaacagataaagatggaaatacagctttgatgattgcatcaaaggagggacatacggagattgtgcaggatctgctcgacgctggaacatatgtgaacatacctgacaggagtggggatactgtgttgattggcgctgtcagaggtggtcatgttgaaattgttcgagcgcttctccaaaaatatgctgatatagacattagaggacaggataataaaactgctttgtattgggctgttgagaaaggaaatgcaacaatggtgagagatatcttacagtgcaatcctgacactgaaatatgcacaaaggatggtgaaacgccacttataaaggctaccaagatgagaaacattgaagtggtggagctgctgctagataaaggtgctaaagtgtctgctgtagataagaaaggagatactcccttgcatattgctattcgtggaaggagccggaaactggcagaactgcttttaagaaatcccaaagatgggcgattactttataggcccaacaaagcaggcgagactccttataatattgactgtagccatcagaagagtattttaactcaaatatttggagccagacacttgtctcctactgaaacagacggtgacatgcttggatatgatttatatagcagtgccctggcagatattctcagtgagcctaccatgcagccacccatttgtgtggggttatatgcacagtggggaagtgggaaatctttcttactcaagaaactagaagacgaaatgaaaaccttcgccggacaacagattgagcctctctttcagttctcatggctcatagtgtttcttaccctgctactttgtggagggcttggtttattgtttgccttcacggtccacccaaatcttggaatagcagtgtcactgagcttcttggctctcttatatatattctttattgtcatttactttggtggacgaagagaaggagagagttggaattgggcctgggtcctcagcactagattggcaagacatattggatatttggaactcctccttaaattgatgtttgtgaatccacctgagttgccagagcagactactaaagctttacctgtgaggtttttgtttacagattacaatagactgtccagtgtaggtggagaaacttctctggctgaaatgattgcaaccctctcggatgcttgtgaaagagagtttggctttttggcaaccaggctttttcgagtattcaagactgaagatactcagggtaaaaagaaatggaaaaaaacatgttgtctcccatcttttgtcatcttcctttttatcattggctgcattatatctggaattactcttctggctatatttagagttgacccaaagcatctgactgtaaatgctgtcctcatatcaatcgcatctgtagtgggattggcctttgtgttgaactgtcgtacatggtggcaagtgctggactcgctcctgaattcccaaagaaaacgcctccataatgcagcctccaaactgcacaaattgaaaagtgaaggattcatgaaagttcttaaatgtgaagtggaattgatggccaggatggcaaaaaccattgacagcttcactcagaatcagacaaggctggtggtcatcatcgatggattagatgcctgtgagcaggacaaagtccttcagatgctggacactgtccgagttctgttttcaaaaggcccgttcattgccatttttgcaagtgatccacatattatcataaaggcaattaaccagaacctcaatagtgtgcttcgggattcaaatataaatggccatgactacatgcgcaacatagtccacttgcctgtgttccttaatagtcgtggactaagcaatgcaagaaaatttctcgtaacttcagcaacaaatggagacgttccatgctcagatactacagggatacaggaagatgctgacagaagagtttcacagaacagccttggggagatgacaaaacttggtagcaagacagccctcaatagacgggacacttaccgaagaaggcagatgcagaggaccatcactcgccagatgtcctttgatcttacaaaactgctggttaccgaggactggttcagtgacatcagtccccagaccatgagaagattacttaatattgtttctgtgacaggacgattactgagagccaatcagattagtttcaactgggacaggcttgctagctggatcaaccttactgagcagtggccataccggacttcatggctcatattatatttggaagagactgaaggtattccagatcaaatgacattaaaaaccatctacgaaagatgctgtggagcagacagttgtgaccgagaccgaattggcatttccaagtcagtgttagttgccatgttgatggagagctgagaaaagccattttaatggcatttgcaaataagcaggacatggaacaggccatgactccctcagagatgcacattcacttgggttatctgcctcgaaggactgaaaatggcaaatattcaaaacttcagcaaccagaggtactggccttcatgagacaacggaatgggtagttgaaacattaaagagcaaacaacagtacagtcacttctgctcctctgaaatgaagacggcctcacatatccctttggaaacaatcaagtgtgcttctcatgactaaaggttaaagctgtaagactgttggcatttactgaactgactgtgacattagtaataaatataaaaaatagatatttagttgaaagggtaattcatcttgattgagccaattgtgttctatgttgtaggacatgctgcttccctgctttcttaatgttaagtacacattccatttgtatgggatttttattcaaatagtcctattaaagtatgcacttttgttgggaaaaaacaaa

SEQ ID NO: 146611 - DNA, 5988 bp, Homo sapiens
  Payload ID: 9004
  Gene Symbol: KIDINS220
  Gene Name: kinase D-interacting substrate, 220kDa
  ENST ID: ENST00000488729
  CDS Start-End: 154-264
gaatatggccgccgggtgtggtgagggcgacgcgcttgcagtcgccgtctcttgcttccccgtcctctgacatcgcctgcagccgagcgggcccgttccgccggagctgaggaccaggtattcaaataaagttaattgcagctttctgtgaaaatgtcagttttgatatcacagagcgtcataaattatgtagaggaagaaaacattcctgctctgaaagctcttcttgaaaaatgcaaagatgtagatgagagaaatgagtagagatggggtttcaccgtgttacccaggatggtctcctgacctcatgatccacccacctaggcctcccagagtgctgggattacaggtgtgagccatcgcgtccggcaagccaagctattattatttggcaggacattttaggtgctaatacagttttgtataaatatttgtggccagactccactgatgatagctgccgaacaaggcaatctggaaatagtgaaggaattaattaagaatggagctaactgcaatctggaagatttggataattggacagcacttatatctgcatcgaaagaagggcatgtgcacatcgtagaggaactactgaaatgtggggttaacttggagcaccgtgatatgggaggatggacagctcttatgtgggcatgttacaaaggccgtactgacgtagtagagttgcttctttctcatggtgccaatccaagtgtcactggtctgtacagtgtttacccaatcatttgggcagcagggagaggccatgcagatatagttcatcttttactgcaaaatggtgctaaagtcaactgctctgataagtatggaaccacccctttagtttgggctgcacgaaagggtcatttggaatgtgtgaaacatttattggccatgggagctgatgtggatcaagaaggagctaattcaatgactgcacttattgtggcagtgaaaggaggttacacacagtcagtaaaagaaattttgaagaggaatccaaatgtaaacttaacagataaagatggaaatacagctttgatgattgcatcaaaggagggacatacggagattgtgcaggatctgctcgacgctggaacatatgtgaacatacctgacaggagtggggatactgtgttgattggcgctgtcagaggtggtcatgttgaaattgttcgagcgcttctccaaaaatatgctgatatagacattagaggacaggataataaaactgctttgtattgggctgttgagaaaggaaatgcaacaatggtgagagatatcttacagtgcaatcctgacactgaaatatgcacaaaggatggtgaaacgccacttataaaggctaccaagatgagaaacattgaagtggtggagctgctgctagataaaggtgctaaagtgtctgctgtagataagaaaggagatactcccttgcatattgctattcgtggaaggagccggaaactggcagaactgcttttaagaaatcccaaagatgggcgattactttataggcccaacaaagcaggcgagactccttataatattgactgtagccatcagaagagtattttaactcaaatatttggagccagacacttgtctcctactgaaacagacggtgacatgcttggatatgatttatatagcagtgccctggcagatattctcagtgagcctaccatgcagccacccatttgtgtggggttatatgcacagtggggaagtgggaaatctttcttactcaagaaactagaagacgaaatgaaaaccttcgccggacaacagattgagcctctctttcagttctcatggctcatagtgtttcttaccctgctactttgtggagggcttggtttattgtttgccttcacggtccacccaaatcttggaatagcagtgtcactgagcttcttggctctcttatatatattctttattgtcatttactttggtggacgaagagaaggagagagttggaattgggcctgggtcctcagcactagattggcaagacatattggatatttggaactcctccttaaattgatgtttgtgaatccacctgagttgccagagcagactactaaagctttacctgtgaggtttttgtttacagattacaatagactgtccagtgtaggtggagaaacttctctggctgaaatgattgcaaccctctcggatgcttgtgaaagagagtttggctttttggcaaccaggctttttcgagtattcaagactgaagatactcagggtaaaaagaaatggaaaaaaacatgttgtctcccatcttttgtcatcttcctttttatcattggctgcattatatctggaattactcttctggctatatttagagttgacccaaagcatctgactgtaaatgctgtcctcatatcaatcgcatctgtagtgggattggcctttgtgttgaactgtcgtacatggtggcaagtgctggactcgctcctgaattcccaaagaaaacgcctccataatgcagcctccaaactgcacaaattgaaaagtgaaggattcatgaaagttcttaaatgtgaagtggaattgatggccaggatggcaaaaaccattgacagcttcactcagaatcagacaaggctggtggtcatcatcgatggattagatgcctgtgagcaggacaaagtccttcagatgctggacactgtccgagttctgttttcaaaaggcccgttcattgccatttttgcaagtgatccacatattatcataaaggcaattaaccagaacctcaatagtgtgcttcgggattcaaatataaatggccatgactacatgcgcaacatagtccacttgcctgtgttccttaatagtcgtggactaagcaatgcaagaaaatttctcgtaacttcagcaacaaatggagacgttccatgctcagatactacagggatacaggaagatgctgacagaagagtttcacagaacagccttggggagatgacaaaacttggtagcaagacagccctcaatagacgggacacttaccgaagaaggcagatgcagaggaccatcactcgccagatgtcctttgatcttacaaaactgctggttaccgaggactggttcagtgacatcagtccccagaccatgagaagattacttaatattgtttctgtgacaggacgattactgagagccaatcagattagtttcaactgggacaggcttgctagctggatcaaccttactgagcagtggccataccggacttcatggctcatattatatttggaagagactgaaggtattccagatcaaatgacattaaaaaccatctacgaaagaatatcaaagaatattccaacaactaaggatgttgagccacttcttgaaattgatggagatataagaaattttgaagtgtttttgtcttcaaggaccccagttcttgtggctcgagatgtaaaagtctttttgccatgcactgtaaacctagatcccaaactacgggaaattattgcagatgttcgtgctgccagagagcagatcagtattggaggactggcgtaccccccgctccctctacatgagggtcctcctagggcgccatcagggtacagccagcccccatccgtgtgctcttccacgtccttcaatgggcccttcgcaggtggagtggtgtcaccacagcctcacagcagctattacagcggcatgacgggccctcagcatcccttctacaacagggggtcaggcccagccccaggcccagtggtattactgaattcactgaatgtggatgcagtatgtgagaagctgaaacaaatagaagggctggaccagagtatgctgcctcagtattgtaccacgatcaaaaaggcaaacataaatggccgtgtgttagctcagtgtaacattgatgagctgaagaaagagatgaatatgaattttggagactggcaccttttcagaagcacagtactagaaatgagaaacgcagaaagccacgtggtccctgaagacccacgtttcctcagtgagagcagcagtggcccagccccgcacggtgagcctgctcgccgcgcttcccacaacgagctgcctcacaccgagctctccagccagacgccctacacactcaacttcagcttcgaagagctgaacacgcttggcctggatgaaggtgcccctcgtcacagtaatctaagttggcagtcacaaactcgcagaaccccaagtctttcgagtctcaattcccaggattccagtattgaaatttcaaagcttactgataaggtgcaggccgagtatagagatgcctatagagaatacattgctcagatgtcccagttagaagggggccccgggtctacaaccattagtggcagatcttctccacatagcacatattacatgggtcagagttcatcagggggctctattcattcaaacctagagcaagaaaaggggaaggatagtgaaccaaagcccgatgatgggaggaagtcctttctaatgaagaggggagatgttatcgattattcatcatcaggggtttccaccaacgatgcttcccccctggatcctatcactgaagaagatgaaaaatcagatcagtcaggcagtaagcttctcccaggcaagaaatcttccgaaaggtcaagcctcttccagacagatttgaagcttaagggaagtgggctgcgctatcaaaaactcccaagtgacgaggatgaatctggcacagaagaatcagataacactccactgctcaaagatgacaaagacagaaaagccgaagggaaagtagagagagtgccgaagtctccagaacacagtgctgagccgatcagaaccttcattaaagccaaagagtatttatcggatgcgctccttgacaaaaaggattcatcggattcaggagtgagatccagtgaaagttctcccaatcactctctgcacaatgaagtggcggatgactcccagcttgaaaaggcaaatctcatagagctggaagatgacagtcacagcggaaagcggggaatcccacatagcctgagtggcctgcaagatccaattatagctcggatgtccatttgttcagaagacaagaaaagcccttccgaatgcagcttgatagccagcagccctgaagaaaactggcctgcatgccagaaagcctacaacctgaaccgaactcccagcaccgtgactctgaacaacaatagtgctccagccaacagagccaatcaaaatttcgatgagatggagggaattagggagacttctcaagtcattttgaggcctagttccagtcccaacccaaccactattcagaatgagaatctaaaaagcatgacacataagcgaagccaacgttcaagttacacaaggctctccaaagatcctccggagctccatgcagcagcctcttctgagagcacaggctttggagaagaaagagaaagcattctttgagaaaaacaagcaaaggagaagagtgttactgtacctttatgacagaattgtcctggattttgactccatccacgcccatcacctttctacattttgctgacagataactaaccgatgatgaggccgaggtaaaagagacatctgcagtgtgacagaagggagcatgagaagcatggctcaccagccagcctctgtggtctttgtaattagaagcttcagaactcactaatactactgtacctttcattggcgcattaccccataaaactttttgagacgaggtgagatctgagtataaagataggtcagaagtattttaaagggcttaatgtgccaaaaagaaaaaaagctagagaccctttttgcaaacatttggtgaccacacatttgagggaagacgtggcgttaggtgaagcagaagcaaaccctgctcttaggggctcacctaggtgagtgcacagcctgtgacgctacagggagaggctgagtaaaccgagatccagcgttctgtatggcagg

SEQ ID NO: 146612 - DNA, 7248 bp, Homo sapiens
  Payload ID: 9004
  Gene Symbol: KIDINS220
  Gene Name: kinase D-interacting substrate, 220kDa
  Uniprot ID: Q9ULH0
  ENST ID: ENST00000473731
  CDS Start-End: 199-5457
agggcacgtgatctgtcagttcgcggagagggaagaatatggccgccgggtgtggtgagggcgacgcgcttgcagtcgccgtctcttgcttccccgtcctctgacatcgcctgcagccgagcgggcccgttccgccggagctgaggaccaggttgggagaccgtattcaaataaagttaattgcagctttctgtgaaaatgtcagttttgatatcacagagcgtcataaattatgtagaggaagaaaacattcctgctctgaaagctcttcttgaaaaatgcaaagatgtagatgagagaaatgagtgtggccagactccactgatgatagctgccgaacaaggcaatctggaaatagtgaaggaattaattaagaatggagctaactgcaatctggaagatttggataattggacagcacttatatctgcatcgaaagaagggcatgtgcacatcgtagaggaactactgaaatgtggggttaacttggagcaccgtgatatgggaggatggacagctcttatgtgggcatgttacaaaggccgtactgacgtagtagagttgcttctttctcatggtgccaatccaagtgtcactggtctgtacagtgtttacccaatcatttgggcagcagggagaggccatgcagatatagttcatcttttactgcaaaatggtgctaaagtcaactgctctgataagtatggaaccacccctttagtttgggctgcacgaaagggtcatttggaatgtgtgaaacatttattggccatgggagctgatgtggatcaagaaggagctaattcaatgactgcacttattgtggcagtgaaaggaggttacacacagtcagtaaaagaaattttgaagaggaatccaaatgtaaacttaacagataaagatggaaatacagctttgatgattgcatcaaaggagggacatacggagattgtgcaggatctgctcgacgctggaacatatgtgaacatacctgacaggagtggggatactgtgttgattggcgctgtcagaggtggtcatgttgaaattgttcgagcgcttctccaaaaatatgctgatatagacattagaggacaggataataaaactgctttgtattgggctgttgagaaaggaaatgcaacaatggtgagagatatcttacagtgcaatcctgacactgaaatatgcacaaaggatggtgaaacgccacttataaaggctaccaagatgagaaacattgaagtggtggagctgctgctagataaaggtgctaaagtgtctgctgtagataagaaaggagatactcccttgcatattgctattcgtggaaggagccggaaactggcagaactgcttttaagaaatcccaaagatgggcgattactttataggcccaacaaagcaggcgagactccttataatattgactgtagccatcagaagagtattttaactcaaatatttggagccagacacttgtctcctactgaaacagacggtgacatgcttggatatgatttatatagcagtgccctggcagatattctcagtgagcctaccatgcagccacccatttgtgtggggttatatgcacagtggggaagtgggaaatctttcttactcaagaaactagaagacgaaatgaaaaccttcgccggacaacagattgagcctctctttcagttctcatggctcatagtgtttcttaccctgctactttgtggagggcttggtttattgtttgccttcacggtccacccaaatcttggaatagcagtgtcactgagcttcttggctctcttatatatattctttattgtcatttactttggtggacgaagagaaggagagagttggaattgggcctgggtcctcagcactagattggcaagacatattggatatttggaactcctccttaaattgatgtttgtgaatccacctgagttgccagagcagactactaaagctttacctgtgaggtttttgtttacagattacaatagactgtccagtgtaggtggagaaacttctctggctgaaatgattgcaaccctctcggatgcttgtgaaagagagtttggctttttggcaaccaggctttttcgagtattcaagactgaagatactcagggtaaaaagaaatggaaaaaaacatgttgtctcccatcttttgtcatcttcctttttatcattggctgcattatatctggaattactcttctggctatatttagagttgacccaaagcatctgactgtaaatgctgtcctcatatcaatcgcatctgtagtgggattggcctttgtgttgaactgtcgtacatggtggcaagtgctggactcgctcctgaattcccaaagaaaacgcctccataatgcagcctccaaactgcacaaattgaaaagtgaaggattcatgaaagttcttaaatgtgaagtggaattgatggccaggatggcaaaaaccattgacagcttcactcagaatcagacaaggctggtggtcatcatcgatggattagatgcctgtgagcaggacaaagtccttcagatgctggacactgtccgagttctgttttcaaaaggcccgttcattgccatttttgcaagtgatccacatattatcataaaggcaattaaccagaacctcaatagtgtgcttcgggattcaaatataaatggccatgactacatgcgcaacatagtccacttgcctgtgttccttaatagtcgtggactaagcaatgcaagaaaatttctcgtaacttcagcaacaaatggagacgttccatgctcagatactacagggatacaggaagatgctgacagaagagtttcacagaacagccttggggagatgacaaaacttggtagcaagacagccctcaatagacgggacacttaccgaagaaggcagatgcagaggaccatcactcgccagatgtcctttgatcttacaaaactgctggttaccgaggactggttcagtgacatcagtccccagaccatgagaagattacttaatattgtttctgtgacaggacgattactgagagccaatcagattagtttcaactgggacaggcttgctagctggatcaaccttactgagcagtggccataccggacttcatggctcatattatatttggaagagactgaaggtattccagatcaaatgacattaaaaaccatctacgaaagaatatcaaagaatattccaacaactaaggatgttgagccacttcttgaaattgatggagatataagaaattttgaagtgtttttgtcttcaaggaccccagttcttgtggctcgagatgtaaaagtctttttgccatgcactgtaaacctagatcccaaactacgggaaattattgcagatgttcgtgctgccagagagcagatcagtattggaggactggcgtaccccccgctccctctacatgagggtcctcctagggcgccatcagggtacagccagcccccatccgtgtgctcttccacgtccttcaatgggcccttcgcaggtggagtggtgtcaccacagcctcacagcagctattacagcggcatgacgggccctcagcatcccttctacaacaggccattctttgccccatacctttacacgccaaggtattaccctggcggctcccaacatctcatctcacgtccatcagtaaaaacgagtttgcccagagatcagaacaatggcctagggtcaggcccagccccaggcccagtggtattactgaattcactgaatgtggatgcagtatgtgagaagctgaaacaaatagaagggctggaccagagtatgctgcctcagtattgtaccacgatcaaaaaggcaaacataaatggccgtgtgttagctcagtgtaacattgatgagctgaagaaagagatgaatatgaattttggagactggcaccttttcagaagcacagtactagaaatgagaaacgcagaaagccacgtggtccctgaagacccacgtttcctcagtgagagcagcagtggcccagccccgcacggtgagcctgctcgccgcgcttcccacaacgagctgcctcacaccgagctctccagccagacgccctacacactcaacttcagcttcgaagagctgaacacgcttggcctggatgaaggtgcccctcgtcacagtaatctaagttggcagtcacaaactcgcagaaccccaagtctttcgagtctcaattcccaggattccagtattgaaatttcaaagcttactgataaggtgcaggccgagtatagagatgcctatagagaatacattgctcagatgtcccagttagaagggggccccgggtctacaaccattagtggcagatcttctccacatagcacatattacatgggtcagagttcatcagggggctctattcattcaaacctagagcaagaaaaggggaaggatagtgaaccaaagcccgatgatgggaggaagtcctttctaatgaagaggggagatgttatcgattattcatcatcaggggtttccaccaacgatgcttcccccctggatcctatcactgaagaagatgaaaaatcagatcagtcaggcagtaagcttctcccaggcaagaaatcttccgaaaggtcaagcctcttccagacagatttgaagcttaagggaagtgggctgcgctatcaaaaactcccaagtgacgaggatgaatctggcacagaagaatcagataacactccactgctcaaagatgacaaagacagaaaagccgaagggaaagtagagagagtgccgaagtctccagaacacagtgctgagccgatcagaaccttcattaaagccaaagagtatttatcggatgcgctccttgacaaaaaggattcatcggattcaggagtgagatccagtgaaagttctcccaatcactctctgcacaatgaagtggcggatgactcccagcttgaaaaggcaaatctcatagagctggaagatgacagtcacagcggaaagcggggaatcccacatagcctgagtggcctgcaagatccaattatagctcggatgtccatttgttcagaagacaagaaaagcccttccgaatgcagcttgatagccagcagccctgaagaaaactggcctgcatgccagaaagcctacaacctgaaccgaactcccagcaccgtgactctgaacaacaatagtgctccagccaacagagccaatcaaaatttcgatgagatggagggaattagggagacttctcaagtcattttgaggcctagttccagtcccaacccaaccactattcagaatgagaatctaaaaagcatgacacataagcgaagccaacgttcaagttacacaaggctctccaaagatcctccggagctccatgcagcagcctcttctgagagcacaggctttggagaagaaagagaaagcattctttgagaaaaacaagcaaaggagaagagtgttactgtacctttatgacagaattgtcctggattttgactccatccacgcccatcacctttctacattttgctgacagataactaaccgatgatgaggccgaggtaaaagagacatctgcagtgtgacagaagggagcatgagaagcatggctcaccagccagcctctgtggtctttgtaattagaagcttcagaactcactaatactactgtacctttcattggcgcattaccccataaaactttttgagacgaggtgagatctgagtataaagataggtcagaagtattttaaagggcttaatgtgccaaaaagaaaaaaagctagagaccctttttgcaaacatttggtgaccacacatttgagggaagacgtggcgttaggtgaagcagaagcaaaccctgctcttaggggctcacctaggtgagtgcacagcctgtgacgctacagggagaggctgagtaaaccgagatccagcgttctgtatggcaggggtattgcttatcacagaggttctgaagagtaggaagtacataatgaagagggctttaaaaattgccaacaaagtgagtcaccagggctggcagtagtgtgacggggctgtcctgagctgttaggagagtagatgcggggagggctggtgacctccgtgggtttatatgtcggaaactcttctctccaaatcccaggcctggcttccagcaccatccagctgtgcccaagaagccaccctggtctgttctccaactcttttaaatggtgcccaacttttctaagtgagcttagcaatgagaagaaaaaaaaacatgaattctttttctggaaaatcagggagacatgggtaataataggtactaataaatatttatagatgagtgaatgaggaaataattacatcaaaaaggtcagtgacaattgataaatgacaaggaaatatttaattaggtaaaactaaatcattgctctctatactaggatagactttatctacttcatctgttcctaagtcagcatgttagttctggggaaggatcataagaaaggaaatactttttaaaaaaaaatttggaaacatgtaacaaagcaagggtaaaatatatatatatatctatataagtgctgtgactgtaaaagtgtactttccattaattattagccgagttaagagaatggtcacattgaagtactgtgtggactagaaatgtaccctgtcatcatgcaatgaaatattgttatcgttttaacatagctcatttatgtagaatgaattctggtggtttaccccaagtcacagttaggacggtagatggtgagatcgcagatgcgctattatctagattcagtgttacattttcgatgtttatcactcagtgggtttttattaatatgctgattaagttatttactgggccagtcattgtgctaaatagttgctcttttgtgtttcattgccttgatgtttgagtgtaatctagcattttaatacagtgtttattttgcatgatctttaacaaatgttttaagcaattttaaaaaggcaggatgttattgacattatacactgaagtcttaacattttaacatttatagtgcttatttgcaaaattgtataattaggaattatttcagagacaatgttttctttttcaggtgagtagttgccgcgtaatatcattggagtacattctttatactgtttgtgaaattaatactagcatattaagtgtacaaatagatttagaaaacaataaaaaattgcatgcta

SEQ ID NO: 146613 - DNA, 2036 bp, Homo sapiens
  Payload ID: 9004
  Gene Symbol: KIDINS220
  Gene Name: kinase D-interacting substrate, 220kDa
  ENST ID: ENST00000459813
  CDS Start-End: 1-456
attccagatcaaatgacattaaaaaccatctacgaaagaatatcaaagaatattccaacaactaaggatgttgagccacttcttgaaattgatggagatataagaaattttgaagtgtttttgtcttcaaggaccccagttcttgtggctcgagatgtaaaagtctttttgccatgcactgtaaacctagatcccaaactacgggaaattattgcagatgttcgtgctgccagagagcagatcagtattggaggactggcgtaccccccgctccctctacatgagggtcctcctagggcgccatcagggtacagccagcccccatccgtgtgctcttccacgtccttcaatgggcccttcgcaggtggagtggtgtcaccacagcctcacagcagctattacagcggcatgacgggccctcagcatcccttctacaacagggaaaatggagcatgaacctggggttacactttctggaactgttctcttaagccattctttgccccatacctttacacgccaaggtattaccctggcggctcccaacatctcatctcacgtccatcagtaaaaacgagtttgcccagagatcagaacaatggcctagtaagtatataaaagggtaacgcaaatattaatttaataataaacatagatagcatttgaggtttggttatttcctttacatagtaaaagagtgcaactgattttatacatagttttaagaaacaacctattactaacataaaatgtatttattttcatttctggtaaatatctatggaaggaaaatgactagcagtctcagcgaagaaatgttgacttgtttatagccagaaatttctggcttgtaatatagtgtttgctaccaaaacttttaaaactaagcctttacatttggtaatttctaatatcttcttaaagaacatgtgtatacagtacctttatagtatgtaaatattagcaccatgatataaaaaatagaggatgtattgaaggaagaacatttcaatcaaatggcaggaattaaacaagataagggaaattcttccaatgaactattgaatctaagaaagacatttgtgcccaaaatattagaggttcctgatgataaaagtaatagtttaaaaaaagaaactctctattaatatgtttttataaatcaggaggcaaaaacataaactgttgagtttcagtgttgtatattattttaccatcatgttcatttgtcttcacagtttggctccccccttccccttttcacccacactctcctgttttgtgttgttaggaagttatcaaggaggatgctgctgaggggctttcttcacccacagactcctcgagggtaatggagtagtcctgtggtgtggatcgctggcatctcattgcttctgcctcagtaatgactgtcttaattgtgatgatagcagctcactaactctgcgtttgtggtgtgatgagcagctagtgtagagtagctgaatgctaataattatggttcctgaattaattaaaaagcggatgtttaacttcacccattatttcctcctgcttttcccctttttcaatacatgggatggggtttttttttattcttcaataaggaagggctttttctatcagctgtcaggggtgttccgttggtagtatttgctcctcagtgtgagctctagctttgcctttgactgtttttgttaagcctgtggttgctattacacatgtggaatattttagaaaagtatccagtatcacccttgagactacaaaaagacacataagctagatggtgtagactaaaaatgcatctttaataactcaatctaggtgtctacatttagttaagtcttagtctgagttttagtgcagtgttataatacttttctttgtctatatatttgttaaaataaattttccagataaacagaagatcgttcagcatgtaaaagaaattatttatttatttatttattttttgccaacaccttaaggtaggtttctttaaaaaaaaaaaacaaaaagaaaaaaacaaaaaa

SEQ ID NO: 146614 - DNA, 4084 bp, Homo sapiens
  Payload ID: 9004
  Gene Symbol: KIDINS220
  Gene Name: kinase D-interacting substrate, 220kDa
  ENST ID: ENST00000489024
  CDS Start-End: 170-4084
gttcgcggagagggaagaatatggccgccgggtgtggtgagggcgacgcgcttgcagtcgccgtctcttgcttccccgtcctctgacatcgcctgcagccgagcgggcccgttccgccggagctgaggaccaggtattcaaataaagttaattgcagctttctgtgaaaatgtcagttttgatatcacagagcgtcataaattatgtagaggaagaaaacattcctgctctgaaagctcttcttgaaaaatgcaaagatgtagatgagagaaatgagtgtggccagactccactgatgatagctgccgaacaaggcaatctggaaatagtgaaggaattaattaagaatggagctaactgcaatctggaagatttggataattggacagcacttatatctgcatcgaaagaagggcatgtgcacatcgtagaggaactactgaaatgtggggttaacttggagcaccgtgatatgggaggatggacagctcttatgtgggcatgttacaaaggccgtactgacgtagtagagttgcttctttctcatggtgccaatccaagtgtcactggtctgcagtacagtgtttacccaatcatttgggcagcagggagaggccatgcagatatagttcatcttttactgcaaaatggtgctaaagtcaactgctctgataagtatggaaccacccctttagtttgggctgcacgaaagggtcatttggaatgtgtgaaacatttattggccatgggagctgatgtggatcaagaaggagctaattcaatgactgcacttattgtggcagtgaaaggaggttacacacagtcagtaaaagaaattttgaagaggaatccaaatgtaaacttaacagataaagatggaaatacagctttgatgattgcatcaaaggagggacatacggagattgtgcaggatctgctcgacgctggaacatatgtgaacatacctgacaggagtggggatactgtgttgattggcgctgtcagaggtggtcatgttgaaattgttcgagcgcttctccaaaaatatgctgatatagacattagaggacaggataataaaactgctttgtattgggctgttgagaaaggaaatgcaacaatggtgagagatatcttacagtgcaatcctgacactgaaatatgcacaaaggatggtgaaacgccacttataaaggctaccaagatgagaaacattgaagtggtggagctgctgctagataaaggtgctaaagtgtctgctgtagataagaaaggagatactcccttgcatattgctattcgtggaaggagccggaaactggcagaactgcttttaagaaatcccaaagatgggcgattactttataggcccaacaaagcaggcgagactccttataatattgactgtagccatcagaagagtattttaactcaaatatttggagccagacacttgtctcctactgaaacagacggtgacatgcttggatatgatttatatagcagtgccctggcagatattctcagtgagcctaccatgcagccacccatttgtgtggggttatatgcacagtggggaagtgggaaatctttcttactcaagaaactagaagacgaaatgaaaaccttcgccggacaacagattgagcctctctttcagttctcatggctcatagtgtttcttaccctgctactttgtggagggcttggtttattgtttgccttcacggtccacccaaatcttggaatagcagtgtcactgagcttcttggctctcttatatatattctttattgtcatttactttggtggacgaagagaaggagagagttggaattgggcctgggtcctcagcactagattggcaagacatattggatatttggaactcctccttaaattgatgtttgtgaatccacctgagttgccagagcagactactaaagctttacctgtgaggtttttgtttacagattacaatagactgtccagtgtaggtggagaaacttctctggctgaaatgattgcaaccctctcggatgcttgtgaaagagagtttggctttttggcaaccaggctttttcgagtattcaagactgaagatactcagggtaaaaagaaatggaaaaaaacatgttgtctcccatcttttgtcatcttcctttttatcattggctgcattatatctggaattactcttctggctatatttagagttgacccaaagcatctgactgtaaatgctgtcctcatatcaatcgcatctgtagtgggattggcctttgtgttgaactgtcgtacatggtggcaagtgctggactcgctcctgaattcccaaagaaaacgcctccataatgcagcctccaaactgcacaaattgaaaagtgaaggattcatgaaagttcttaaatgtgaagtggaattgatggccaggatggcaaaaaccattgacagcttcactcagaatcagacaaggctggtggtcatcatcgatggattagatgcctgtgagcaggacaaagtccttcagatgctggacactgtccgagttctgttttcaaaaggcccgttcattgccatttttgcaagtgatccacatattatcataaaggcaattaaccagaacctcaatagtgtgcttcgggattcaaatataaatggccatgactacatgcgcaacatagtccacttgcctgtgttccttaatagtcgtggactaagcaatgcaagaaaatttctcgtaacttcagcaacaaatggagacgttccatgctcagatactacagggatacaggaagatgctgacagaagagtttcacagaacagccttggggagatgacaaaacttggtagcaagacagccctcaatagacgggacacttaccgaagaaggcagatgcagaggaccatcactcgccagatgtcctttgatcttacaaaactgctggttaccgaggactggttcagtgacatcagtccccagaccatgagaagattacttaatattgtttctgtgacaggacgattactgagagccaatcagattagtttcaactgggacaggcttgctagctggatcaaccttactgagcagtggccataccggacttcatggctcatattatatttggaagagactgaaggtattccagatcaaatgacattaaaaaccatctacgaaagaatatcaaagaatattccaacaactaaggatgttgagccacttcttgaaattgatggagatataagaaattttgaagtgtttttgtcttcaaggaccccagttcttgtggctcgagatgtaaaagtctttttgccatgcactgtaaacctagatcccaaactacgggaaattattgcagatgttcgtgctgccagagagcagatcagtattggaggactggcgtaccccccgctccctctacatgagggtcctcctagggcgccatcagggtacagccagcccccatccgtgtgctcttccacgtccttcaatgggcccttcgcaggtggagtggtgtcaccacagcctcacagcagctattacagcggcatgacgggccctcagcatcccttctacaacagggggtcaggcccagccccaggcccagtggtattactgaattcactgaatgtggatgcagtatgtgagaagctgaaacaaatagaagggctggaccagagtatgctgcctcagtattgtaccacgatcaaaaaggcaaacataaatggccgtgtgttagctcagtgtaacattgatgagctgaagaaagagatgaatatgaattttggagactggcaccttttcagaagcacagtactagaaatgagaaacgcagaaagccacgtggtccctgaagacccacgtttcctcagtgagagcagcagtggcccagccccgcacggtgagcctgctcgccgcgcttcccacaacgagctgcctcacaccgagctctccagccagacgccctacacactcaacttcagcttcgaagagctgaacacgcttggcctggatgaaggtgcccctcgtcacagtaatctaagttggcagtcacaaactcgcagaaccccaagtctttcg

SEQ ID NO: 146615 - DNA, 3220 bp, Homo sapiens
  Payload ID: 9004
  Gene Symbol: KIDINS220
  Gene Name: kinase D-interacting substrate, 220kDa
  ENST ID: ENST00000496383
  CDS Start-End: 1-3174
gatctgctcgacgctggaacatatgtgaacatacctgacaggagtggggatactgtgttgattggcgctgtcagaggtggtcatgttgaaattgttcgagcgcttctccaaaaatatgctgatatagacattagaggacaggataataaaactgctttgtattgggctgttgagaaaggaaatgcaacaatggtgagagatatcttacagtgcaatcctgacactgaaatatgcacaaaggatggtgaaacgccacttataaaggctaccaagatgagaaacattgaagtggtggagctgctgctagataaaggtgctaaagtgtctgctgtagataagaaaggagatactcccttgcatattgctattcgtggaaggagccggaaactggcagaactgcttttaagaaatcccaaagatgggcgattactttataggcccaacaaagcaggcgagactccttataatattgactgtagccatcagaagagtattttaactcaaatatttggagccagacacttgtctcctactgaaacagacggtgacatgcttggatatgatttatatagcagtgccctggcagatattctcagtgagcctaccatgcagccacccatttgtgtggggttatatgcacagtggggaagtgggaaatctttcttactcaagaaactagaagacgaaatgaaaaccttcgccggacaacagattgagcctctctttcagttctcatggctcatagtgtttcttaccctgctactttgtggagggcttggtttattgtttgccttcacggtccacccaaatcttggaatagcagtgtcactgagcttcttggctctcttatatatattctttattgtcatttactttggtggacgaagagaaggagagagttggaattgggcctgggtcctcagcactagattggcaagacatattggatatttggaactcctccttaaattgatgtttgtgaatccacctgagttgccagagcagactactaaagctttacctgtgaggtttttgtttacagattacaatagactgtccagtgtaggtggagaaacttctctggctgaaatgattgcaaccctctcggatgcttgtgaaagagagtttggctttttggcaaccaggctttttcgagtattcaagactgaagatactcagggtaaaaagaaatggaaaaaaacatgttgtctcccatcttttgtcatcttcctttttatcattggctgcattatatctggaattactcttctggctatatttagagttgacccaaagcatctgactgtaaatgctgtcctcatatcaatcgcatctgtagtgggattggcctttgtgttgaactgtcgtacatggtggcaagtgctggactcgctcctgaattcccaaagaaaacgcctccataatgcagcctccaaactgcacaaattgaaaagtgaaggattcatgaaagttcttaaatgtgaagtggaattgatggccaggatggcaaaaaccattgacagcttcactcagaatcagacaaggctggtggtcatcatcgatggattagatgcctgtgagcaggacaaagtccttcagatgctggacactgtccgagttctgttttcaaaaggcccgttcattgccatttttgcaagtgatccacatattatcataaaggcaattaaccagaacctcaatagtgtgcttcgggattcaaatataaatggccatgactacatgcgcaacatagtccacttgcctgtgttccttaatagtcgtggactaagcaatgcaagaaaatttctcgtaacttcagcaacaaatggagacgttccatgctcagatactacagggatacaggaagatgctgacagaagagtttcacagaacagccttggggagatgacaaaacttggtagcaagacagccctcaatagacgggacacttaccgaagaaggcagatgcagaggaccatcactcgccagatgtcctttgatcttacaaaactgctggttaccgaggactggttcagtgacatcagtccccagaccatgagaagattacttaatattgtttctgtgacaggacgattactgagagccaatcagattagtttcaactgggacaggcttgctagctggatcaaccttactgagcagtggccataccggacttcatggctcatattatatttggaagagactgaaggtattccagatcaaatgacattaaaaaccatctacgaaagaatatcaaagaatattccaacaactaaggatgttgagccacttcttgaaattgatggagatataagaaattttgaagtgtttttgtcttcaaggaccccagttcttgtggctcgagatgtaaaagtctttttgccatgcactgtaaacctagatcccaaactacgggaaattattgcagatgttcgtgctgccagagagcagatcagtattggaggactggcgtaccccccgctccctctacatgagggtcctcctagggcgccatcagggtacagccagcccccatccgtgtgctcttccacgtccttcaatgggcccttcgcaggtggagtggtgtcaccacagcctcacagcagctattacagcggcatgacgggccctcagcatcccttctacaacagggggtcaggcccagccccaggcccagtggtattactgaattcactgaatgtggatgcagtatgtgagaagctgaaacaaatagaagggctggaccagagtatgctgcctcagtattgtaccacgatcaaaaaggcaaacataaatggccgtgtgttagctcagtgtaacattgatgagctgaagaaagagatgaatatgaattttggagactggcaccttttcagaagcacagtactagaaatgagaaacgcagaaagccacgtggtccctgaagacccacgtttcctcagtgagagcagcagtggcccagccccgcacggtgagcctgctcgccgcgcttcccacaacgagctgcctcacaccgagctctccagccagacgccctacacactcaacttcagcttcgaagagctgaacacgcttggcctggatgaaggtgcccctcgtcacagtaatctaagttggcaggaagaaaatgctggccttgagatagatagctcttcagaggatccagattaaactaagttcgagtcacttctcacagttgacttcctcaccaaataat

SEQ ID NO: 146616 - DNA, 5831 bp, Homo sapiens
  Payload ID: 9005
  Gene Symbol: KDR
  Gene Name: kinase insert domain receptor
  Uniprot ID: P35968
  ENST ID: ENST00000263923
  CDS Start-End: 297-4367
tcccgggaccccgggagagcggtcaatgtgtggtcgctgcgtttcctctgcctgcgccgggcatcacttgcgcgccgcagaaagtccgtctggcagcctggatatcctctcctaccggcacccgcagacgcccctgcagccgcggtcggcgcccgggctccctagccctgtgcgctcaactgtcctgcgctgcggggtgccgcgagttccacctccgcgcctccttctctagacaggcgctgggagaaagaaccggctcccgagttctgggcatttcgcccggctcgaggtgcaggatgcagagcaaggtgctgctggccgtcgccctgtggctctgcgtggagacccgggccgcctctgtgggtttgcctagtgtttctcttgatctgcccaggctcagcatacaaaaagacatacttacaattaaggctaatacaactcttcaaattacttgcaggggacagagggacttggactggctttggcccaataatcagagtggcagtgagcaaagggtggaggtgactgagtgcagcgatggcctcttctgtaagacactcacaattccaaaagtgatcggaaatgacactggagcctacaagtgcttctaccgggaaactgacttggcctcggtcatttatgtctatgttcaagattacagatctccatttattgcttctgttagtgaccaacatggagtcgtgtacattactgagaacaaaaacaaaactgtggtgattccatgtctcgggtccatttcaaatctcaacgtgtcactttgtgcaagatacccagaaaagagatttgttcctgatggtaacagaatttcctgggacagcaagaagggctttactattcccagctacatgatcagctatgctggcatggtcttctgtgaagcaaaaattaatgatgaaagttaccagtctattatgtacatagttgtcgttgtagggtataggatttatgatgtggttctgagtccgtctcatggaattgaactatctgttggagaaaagcttgtcttaaattgtacagcaagaactgaactaaatgtggggattgacttcaactgggaatacccttcttcgaagcatcagcataagaaacttgtaaaccgagacctaaaaacccagtctgggagtgagatgaagaaatttttgagcaccttaactatagatggtgtaacccggagtgaccaaggattgtacacctgtgcagcatccagtgggctgatgaccaagaagaacagcacatttgtcagggtccatgaaaaaccttttgttgcttttggaagtggcatggaatctctggtggaagccacggtgggggagcgtgtcagaatccctgcgaagtaccttggttacccacccccagaaataaaatggtataaaaatggaataccccttgagtccaatcacacaattaaagcggggcatgtactgacgattatggaagtgagtgaaagagacacaggaaattacactgtcatccttaccaatcccatttcaaaggagaagcagagccatgtggtctctctggttgtgtatgtcccaccccagattggtgagaaatctctaatctctcctgtggattcctaccagtacggcaccactcaaacgctgacatgtacggtctatgccattcctcccccgcatcacatccactggtattggcagttggaggaagagtgcgccaacgagcccagccaagctgtctcagtgacaaacccatacccttgtgaagaatggagaagtgtggaggacttccagggaggaaataaaattgaagttaataaaaatcaatttgctctaattgaaggaaaaaacaaaactgtaagtacccttgttatccaagcggcaaatgtgtcagctttgtacaaatgtgaagcggtcaacaaagtcgggagaggagagagggtgatctccttccacgtgaccaggggtcctgaaattactttgcaacctgacatgcagcccactgagcaggagagcgtgtctttgtggtgcactgcagacagatctacgtttgagaacctcacatggtacaagcttggcccacagcctctgccaatccatgtgggagagttgcccacacctgtttgcaagaacttggatactctttggaaattgaatgccaccatgttctctaatagcacaaatgacattttgatcatggagcttaagaatgcatccttgcaggaccaaggagactatgtctgccttgctcaagacaggaagaccaagaaaagacattgcgtggtcaggcagctcacagtcctagagcgtgtggcacccacgatcacaggaaacctggagaatcagacgacaagtattggggaaagcatcgaagtctcatgcacggcatctgggaatccccctccacagatcatgtggtttaaagataatgagacccttgtagaagactcaggcattgtattgaaggatgggaaccggaacctcactatccgcagagtgaggaaggaggacgaaggcctctacacctgccaggcatgcagtgttcttggctgtgcaaaagtggaggcatttttcataatagaaggtgcccaggaaaagacgaacttggaaatcattattctagtaggcacggcggtgattgccatgttcttctggctacttcttgtcatcatcctacggaccgttaagcgggccaatggaggggaactgaagacaggctacttgtccatcgtcatggatccagatgaactcccattggatgaacattgtgaacgactgccttatgatgccagcaaatgggaattccccagagaccggctgaagctaggtaagcctcttggccgtggtgcctttggccaagtgattgaagcagatgcctttggaattgacaagacagcaacttgcaggacagtagcagtcaaaatgttgaaagaaggagcaacacacagtgagcatcgagctctcatgtctgaactcaagatcctcattcatattggtcaccatctcaatgtggtcaaccttctaggtgcctgtaccaagccaggagggccactcatggtgattgtggaattctgcaaatttggaaacctgtccacttacctgaggagcaagagaaatgaatttgtcccctacaagaccaaaggggcacgattccgtcaagggaaagactacgttggagcaatccctgtggatctgaaacggcgcttggacagcatcaccagtagccagagctcagccagctctggatttgtggaggagaagtccctcagtgatgtagaagaagaggaagctcctgaagatctgtataaggacttcctgaccttggagcatctcatctgttacagcttccaagtggctaagggcatggagttcttggcatcgcgaaagtgtatccacagggacctggcggcacgaaatatcctcttatcggagaagaacgtggttaaaatctgtgactttggcttggcccgggatatttataaagatccagattatgtcagaaaaggagatgctcgcctccctttgaaatggatggccccagaaacaatttttgacagagtgtacacaatccagagtgacgtctggtcttttggtgttttgctgtgggaaatattttccttaggtgcttctccatatcctggggtaaagattgatgaagaattttgtaggcgattgaaagaaggaactagaatgagggcccctgattatactacaccagaaatgtaccagaccatgctggactgctggcacggggagcccagtcagagacccacgttttcagagttggtggaacatttgggaaatctcttgcaagctaatgctcagcaggatggcaaagactacattgttcttccgatatcagagactttgagcatggaagaggattctggactctctctgcctacctcacctgtttcctgtatggaggaggaggaagtatgtgaccccaaattccattatgacaacacagcaggaatcagtcagtatctgcagaacagtaagcgaaagagccggcctgtgagtgtaaaaacatttgaagatatcccgttagaagaaccagaagtaaaagtaatcccagatgacaaccagacggacagtggtatggttcttgcctcagaagagctgaaaactttggaagacagaaccaaattatctccatcttttggtggaatggtgcccagcaaaagcagggagtctgtggcatctgaaggctcaaaccagacaagcggctaccagtccggatatcactccgatgacacagacaccaccgtgtactccagtgaggaagcagaacttttaaagctgatagagattggagtgcaaaccggtagcacagcccagattctccagcctgactcggggaccacactgagctctcctcctgtttaaaaggaagcatccacacccccaactcctggacatcacatgagaggtgctgctcagattttcaagtgttgttctttccaccagcaggaagtagccgcatttgattttcatttcgacaacagaaaaaggacctcggactgcagggagccagtcttctaggcatatcctggaagaggcttgtgacccaagaatgtgtctgtgtcttctcccagtgttgacctgatcctctttttcattcatttaaaaagcatttatcatgccccctgctgcgggtctcaccatgggtttagaacaaagacgttcaagaaatggccccatcctcaaagaagtagcagtacctggggagctgacacttctgtaaaactagaagataaaccaggcaatgtaagtgttcgaggtgttgaagatgggaaggatttgcagggctgagtctatccaagaggctttgtttaggacgtgggtcccaagccaagccttaagtgtggaattcggattgatagaaaggaagactaacgttaccttgctttggagagtactggagcctgcaaatgcattgtgtttgctctggtggaggtgggcatggggtctgttctgaaatgtaaagggttcagacggggtttctggttttagaaggttgcgtgttcttcgagttgggctaaagtagagttcgttgtgctgtttctgactcctaatgagagttccttccagaccgttacgtgtctcctggccaagccccaggaaggaaatgatgcagctctggctccttgtctcccaggctgatcctttattcagaataccacaaagaaaggacattcagctcaaggctccctgccgtgttgaagagttctgactgcacaaaccagcttctggtttcttctggaatgaataccctcatatctgtcctgatgtgatatgtctgagactgaatgcgggaggttcaatgtgaagctgtgtgtggtgtcaaagtttcaggaaggattttacccttttgttcttccccctgtccccaacccactctcaccccgcaacccatcagtattttagttatttggcctctactccagtaaacctgattgggtttgttcactctctgaatgattattagccagacttcaaaattattttatagcccaaattataacatctattgtattatttagacttttaacatatagagctatttctactgatttttgcccttgttctgtcctttttttcaaaaaagaaaatgtgttttttgtttggtaccatagtgtgaaatgctgggaacaatgactataagacatgctatggcacatatatttatagtctgtttatgtagaaacaaatgtaatatattaaagccttatatataatgaactttgtactattcacattttgtatcagtattatgtagcataacaaaggtcataatgctttcagcaattgatgtcattttattaaagaacattgaaaaacttgaaggaa

SEQ ID NO: 146617 - DNA, 6793 bp, Homo sapiens
  Payload ID: 9006
  Gene Symbol: KNDC1
  Gene Name: kinase non-catalytic C-lobe domain (KIND) containing 1
  Uniprot ID: Q76NI1
  ENST ID: ENST00000304613
  CDS Start-End: 22-5271
ggtgcgcggcgcggccgcaggatgcaggccatggacccggccgcggcggatctttacgaggaggacggcaaagacctggacttctacgacttcgagccgctgcccaccctccccgaggacgaggagaacgtgtctctggctgacatcctctccctgcgggaccgcggcctcagcgagcaggaagcctgggccgtgtgcctggagtgcagcctgtccatgcggagcgtggcccacgccgccatcttccagagcctgtgcatcacgcccgacaccctggccttcaacaccagcgggaacgtgtgtttcatggagcagctcagcgacgaccctgagggtgccttcgttccccccgagttcgacgtgaccgggaacacctttgaggcgcacatctactctctgggggccacgctgaaggccgccctcgagtacgtggcagagcccacactggaacccaggctgagccaagacctcgaggcgctgctgagccggatgcaggcggaggaccccggggaccggccggaccttgagagcatcatcgcgctgtgtgaagagaagctgcagctcacatcctcctgtcgcgtgtgccggagcctctctgctgtggggaggagggtcctctccatcgagtccttcggagcgctgcaggatgtcagcgagagcagctggcgggagagacctgccccaggaaacgctgggcccaggaggccgcccggggaccccagcactgacccggaggttctgccgacccccgaaggcccggagtctgagacgagccggggccccagagcctccccaaccaaggctctgctgtccaccccggtgagaaatggcgagagccacagccgggaggggctggccggcctcgtcctggatgccgagcgcaccctcggggagctggacagagacgccctcaggagaagccgcctgcggaaggtgcagacgttccctaggctgctgtccgacagccccgaggccaccctctgcctgccgctgacccgcgggaaaagccagctgcccatatcggaattattctctccggaccccaggaaggcctttctggacaggaaaaatggcctttctagcttccaggctcagcccaaatgcaggctgtggccggagcaggagccggaacaccagctgggacgggttccctgtgcaggccgcagcacggacaggggccctggggtgcccggcagtccaggacagcccgagacttcacaccccagccaggggccagcagaggcccctgcagaccctcgagatgctagcggtgaagcccagactcccagggacgatgagagaattccagaaggagctaggcagctggaaagtgcagccgcggagcagtgggtgtccctgcaggacctcctgtcccagctgggccggcccttccgggagtacgagctgtgggccctgtgcctggcctgcctccgcgcactgcagacacgccctgagcacccagcctacctgtgtctggactccgtgctggttgctgaggacggggctgtgctcttccagccaccccctgccaacggttcctatgactcgttctttctggctcccgagctggcagaggagaggctggtaactgaaaaggcctctgtgtactgtgtggccgccgttctgtggaccgcagccaagttcagcgtcccccgcaaccacaagctggccctgccacgcaggctcaagaccctcctcctggacatggccaggcgcagtgccccggagcggccgtccgcggctgaggccatcaaggtgtgcggcagctacctcctccagcgaggcatggacagccggaaaatccttgcccacctcagagcttccatctgccaggtgtaccaggaggaagagaccatcagcctccaaaacgccttctcagtggttgaactgaagcccagtgtggcaccagccccagagcccagcccaggcttcctgccggtgaacagcgacaccgggcttgtggctgtgccagggcccgtgcccggccagcacccctgcggtgaagaagccacccagctgcctgcagcgttcacctccgaggccacgcacttcaagcccattgtcctcgcgcagaacgcaagtgtggccagggaccagcctgccttggcccaggaggagtccgaggagaggggcggccagagggagggagaaggtgaggagaagctctccctggaggcccacgctgggtcccccagcctgaagacgcctgacgggccggtgcctggtccggggccacagggagcagccccagagcctcttggggcgtcagtgcagcgtgactcagcccagggccgcccctgccctccaccccaggccccagcaaaccagccagagggggcctcatcggcagctcccggctctccagtccccgccccgcccacgaaggcatctgcgctgcccgtagagcaagggccggctgagccgatcccacctggagttgcttccgggggcctcaggcccgacgccctggggcccaccacggcccaccacggcccacgccacccgcccaagcccccacgaagcaaggccaccgagcgcccgggccaggagccagagggccccggggccacccctgccggggaacgtgatgaccagagtccagacagtgtcccagagaggccgcggcccgcagaccggaggctctgtctgccctgcgtggatgcctcgccactcccagggaggacggcctgcccgtcgctgcaggaggccacgcgcctcatccaggaggaatttgccttcgatggctacctggacaatgggctggaggctctgatcatgggggagtacatcttcgccttgaaagatctcacctttgccactttctgtggcgccatttccgagaagttctgtgacctgtactgggatgagaagttgctgcagaacctctttaaggtggtcaacgggcaggcgtcaccctccccaagcacggccgaggaggctgggtcacagctcgagggcagccaaagcccccgctccccgtccagcaagaggccgtcgctgcaccgcctgggaaaagagaagccagccatggccaggaccagcagcagggccccctgctcacccacctcggtgtcggatgtggactcggacgcactgtcacggggaaacttcgaggtggggtttcggcctcagaggtccgtaaaagccgagagagcgcagcagcctgaggctggcgaggacagacggccagctggcggggcctcagacgtggaggcagtgacccgactggccaggtccaaaggggtcggcccagccttgtcccccggcccagccggattccagagctgcagccccggctggtgcagcgccttctacgaggccgactgcttcggggccgacgtccacaactacgtgaaggacctggggcggcagcaggcggacggggccctgcccgacgcccagagcccggagctggaacagcagctcatgatggagaaaagaaactaccgcaagaccctgaagttctaccagaaactcttacagaaggaaaagaggaacaaaggttccgacgtcaagaccatgctgtccaagctgaaagggcagctagaagaaatgaaatccagggtgcaattcctcagcttggtcaagaagtatctgcaggtcatgtacgcggaacgctggggcctggagccctgcaccctcccagtgatcgtgaacatcgcggccgcaccctgcgacacgctggacttcagccccctggacgagtcctcctcgctcatcttctacaacgtcaacaagcacccgggcggccggcagaaggcccgcatcctgcaggccggcacgccgctggggctcatggcctacctgtactccagtgatgccttcctggagggttatgtgcagcaattcctctacaccttccgctacttctgcacaccccacgacttcctgcacttcctcctcgaccgcatcaacagcacgctgaccagggcccaccaggaccccacctcgaccttcaccaagatctacaggcggagcctctgcgtcctgcaggcctgggtggaggactgctacgctgtggacttccctcggaacagcgggctgctggggaagctagaggacttcatctcctccaagatcctacccctggacggctctgccaagcacctgctgggcctcctggaggtgggcatggaccggcgggccgagggcaaccctcgcggcacagacctggagaaccccagggaggccgaggaggatgccagacccttcaacgccctctgtaagaggctctcagaggacggcatctccaggaagagcttcccctggaggctgccccgaggcaacgggctggtgctgccgccacacaaggagcgcccctacaccattgctgccgccctgcccaagccctgcttcctcgaggacttctacggcccctgcgccaagaccagtgagaaggggccctacttcctgacggagtacagcactcaccagctcttcagccagctcacgctgctacagcaggagttgtttcaaaagtgccacccggtccacttcctgaactcacgggccctgggcgtcatggacaagagcactgccatccccaaagccagctcttctgagtctctttcggccaaaacctgcagcttatttctgcccaattacgttcaggacaagtatctgttacagcttctaagaaacgcagatgacgtcagcacctgggtggctgcagagattgtgaccagccacacctccaagctgcaggtgaacttgctgtccaaatttttgctgattgcaaaatcttgctatgagcagagaaacttcgcgacagccatgcagatcctgagcgggctggagcacctggccgtgaggcagtcccctgcctggagaattctgcctgcaaagatagcagaggtcatggaggagctgaaagccgtggaggtcttcctgaagagcgacagcctgtgtctgatggaagggcggcgcttccgggcgcagcccaccctgccctcggcccacctcctggccatgcacatccagcagctggagacaggcggcttcaccatgaccaacggggcccacaggtggagcaagctcaggaacatcgcaaaggtggtgagccaggtgcacgcgttccaggagaacccttacaccttcagccccgaccccaagctccagtcgtacctcaagcagaggattgcccgcttcagcggtgccgacatttccacactcgccgcagatagcagggccaacttccaccaggtctccagcgagaagcactcacggaagattcaggacaagctacggaggatgaaggctacattccagtagccgagctcgggcctggtgtggaattccagatccgaatccgactgtggggggcgggctgggaggtgggagccgcgtctcaggcccggccgttatcaaggcccctccgcccccgaaccctggggagctggaccaggaggtggaggctcaggggaccccatggggacaggcagagctggtctcctcccagcagacggagccaggacgggcacaagagtcttggaggtttgcgtgtttctgctagaattaaaaagttaaatttaaaaatgaaaatgaaagacagcttcccaggagttttgtgcctgtctgcgcctctcacacacagataagtggctcttacccagctctcagtgactcccccacaaaacagcaacagcctccaccgccaactcaacaaacttcagagtagctcctccctgagcaggtttctgagccagcctgggttggctgagcaacgaagggccaaagctgacctctgagtggccaactgcagctcccagggactccgagacctccggtccgagaccctgcctgggttcaccccccacaacccagacccagaaccgctctccccttccctgcccagtgcccctcctccccagcccagacccccaggtgcccaaggcctgctgctggagcaggcaccttgggctgggcctgctcccccagggcccagggccccccagcttagaacagcccttggtgaggtggtcatgcccgggcaaaggccctgcttcctggaaaggacactcagagcagctccaagacagaggctctgtggcgggggtccctgagagtgcccccacccatctcatgccccagggaccgccactgcccaccgcctccagcagccatgcatgtgcgcccgcagccctgcctccacagctcgccacacactcacgcttcgccagagacaggaagtgcgctgcctccacggccccttgcccttgctcaggttcttggaccccaggcagctggtgtggagccccttggccagggccatgggagtcccgcgcagtcagctccacattggcctctgcagctgggtgaccagagccccgggcacggccccagctccgtggggctctcacggtgccaatcacaagacccagggttgtgcttttgagttttagaattagtcattctttagagcagccagctagtggcatttctaggaaaactgtgacctgtgacaaatcgctgcatttttaatgtcaagatgtgttttcccacataaattcaccggagacatccgggccccgcttcgatgtaacatgagaggaagtcggcgtcctggccacgaaatgcagttcacttttttttaggcttttatatggattatgttttgctgacccacgcccgcattttcagattttgtatctaacagacagtgctcagtgcaaatcaacattccagcggtcaggactgaccccggggcagcactgggctcaggcttcagcgcgactgtccgcatggctccctcccgtcctggcaccaatttctgaataaagtcctttctaccagc

SEQ ID NO: 146618 - DNA, 3925 bp, Homo sapiens
  Payload ID: 9006
  Gene Symbol: KNDC1
  Gene Name: kinase non-catalytic C-lobe domain (KIND) containing 1
  Uniprot ID: Q76NI1
  ENST ID: ENST00000368571
  CDS Start-End: 291-3716
gttccgtggctctgacgtccagggaacagcaggacgactcttgaaacaaaatgagacgtggtctaaagccctttccctgacccacgcgttgaaacgctgccacgagtcgtccgtttccccagggaatcgtctcggtgggggtgccggggcctggctgggggtcctgccgggctcacggccagggccggtcttggcaggagaacgtgtctctggctgacatcctctccctgcgggaccgcggcctcagcgagcaggaagcctgggccgtgtgcctggagtgcagcctgtccatgcggagcgtggcccacgccgccatcttccagagcctgtgcatcacgcccgacaccctggccttcaacaccagcgggaacgtgtgtttcatggagcagctcagcgacgaccctgagggtgccttcgttccccccgagttcgacgtgaccgggaacacctttgaggcgcacatctactctctgggggccacgctgaaggccgccctcgagtacgtggcagagcccacactggaacccaggctgagccaagacctcgaggcgctgctgagccggatgcaggcggaggaccccggggaccggccggaccttgagagcatcatcgcgctgtgtgaagagaagctgcagctcacatcctcctgtcgcgtgtgccggagcctctctgctgtggggaggagggtcctctccatcgagtccttcggagcgctgcaggatgtcagcgagagcagctggcgggagagacctgccccaggaaacgctgggcccaggaggccgcccggggaccccagcactgacccggaggttctgccgacccccgaaggcccggagtctgagacgagccggggccccagagcctccccaaccaaggctctgctgtccaccccggtgagaaatggcgagagccacagccgggaggggctggccggcctcgtcctggatgccgagcgcaccctcggggagctggacagagacgccctcaggagaagccgcctgcggaaggtgcagacgttccctaggctgctgtccgacagccccgaggccaccctctgcctgccgctgacccgcgggaaaagccagctgcccatatcggaattattctctccggaccccaggaaggcctttctggacaggaaaaatggcctttctagcttccaggctcagcccaaatgcaggctgtggccggagcaggagccggaacaccagctgggacgggttccctgtgcaggccgcagcacggacaggggccctggggtgcccggcagtccaggacagcccgagacttcacaccccagccaggggccagcagaggcccctgcagaccctcgagatgctagcggtgaagcccagactcccagggacgatgagagaattccagaaggagctaggcagctggaaagtgcagccgcggagcagtgggtgtccctgcaggacctcctgtcccagctgggccggcccttccgggagtacgagctgtgggccctgtgcctggcctgcctccgcgcactgcagacacgccctgagcacccagcctacctgtgtctggactccgtgctggttgctgaggacggggctgtgctcttccagccaccccctgccaacggttcctatgactcgttctttctggctcccgagctggcagaggagaggctggtaactgaaaaggcctctgtgtactgtgtggccgccgttctgtggaccgcagccaagttcagcgtcccccgcaaccacaagctggccctgccacgcaggctcaagaccctcctcctggacatggccaggcgcagtgccccggagcggccgtccgcggctgaggccatcaaggtgtgcggcagctacctcctccagcgaggcatggacagccggaaaatccttgcccacctcagagcttccatctgccaggtgtaccaggaggaagagaccatcagcctccaaaacgccttctcagtggttgaactgaagcccagtgtggcaccagccccagagcccagcccaggcttcctgccggtgaacagcgacaccgggcttgtggctgtgccagggcccgtgcccggccagcacccctgcggtgaagaagccacccagctgcctgcagcgttcacctccgaggccacgcacttcaagcccattgtcctcgcgcagaacgcaagtgtggccagggaccagcctgccttggcccaggaggagtccgaggagaggggcggccagagggagggagaaggtgaggagaagctctccctggaggcccacgctgggtcccccagcctgaagacgcctgacgggccggtgcctggtccggggccacagggagcagccccagagcctcttggggcgtcagtgcagcgtgactcagcccagggccgcccctgccctccaccccaggccccagcaaaccagccagagggggcctcatcggcagctcccggctctccagtccccgccccgcccacgaaggcatctgcgctgcccgtagagcaagggccggctgagccgatcccacctggagttgcttccgggggcctcaggcccgacgccctggggcccaccacggcccaccacggcccacgccacccgcccaagcccccacgaagcaaggccaccgagcgcccgggccaggagccagagggccccggggccacccctgccggggaacgtgatgaccagagtccagacagtgtcccagagaggccgcggcccgcagaccggaggctctgtctgccctgcgtggatgcctcgccactcccagggaggacggcctgcccgtcgctgcaggaggccacgcgcctcatccaggaggaatttgccttcgatggctacctggacaatgggctggaggctctgatcatgggggagtacatcttcgccttgaaagatctcacctttgccactttctgtggcgccatttccgagaagttctgtgacctgtactgggatgagaagttgctgcagaacctctttaaggtggtcaacgggcaggcgtcaccctccccaagcacggccgaggaggctgggtcacagctcgagggcagccaaagcccccgctccccgtccagcaagaggccgtcgctgcaccgcctgggaaaagagaagccagccatggccaggaccagcagcagggccccctgctcacccacctcggtgtcggatgtggactcggacgcactgtcacggggaaacttcgaggtggggtttcggcctcagaggtccgtaaaagccgagagagcgcagcagcctgaggctggcgaggacagacggccagctggcggggcctcagacgtggaggcagtgacccgactggccaggtccaaaggggtcggcccagccttgtcccccggcccagccggattccagagctgcagccccggctggtgcagcgccttctacgaggccgactgcttcggggccgacgtccacaactacgtgaaggacctggggcggcagcaggcggacggggccctgcccgacgcccagagcccggagctggaacagcagctcatgatggagaaaagaaactaccgcaagaccctgaagttctaccagaaactcttacagaaggaaaagaggaacaaaggttccgacgtcaagaccatgctgtccaagctgaaagggcagctagaagaaatgaaatccagggtgcaattcctcagcttggtcaagaagtatctgcaggcaagtgggctccgggccccgctctgccccgtgaggcagtagcttcagacgggcctcccactgttggatgctgtaaatctgtccgtgtgaagttataaaaggggccctgatttgagggtccaatgccaggaagccctggggcgaggggcagagtgaccaagcgcccgtgtcccgctccggcaggtcatgtacgcggaacgctggggcctggagccctgcaccctcccagtgatcgtgaacatcgcggccgc

SEQ ID NO: 146619 - DNA, 2806 bp, Homo sapiens
  Payload ID: 9007
  Gene Symbol: KSR1
  Gene Name: kinase suppressor of ras 1
  ENST ID: ENST00000268763
  CDS Start-End: 266-2806
ctggacccctgccagggaaggggtcctcagacttgaggttgccagctcagatgtggggctgctgatactaggtgactggactgatgttctgttctagatgaaactccttgaggggaccatttgaaaaggcttgatgtgctgcccaaagcccccttcagagctgacttctccacccccagctgccgtgagccttggctgctgacagctcatagctgagtccctcccgtgaagtcaccttctgctgaagggtacatcctctcccaaggcgaagctggtccgttacatttgtaagcagaggcagtgcaagctgagcgtggctcccggtgagaggaccccagagctcaacagctacccccgcttcagcgactggctgtacactttcaacgtgaggccggaggtggtgcaggagatcccccgagacctcacgctggatgccctgctggagatgaatgaggccaaggtgaaggagacgctgcggcgctgtggggccagcggggatgagtgtggccgtctgcagtatgccctcacctgcctgcggaaggtgacaggcctgggaggggagcacaaggaggactccagttggagttcattggatgcgcggcgggaaagtggctcagggccttccacggacaccctctcagcagccagcctgccctggcccccagggagctcccagctgggcagagcaggcaacagcgcccagggcccacgctccatctccgtgtcagctctgcccgcctcagactcccccacccccagcttcagtgagggcctctcagacacctgtattcccctgcacgccagcggccggctgaccccccgtgccctgcacagcttcatcaccccgcccaccacaccccagctgcgacggcacaccaagctgaagccaccacggacgccccccccacccagccgcaaggtcttccagctgctgcccagcttccccacactcacccggagcaagtcccatgagtctcagctggggaaccgcattgatgacgtctcctcgatgaggtttgatctctcgcatggatccccacagatggtacggagggatatcgggctgtcggtgacgcacaggttctccaccaagtcctggctgtcgcaggtctgccacgtgtgccagaagagcatgatatttggagtgaagtgcaagcattgcaggttgaagtgtcacaacaaatgtaccaaagaagcccctgcctgtagaatatccttcctgccactaactcggcttcggaggacagaatctgtcccctcggacatcaacaacccggtggacagagcagccgaaccccattttggaaccctccccaaagcactgacaaagaaggagcaccctccggccatgaatcacctggactccagcagcaacccttcctccaccacctcctccacaccctcctcaccggcgcccttcccgacatcatccaacccatccagcgccaccacgccccccaacccctcacctggccagcgggacagcaggttcaacttcccagctgcctacttcattcatcatagacagcagtttatctttccagtgccatctgctggccattgctggaaatgcctccttattgcagaaagtttaaaggaaaacgctttcaacatttcagcctttgcacacgcagccccgctccctgaagctgccgacggtacccggctcgatgaccagccgaaagcagatgtgttggaagctcacgaagcggaggctgaggagccagaggctggcaagtcagaggcagaagacgatgaggacgaggtggacgacttgccgagctctcgccggccctggcggggccccatctctcgcaaggccagccagaccagcgtgtacctgcaggagtgggacatccccttcgagcaggtagagctgggcgagcccatcgggcagggccgctggggccgggtgcaccgcggccgctggcatggcgaggtggccattcgcctgctggagatggacggccacaaccaggaccacctgaagctcttcaagaaagaggtgatgaactaccggcagacgcggcatgagaacgtggtgctcttcatgggggcctgcatgaacccgccccacctggccattatcaccagcttctgcaaggggcggacgttgcactcgtttgtgagggaccccaagacgtctctggacatcaacaagacgaggcaaatcgctcaggagatcatcaagggcatgggatatcttcatgccaagggcatcgtacacaaagatctcaaatctaagaacgtcttctatgacaacggcaaggtggtcatcacagacttcgggctgtttgggatctcaggcgtggtccgagagggacggcgtgagaaccagctaaagctgtcccacgactggctgtgctatctggcccctgagattgtacgcgagatgacccccgggaaggacgaggatcagctgccattctccaaagctgctgatgtctatgcatttgggactgtttggtatgagctgcaagcaagagactggcccttgaagaaccaggctgcagaggcatccatctggcagattggaagcggggaaggaatgaagcgtgtcctgacttctgtcagcttggggaaggaagtcagtgagatcctgtcggcctgctgggctttcgacctgcaggagagacccagcttcagcctgctgatggacatgctggagaaacttcccaagctgaaccggcggctctcccaccctggacacttctggaagtcagctgacattaacagcagcaaagttgtaccccggtttgaaaggtttggcttgggcgtcctggagtccagtaatccaaagatgtag

SEQ ID NO: 146620 - DNA, 2048 bp, Homo sapiens
  Payload ID: 9007
  Gene Symbol: KSR1
  Gene Name: kinase suppressor of ras 1
  ENST ID: ENST00000398982
  CDS Start-End: 1-1839
cacagcttcatcaccccgcccaccacaccccagctgcgacggcacaccaagctgaagccaccacggacgccccccccacccagccgcaaggtcttccagctgctgcccagcttccccacactcacccggagcaagtcccatgagtctcagctggggaaccgcattgatgacgtctcctcgatgaggtttgatctctcgcatggatccccacagatggtacggagggatatcgggctgtcggtgacgcacaggttctccaccaagtcctggctgtcgcaggtctgccacgtgtgccagaagagcatgatatttggagtgaagtgcaagcattgcaggttgaagtgtcacaacaaatgtaccaaagaagcccctgcctgtagaatatccttcctgccactaactcggcttcggaggacagaatctgtcccctcggacatcaacaacccggtggacagagcagccgaaccccattttggaaccctccccaaagcactgacaaagaaggagcaccctccggccatgaatcacctggactccagcagcaacccttcctccaccacctcctccacaccctcctcaccggcgcccttcccgacatcatccaacccatccagcgccaccacgccccccaacccctcacctggccagcgggacagcaggttcaacttcccagctgcctacttcattcatcatagacagcagtttatctttccagacatttcagcctttgcacacgcagccccgctccctgaagctgccgacggtacccggctcgatgaccagccgaaagcagatgtgttggaagctcacgaagcggaggctgaggagccagaggctggcaagtcagaggcagaagacgatgaggacgaggtggacgacttgccgagctctcgccggccctggcggggccccatctctcgcaaggccagccagaccagcgtgtacctgcaggagtgggacatccccttcgagcaggtagagctgggcgagcccatcgggcagggccgctggggccgggtgcaccgcggccgctggcatggcgaggtggccattcgcctgctggagatggacggccacaaccaggaccacctgaagctcttcaagaaagaggtgatgaactaccggcagacgcggcatgagaacgtggtgctcttcatgggggcctgcatgaacccgccccacctggccattatcaccagcttctgcaaggggcggacgttgcactcgtttgtgagggaccccaagacgtctctggacatcaacaagacgaggcaaatcgctcaggagatcatcaagggcatgggatatcttcatgccaagggcatcgtacacaaagatctcaaatctaagaacgtcttctatgacaacggcaaggtggtcatcacagacttcgggctgtttgggatctcaggcgtggtccgagagggacggcgtgagaaccagctaaagctgtcccacgactggctgtgctatctggcccctgagattgtacgcgagatgacccccgggaaggacgaggatcagctgccattctccaaagctgctgatgtctatgcatttgggactgtttggtatgagctgcaagcaagagactggcccttgaagaaccaggctgcagaggcatccatctggcagattggaagcggggaaggaatgaagcgtgtcctgacttctgtcagcttggggaaggaagtcagtgagatcctgtcggcctgctgggctttcgacctgcaggagagacccagcttcagcctgctgatggacatgctggagaaacttcccaagctgaaccggcggctctcccaccctggacacttctggaagtcagctgagttgtaggcctggctgccttgcatgcaccaggggctttcttcctcctaatcaacaactcagcaccgtgacttctgctaaaatgcaaaatgagatgcgggcactaacccaggggatgccacctctgctgctccagtcgtctctctcgaggctacttcttttgctttgttttaaaaactggccctctgccctctccacgtggcctgcatatgcccaag

SEQ ID NO: 146621 - DNA, 7237 bp, Homo sapiens
  Payload ID: 9007
  Gene Symbol: KSR1
  Gene Name: kinase suppressor of ras 1
  Uniprot ID: Q8IVT5
  ENST ID: ENST00000398988
  CDS Start-End: 446-2734
ctggacccctgccagggaaggggtcctcagacttgaggttgccagctcagatgtggggctgctgatactaggtgactggactgatgttctgttctagatgaaactccttgaggggaccatttgaaaaggcttgatgtgctgcccaaagcccccttcagagctgacttctccacccccagctgccgtgagccttggctgctgacagctcatagctgagtccctcccgtgaagtcaccttctgctgaagggtacatcctctcccaaggcgaagctggtccgttacatttgtaagcagaggcagtgcaagctgagcgtggctcccggtgagaggaccccagagctcaacagctacccccgcttcagcgactggctgtacactttcaacgtgaggccggaggtggtgcaggagatcccccgagacctcacgctggatgccctgctggagatgaatgaggccaaggtgaaggagacgctgcggcgctgtggggccagcggggatgagtgtggccgtctgcagtatgccctcacctgcctgcggaaggtgacaggcctgggaggggagcacaaggaggactccagttggagttcattggatgcgcggcgggaaagtggctcagggccttccacggacaccctctcagcagccagcctgccctggcccccagggagctcccagctgggcagagcaggcaacagcgcccagggcccacgctccatctccgtgtcagctctgcccgcctcagactcccccacccccagcttcagtgagggcctctcagacacctgtattcccctgcacgccagcggccggctgaccccccgtgccctgcacagcttcatcaccccgcccaccacaccccagctgcgacggcacaccaagctgaagccaccacggacgccccccccacccagccgcaaggtcttccagctgctgcccagcttccccacactcacccggagcaagtcccatgagtctcagctggggaaccgcattgatgacgtctcctcgatgaggtttgatctctcgcatggatccccacagatggtacggagggatatcgggctgtcggtgacgcacaggttctccaccaagtcctggctgtcgcaggtctgccacgtgtgccagaagagcatgatatttggagtgaagtgcaagcattgcaggttgaagtgtcacaacaaatgtaccaaagaagcccctgcctgtagaatatccttcctgccactaactcggcttcggaggacagaatctgtcccctcggacatcaacaacccggtggacagagcagccgaaccccattttggaaccctccccaaagcactgacaaagaaggagcaccctccggccatgaatcacctggactccagcagcaacccttcctccaccacctcctccacaccctcctcaccggcgcccttcccgacatcatccaacccatccagcgccaccacgccccccaacccctcacctggccagcgggacagcaggttcaacttcccagctgcctacttcattcatcatagacagcagtttatctttccagtgccatctgctggccattgctggaaatgcctccttattgcagaaagtttaaaggaaaacgctttcaacatttcagcctttgcacacgcagccccgctccctgaagctgccgacggtacccggctcgatgaccagccgaaagcagatgtgttggaagctcacgaagcggaggctgaggagccagaggctggcaagtcagaggcagaagacgatgaggacgaggtggacgacttgccgagctctcgccggccctggcggggccccatctctcgcaaggccagccagaccagcgtgtacctgcaggagtgggacatccccttcgagcaggtagagctgggcgagcccatcgggcagggccgctggggccgggtgcaccgcggccgctggcatggcgaggtggccattcgcctgctggagatggacggccacaaccaggaccacctgaagctcttcaagaaagaggtgatgaactaccggcagacgcggcatgagaacgtggtgctcttcatgggggcctgcatgaacccgccccacctggccattatcaccagcttctgcaaggggcggacgttgcactcgtttgtgagggaccccaagacgtctctggacatcaacaagacgaggcaaatcgctcaggagatcatcaagggcatgggatatcttcatgccaagggcatcgtacacaaagatctcaaatctaagaacgtcttctatgacaacggcaaggtggtcatcacagacttcgggctgtttgggatctcaggcgtggtccgagagggacggcgtgagaaccagctaaagctgtcccacgactggctgtgctatctggcccctgagattgtacgcgagatgacccccgggaaggacgaggatcagctgccattctccaaagctgctgatgtctatgcatttgggactgtttggtatgagctgcaagcaagagactggcccttgaagaaccaggctgcagaggcatccatctggcagattggaagcggggaaggaatgaagcgtgtcctgacttctgtcagcttggggaaggaagtcagtgagatcctgtcggcctgctgggctttcgacctgcaggagagacccagcttcagcctgctgatggacatgctggagaaacttcccaagctgaaccggcggctctcccaccctggacacttctggaagtcagctgagttgtaggcctggctgccttgcatgcaccaggggctttcttcctcctaatcaacaactcagcaccgtgacttctgctaaaatgcaaaatgagatgcgggcactaacccaggggatgccacctctgctgctccagtcgtctctctcgaggctacttcttttgctttgttttaaaaactggccctctgccctctccacgtggcctgcatatgcccaagtaactgctctcagaggatcccactaactgagctccctccaaggcagtctgggcagcttctaactaccttcctggacatgactgattgctcccgtgttcttctgagggctggtcttgtttttgtttgggtggctctgtctcactgctaacaccttagtgagatgccttccaccctcctgagcacaccagcctcccactgggtgtgtgcctagtgcggggcgggcggaggttgggagggtgttggcttggcttttaacctgtggggattttgtccaacaaggagtggaatgatttcagagctgccctgaggctggcaccctggtcacaggaaccctctgcgctggctcctgtctcagtcccctctgtagagttagatcagaagacacagaaagttctgtggccatgaaagataccagcttggaagggttgtgtcttcagtggcaccctcagaaaaattgtcttaaagcaaagaggtacctggctccagacaatttttctgatgaaaacaaagtctctgccccgtccccaccctgccaccctggcaaagttacttcctttacagctgcccagtgtaccatagaccagaccccaggtcagcatttgtcaagagcatggctgctgagtcccctgtggcagtcaatgcactgtttaccaaatgcaggtttctgttctccctccccagcaagacctgctgaacccagatctctggaatggggccctaggaatttgcatttcaacctgcttcccaggtggccctgatgcaccccagtattagagtttattgctaaaaggaacatgccctgtcactcctggtatcctgggagtcatgtttctcttctctctcagttctacttggagcaagagctttcctgggctgcaaatgagaaaacaattcctaggaacccacagcagtactgagcatgctgggagcttgggacttggagatgaatgagccaccgttgctgctccaagtaggactacttggagtgtagctgaggccttggacgcagtatgaccaggggcagctctgccagggctgttggccaatcagtcattttcatttcttgttggaggccaggtcctctgctgaactcatttcctagctagtgttaccctaattctgatgaagatcaatggggctataattcttgtttttgttcctctttgcagcattaacagcagcaaagttgtaccccggtttgaaaggtttggcttgggcgtcctggagtccagtaatccaaagatgtagccagccatatggtttttcgctgctgatctctttctttttaaaatgtgtttctgaaacatcccaacaaccaccacgacaaaaaaacactgcctgcccagcgctgcaaaccaggagcacacgtcctagattcagactgttggccataaaccccactcgggagatggagctgcacctgctatttcttaaaatgacaccaccaacaaccaaacctgtcatgacagacagcaaatgtttacacgtatatttctcctgagtgaacctgatgttttacaataggtaataataaaaacagtctgtgcagatgcactggcactgacggccaggatggcggaaatggccatcccctctgaggaccttgtaggcggtgagggacccatgctgggccagaaggaagacaaacatggtaattgcagctgttcttggggtagggcggggagcccagaaggtctgatctggcctctgctttttggcccaagactccatcagggaaatctatctagggctctccccttgtcctttcaaagggatactgccccttcctcgtcttgcagaggaaaccctggctaggaactgagctagtttatggagtctggaattcctggagagcttgggttcaccttctcacccctgtaatccaggctgctcctgctggaaaagtagaaacagaatccaaaaaaggtctggactcacccggtggttcccagccagggtttctgctgcaaggtgaggaaacatccatggcttgtacagatgtgagtctttgatgaagcccccaggcaggcaccaaggtgatgggactcagggccttggcttttagatacatcccagtccctgactgacatctgaccatgagggctggatgggtgggaacaaggaggagtagatggcaaaagtacctgagcccacttcccagccacagggtgaccctggcactgtaaaaaccctttgtcagtcatgccagaaggttctagaactgcccacctcttccatttcagtcctgctgaaaccccttagcctatttccgactcctctgtccatgctctgagttcagctgggcagtgtgtgggctatcacccctttcatttagacctacctagctggcccccatctgcagagccttccttagcaccattaggccttctacttgtgtccatttgaagcaggaggggctggatttggaaaagtctttgaagtgagagcaccacgcttgtcttcgttagaaactcttaactgcagaaaaaagttccagatggcaagggagcccttaagtggagattaggttgcattagactccaaaaccagaaaggaaaaagggtgatgggagtggagacgtgattggattcaggcccagaacctgtgaccatgctctgagctcagacttggggagggaggggtgtggctcccaccccttccagttaagacctgcctagcagagccccagtctccagccccttccctagcaccagagtctggtcaaaatgccacagaaaatgagctgctctgccagcaagctgtggagctgcctcctctccaggcctggcatcccttggtcagcccctcctgggagggcacagccgtattacagtgccagtgtgcctggccatcagcatcttcacccttcccagtctgtgtggggaggctgtaaaccccgtggattcagctccgtgtggagtttctgtgctatggtgggactgctcattttgccccatcatccctttggcctcccacacacctgccccttcccagggatcacgtgtgtctccagcctttcacctttctattgcaatggtggcctttgtccaggcaagagcaggcctgatggatgtactggtgagccccacagttggatgtcagctcagccgtccaactgggaggaacagtaggctcagttcctccctgacccctgacaccaggccgcagtgggcatgcacaggcccacagaaagtcagtctgggttttgcttttctcgtgagcatcacagttaaagaagcgctcattgagcaactacagtgcacttggtcttctgcaagtgctgggcacctagagataggaacagtcatggtccctgctcttaaggaactgatgacctggtggggccctgttgtcttcaaggaacccagaagccactgggccccaaaggtggaactgaaggactgggggcagctggctctcagcctgccacctctgcactgcctgcctttaaagaaccccaccccaccccatgatggccccctctgttccccttgtatttcagtgactgtgaattgaggttaggaaggcacacctgcccttctgtgtgctctctccacacgaaggatgacagatactgtgaattcagccctcacggccaactgtgaaggggatggagaaggctgggagggctcggggagagctcttaggggctgcggaagtccccacgggggtctgagagtggagcccaagctttggccctccaggcatccccagtttccagcctcacctctgaagccctgctgcctttaaccaccagagccgcagccccctgggtttctgtctaactcgaagtcttgaatcctagctagtttggggttgtgagcagtgtgtagcaaagttgatctctccatgtcaccaaatcaaaacaccctctgtcatcctacggcatttcctcttgaggtcacagagaggaatggcaagccctggaaacctgtgttattctgtgttgatttggtgtggggggagggtggagacgtaaatgtgaagccagttggagtttgtgctatgcagcagtgttagccaggatctcatcagcgtgcaaacctagcatcttctgtggccacaagccacacacttgctttttttgaatgtgatgtaaaatttgtacagtaaagtttttatattttctatcaactacatttgtcttccagacatgctattaatttaaattaaaatggttagtattaacaaacatgctgtatcgggtttttttgccactggcaagaacatgccctctgtgctaagccaggcctgggtgtctggagtttgtgaataaagttataccaaggtgttc

SEQ ID NO: 146622 - DNA, 2731 bp, Homo sapiens
  Payload ID: 9007
  Gene Symbol: KSR1
  Gene Name: kinase suppressor of ras 1
  Uniprot ID: Q8IVT5
  ENST ID: ENST00000509603
  CDS Start-End: 446-2731
ctggacccctgccagggaaggggtcctcagacttgaggttgccagctcagatgtggggctgctgatactaggtgactggactgatgttctgttctagatgaaactccttgaggggaccatttgaaaaggcttgatgtgctgcccaaagcccccttcagagctgacttctccacccccagctgccgtgagccttggctgctgacagctcatagctgagtccctcccgtgaagtcaccttctgctgaagggtacatcctctcccaaggcgaagctggtccgttacatttgtaagcagaggcagtgcaagctgagcgtggctcccggtgagaggaccccagagctcaacagctacccccgcttcagcgactggctgtacactttcaacgtgaggccggaggtggtgcaggagatcccccgagacctcacgctggatgccctgctggagatgaatgaggccaaggtgaaggagacgctgcggcgctgtggggccagcggggatgagtgtggccgtctgcagtatgccctcacctgcctgcggaaggtgacaggcctgggaggggagcacaaggaggactccagttggagttcattggatgcgcggcgggaaagtggctcagggccttccacggacaccctctcagcagccagcctgccctggcccccagggagctcccagctgggcagagcaggcaacagcgcccagggcccacgctccatctccgtgtcagctctgcccgcctcagactcccccacccccagcttcagtgagggcctctcagacacctgtattcccctgcacgccagcggccggctgaccccccgtgccctgcacagcttcatcaccccgcccaccacaccccagctgcgacggcacaccaagctgaagccaccacggacgccccccccacccagccgcaaggtcttccagctgctgcccagcttccccacactcacccggagcaagtcccatgagtctcagctggggaaccgcattgatgacgtctcctcgatgaggtttgatctctcgcatggatccccacagatggtacggagggatatcgggctgtcggtgacgcacaggttctccaccaagtcctggctgtcgcaggtctgccacgtgtgccagaagagcatgatatttggagtgaagtgcaagcattgcaggttgaagtgtcacaacaaatgtaccaaagaagcccctgcctgtagaatatccttcctgccactaactcggcttcggaggacagaatctgtcccctcggacatcaacaacccggtggacagagcagccgaaccccattttggaaccctccccaaagcactgacaaagaaggagcaccctccggccatgaatcacctggactccagcagcaacccttcctccaccacctcctccacaccctcctcaccggcgcccttcccgacatcatccaacccatccagcgccaccacgccccccaacccctcacctggccagcgggacagcaggttcaacttcccagctgcctacttcattcatcatagacagcagtttatctttccagtgccatctgctggccattgctggaaatgcctccttattgcagaaagtttaaaggaaaacgctttcaacatttcagcctttgcacacgcagccccgctccctgaagctgccgacggtacccggctcgatgaccagccgaaagcagatgtgttggaagctcacgaagcggaggctgaggagccagaggctggcaagtcagaggcagaagacgatgaggacgaggtggacgacttgccgagctctcgccggccctggcggggccccatctctcgcaaggccagccagaccagcgtgtacctgcaggagtgggacatccccttcgagcaggtagagctgggcgagcccatcgggcagggccgctggggccgggtgcaccgcggccgctggcatggcgaggtggccattcgcctgctggagatggacggccacaaccaggaccacctgaagctcttcaagaaagaggtgatgaactaccggcagacgcggcatgagaacgtggtgctcttcatgggggcctgcatgaacccgccccacctggccattatcaccagcttctgcaaggggcggacgttgcactcgtttgtgagggaccccaagacgtctctggacatcaacaagacgaggcaaatcgctcaggagatcatcaagggcatgggatatcttcatgccaagggcatcgtacacaaagatctcaaatctaagaacgtcttctatgacaacggcaaggtggtcatcacagacttcgggctgtttgggatctcaggcgtggtccgagagggacggcgtgagaaccagctaaagctgtcccacgactggctgtgctatctggcccctgagattgtacgcgagatgacccccgggaaggacgaggatcagctgccattctccaaagctgctgatgtctatgcatttgggactgtttggtatgagctgcaagcaagagactggcccttgaagaaccaggctgcagaggcatccatctggcagattggaagcggggaaggaatgaagcgtgtcctgacttctgtcagcttggggaaggaagtcagtgagatcctgtcggcctgctgggctttcgacctgcaggagagacccagcttcagcctgctgatggacatgctggagaaacttcccaagctgaaccggcggctctcccaccctggacacttctggaagtcagctgagctg

SEQ ID NO: 146623 - DNA, 479 bp, Homo sapiens
  Payload ID: 9007
  Gene Symbol: KSR1
  Gene Name: kinase suppressor of ras 1
  ENST ID: ENST00000580163
  CDS Start-End: 342-479
cggccgcggagggaggcgcaggggccgcggccagccgggcgctgcagcagtgcgggcagctccagaagctcatcgacatctccatcggcagcctgcgcgggctgcgcaccaagtgcgctgtgtccaacgacctcacccagcaggagatacggaccctggaggcgaagctggtccgttacatttgtaagcagaggcagtgcaagctgagcgtggctcccggtgagaggaccccagagctcaacagctacccccgcttcagcgactggctgtacactttcaacgtgaggccggaggtggtgcaggagatcccccgagacctcacgctggatgccctgctggagatgaatgaggccaaggtgaaggagacgctgcggcgctgtggggccagcggggatgagtgtggccgtctgcagtatgccctcacctgcctgcggaaggtgacaggcctgggaggggagcacaaggaggactccagttgg

SEQ ID NO: 146624 - DNA, 685 bp, Homo sapiens
  Payload ID: 9007
  Gene Symbol: KSR1
  Gene Name: kinase suppressor of ras 1
  ENST ID: ENST00000577823
  CDS Start-End: 1-296
aggtcttccagctgctgcccagcttccccacactcacccggagcaagtcccatgagtctcagctggggaaccgcattgatgacgtctcctcgatgaggtttgcctgccttcttcctcatctggaaacatcacaggggcagctgactgagccatcctcagaggccaggagcaagctagaggaccaagcgaggcgaggggaaccacaccatgccactgggctagcctggcctgctcctgtgttgatggacatagatcagggagatgcttatataataaaccattgcgcccccctctagcctgtggtctctgaattaggaagtcatgggcacgagctgtcgcctgcggagttcctcagcctgcccatccggcctctttccctgcagatctctcgcatggatccccacagatggtacggagggatatcgggctgtcggtgacgcacaggttctccaccaagtcctggctgtcgcaggtctgccacgtgtgccagaagagcatgatatttggagtgaagtgcaagcattgcaggttgaagtgtcacaacaaatgtaccaaagaagcccctgcctgtagaatatccttcctgccactaactcggcttcggaggacagaatctgtcccctcggacatcaacaacccggtggacagagcagccgaaccccattttggaaccctccccaaagca

SEQ ID NO: 146625 - DNA, 748 bp, Homo sapiens
  Payload ID: 9007
  Gene Symbol: KSR1
  Gene Name: kinase suppressor of ras 1
  ENST ID: ENST00000578981
  CDS Start-End: 179-571
tttttattttcggggggtggcggatgtgctgttctgtcatctcccactttcccatcacctgattcctccacctgtccacacgtgcctgactccatcacatgccggggccggactgcgctcttcccacgcctggtggaatggtcgctgggcactcccagtcgctggaggagccgctactatggaaaaggacgctacggccaccctgactttaagagctcctgtccgattctggaggaatacattaacagcagcaaagttgtaccccggtttgaaaggtttggcttgggcgtcctggagtccagtaatccaaagatgtagccagccatatggtttttcgctgctgatctctttctttttaaaatgtgtttctgaaacatcccaacaaccaccacgacaaaaaaacactgcctgcccagcgctgcaaaccaggagcacacgtcctagattcagactgttggccataaaccccactcgggagatggagctgcacctgctatttcttaaaatgacaccaccaacaaccaaacctgtcatgacagacagcaaatgtttacacgtatatttctcctgagtgaacctgatgttttacaataggtaataataaaaacagtctgtgcagatgcactggcactgacggccaggatggcggaaatggccatcccctctgaggaccttgtaggcggtgagggacccatgctgggccagaaggaagacaaacatggtaattgcagctgttcttggggtaggg

SEQ ID NO: 146626 - DNA, 483 bp, Homo sapiens
  Payload ID: 9007
  Gene Symbol: KSR1
  Gene Name: kinase suppressor of ras 1
  ENST ID: ENST00000580430
  CDS Start-End: 1-420
cgcgagatgacccccgggaaggacgaggatcagctgccattctccaaagctgctgatgtctatgcatttgggactgtttggtatgagctgcaagcaagagactggcccttgaagaaccaggctgcagaggcatccatctggcagattggaagcggggaaggaatgaagcgtgtcctgacttctgtcagcttggggaaggaagtcagtgagatcctgtcggcctgctgggctttcgacctgcaggagagacccagcttcagcctgctgatggacatgctggagaaacttcccaagctgaaccggcggctctcccaccctggacacttctggaagtcagctgacattaacagcagcaaagttgtaccccggtttgaaaggtttggcttgggcgtcctggagtccagtaatccaaagatgtagccagccatatggtttttcgctgctgatctctttctttttaaaatgtgtttctgaaacatccca

SEQ ID NO: 146627 - DNA, 1041 bp, Homo sapiens
  Payload ID: 9007
  Gene Symbol: KSR1
  Gene Name: kinase suppressor of ras 1
  ENST ID: ENST00000583370
  CDS Start-End: 576-1041
ggcacctggacccctgccagggaaggggtcctcagacttgaggttgccagctcagatgtggggctgctgatactaggtgactggactgatgttctgttctagatgaaactccttgaggggaccatttgaaaaggcttgatgtgctgcccaaagcccccttcagagctgacttctccacccccagctgccgtgagccttggctgctgacagctcatagctgagtccctcccgtgaagtcaccttctgctgaagggcgaagctggtccgttacatttgtaagcagaggcagtgcaagctgagcgtggctcccggtgagaggaccccagagctcaacagctacccccgcttcagcgactggctgtacactttcaacgtgaggccggaggtggtgcagcccacacaagatgtgatcagctatccattgttactgagagatgggagttttaaatttttcaacaccaagcaagtacagaagtgttagaaagcaagcaaaggccctcctcttccacttcgcggggataacaccttgttaacaggagatcccccgagacctcacgctggatgccctgctggagatgaatgaggccaaggtgaaggagacgctgcggcgctgtggggccagcggggatgagtgtggccgtctgcagtatgccctcacctgcctgcggaaggtgacaggcctgggaggggagcacaaggaggactccagttggagttcattggatgcgcggcgggaaagtggctcagggccttccacggacaccctctcagcagccagcctgccctggcccccagggagctcccagctgggcagagcaggcaacagcgcccagggcccacgctccatctccgtgtcagctctgcccgcctcagactcccccacccccagcttcagtgagggcctctcagacacctgtattcccctgcacgccagcggccggctgaccccccgtgccctgcacagcttcatcaccccgcccaccacaccccagctgcgacggcacaccaagctgaagccaccacggacgccccccccaccca

SEQ ID NO: 146628 - DNA, 2392 bp, Homo sapiens
  Payload ID: 9007
  Gene Symbol: KSR1
  Gene Name: kinase suppressor of ras 1
  ENST ID: ENST00000582410
  CDS Start-End: 292-633
attcttgccctgcttttctagaaacaaccggtcatgactcctttgtagaattcctcaaaagcaccggtgcctttcccaagtgcagggtcagtgttctgggtctgggtgtgttttctaagctgtgtgtgggtgttctgccggccctggggcagacctgtgccaggcaggcctctttgctgcctgctgaaaggcctgtgtccttgtcccggcttcctggtctccaggcgtgagaaccagctaaagctgtcccacgactggctgtgctatctggcccctgagattgtacgcgagatgacccccgggaaggacgaggatcagctgccattctccaaagctgctgatgtctatgcatttgggactgtttggtatgagctgcaagcaagagactggcccttgaagaaccaggctgcagaggcatccatctggcagattggaagcggggaaggaatgaagcgtgtcctgacttctgtcagcttggggaaggaagtcagtgagatcctgtcggcctgctgggctttcgacctgcaggagagacccagcttcagcctgctgatggacatgctggagaaacttcccaagctgaaccggcggctctcccaccctggacacttctggaagtcagctgagttgtaggcctggctgccttgcatgcaccaggggctttcttcctcctaatcaacaactcagcaccgtgacttctgctaaaatgcaaaatgagatgcgggcactaacccaggggatgccacctctgctgctccagtcgtctctctcgaggctacttcttttgctttgttttaaaaactggccctctgccctctccacgtggcctgcatatgcccaagtaactgctctcagaggatcccactaactgagctccctccaaggcagtctgggcagcttctaactaccttcctggacatgactgattgctcccgtgttcttctgagggctggtcttgtttttgtttgggtggctctgtctcactgctaacaccttagtgagatgccttccaccctcctgagcacaccagcctcccactgggtgtgtgcctagtgcggggcgggcggaggttgggagggtgttggcttggcttttaacctgtggggattttgtccaacaaggagtggaatgatttcagagctgccctgaggctggcaccctggtcacaggaaccctctgcgctggctcctgtctcagtcccctctgtagagttagatcagaagacacagaaagttctgtggccatgaaagataccagcttggaagggttgtgtcttcagtggcaccctcagaaaaattgtcttaaagcaaagaggtacctggctccagacaatttttctgatgaaaacaaagtctctgccccgtccccaccctgccaccctggcaaagttacttcctttacagctgcccagtgtaccatagaccagaccccaggtcagcatttgtcaagagcatggctgctgagtcccctgtggcagtcaatgcactgtttaccaaatgcaggtttctgttctccctccccagcaagacctgctgaacccagatctctggaatggggccctaggaatttgcatttcaacctgcttcccaggtggccctgatgcaccccagtattagagtttattgctaaaaggaacatgccctgtcactcctggtatcctgggagtcatgtttctcttctctctcagttctacttggagcaagagctttcctgggctgcaaatgagaaaacaattcctaggaacccacagcagtactgagcatgctgggagcttgggacttggagatgaatgagccaccgttgctgctccaagtaggactacttggagtgtagctgaggccttggacgcagtatgaccaggggcagctctgccagggctgttggccaatcagtcattttcatttcttgttggaggccaggtcctctgctgaactcatttcctagctagtgttaccctaattctgatgaagatcaatggggctataattcttgtttttgttcctctttgcagcattaacagcagcaaagttgtaccccggtttgaaaggtttggcttgggcgtcctggagtccagtaatccaaagatgtagccagccatatggtttttcgctgctgatctctttctttttaaaatgtgtttctgaaacatcccaacaaccaccacgacaaaaaaacactgcctgcccagcgctgcaaaccaggagcacacgtcctagattcagactgttggccataaaccccactcgggagatggagctgcacctgctatttcttaaaatgacaccaccaacaaccaaacctgtcatgacagacagcaaatgtttacacgtatatttctcctgagtgaacctgatgttttacaataggtaataataaaaacagtctgtgcaga

SEQ ID NO: 146629 - DNA, 17726 bp, Homo sapiens
  Payload ID: 9008
  Gene Symbol: KSR2
  Gene Name: kinase suppressor of ras 2
  Uniprot ID: Q6VAB6
  ENST ID: ENST00000339824
  CDS Start-End: 729-3581
aggcaagatgtcggtgtggagcgaggcaggagcgattgcagcaaccgtcacccccggagcccggcggcggcagcagcagcagcagcagcagcgcggggaggagacagcagccagccgcagtagccgccgcagccgcgggagcaatgcagacagcaccttgagaacgcgctaaagcactccaaaccgtggaccatgccgtgtccctgcaactgggaggggggaaaaccagattttttttgacataaaagcaagccagccaaaaatatataattttgtccttcaaggagccggtgtgtaaagagtgagcgctattttccttctcctcctcctcctctccctcctcctcctctccctcctcctctctctcctccttctcctcttctttttcctcctcctcctcctccctaagtgtacagacagcatcacatcacctggtttgcttctgagaaacagcatctctccttttcagggaccagagactcagagagagaggagacattctaatggagtccgcttgatatcccaaaataaaataataaattttggctcttgtcccctcctcccactcccaccccctcaaccctgtgtgagatgttggatttcttcttcatgagacattgttgagaagtcgcagtggttggagaggcggagggtagactacctctactcccccccctcttttttctctctgggaggaggaggaggggaagggggttgcagagcaagcgatggatgaggaaaacatgacgaaaagcgaggagcagcagcctctgagtttgcaaaaagccttacagcagtgcgaactggtccaaaacatgatagacttgagcatctccaacctggaagggcttaggaccaaatgtgctacctccaacgacctcacacaaaaagaaatccggaccctggagagcaagctggtgaagtacttcagccggcagctgtcctgcaaaaagaaggtagccttgcaggagcgcaacgcggagctggacggcttcccccagctacggcactggttccgaatcgtcgatgtgcgcaaggaggtcctggaggaaatctcccccggccagctgagcctggaggacctcttggagatgacggatgaacaggtgtgcgagactgtggagaaatacggagccaaccgggaggagtgtgcccgcctcaacgcctccctctcctgcctcaggaatgtccacatgtcaggaggcaacctttccaaacaagactggaccatccagtggcccacgacagagacggggaaggagaacaatcccgtgtgccccccggagcccaccccgtggatccgcacccatctctcccagagccccagggtcccgtccaagtgcgtccagcactattgtcacaccagccccactcccggggcccctgtgtacacccacgtggacaggcttaccgtggacgcctacccgggcttgtgcccgcccccgccactggagtcgggccaccgttccctgcccccatcgccccggcagcggcacgcggtccgcaccccgccgcgcacccccaacatcgtcaccaccgtgaccccgccgggcacgccgcccatgaggaagaagaacaagctgaagcccccggggaccccaccgccctcctcccgaaaactgatacacttgatcccgggattcaccgcgctgcatcggagcaaatcccacgagttccagctggggcaccgcgtggacgaggcccacacgcccaaagccaagaagaagagcaaacccttgaacctcaagatccacagcagcgtaggcagctgcgagaacatcccctctcagcagcgctccccgctgctgtccgagcgctccctccgctccttctttgtgggacacgcacctttcctgccttccacccctcctgttcacactgaggccaacttctctgcaaacacactgtcagtgccacgctggtccccgcagatccctcgcagagatctcggcaactccatcaagcacaggttttccaccaagtactggatgtctcagacgtgcacagtctgtgggaaagggatgctttttggcctcaagtgtaaaaactgcaagttaaagtgccacaacaaatgcaccaaagaagccccaccctgtcatcttctgatcatccaccgaggagatccagcaaggttagtccggacagagtccgttccgtgtgacatcaacaaccctctacggaagccacctcgctattcagacctgcacatcagtcagacgctccccaaaaccaacaaaatcaacaaggaccacatccctgtcccttaccagccagactccagcagcaacccctcctccacgacgtcctccacgccctcctcgccagcaccccccctccctcctagtgccacgccgccttctcccctacacccttccccacagtgcacacggcagcagaagaacttcaacctgccagcatcccactactacaaatacaagcagcagttcatcttcccagatgtggtgccggtgccggagacgccgacccgggcgccccaggtcatcctgcatccggtgacctcgaatccaatcttggaaggaaatccattacttcaaattgaagtggagccaacgtcggagaatgaagaggtccatgatgaggccgaagagtcagaggatgacttcgaggagatgaacctgtccctcctctcggcccggagcttcccacgcaaggccagccagaccagcatcttccttcaggagtgggacatcccctttgagcagctggagatcggcgagctcattggaaagggccgctttgggcaagtgtaccacggccgctggcatggcgaggtggccatccggctgattgacattgagagggacaacgaggaccagctcaaggccttcaagcgggaggtgatggcctacaggcagacacggcatgagaacgtggtgcttttcatgggtgcctgcatgagcccgcctcacctggccatcatcaccagcctctgtaagggacggacgctctattccgttgtgagggatgccaaaatcgttttggatgtcaacaaaaccaggcagattgctcaagaaattgtgaagggcatgggctacctccacgccaagggaatcctacacaaggacctcaagtcaaagaacgtcttctatgacaacggcaaagtggtcatcacggactttggactcttcagcatttctggggtgctgcaggctggcaggcgggaggacaaactgcgcatccagaatggctggctatgccacctggcaccagagatcatccgccagctgtcccccgacacagaggaggataagctccccttctccaagcactctgacgtctttgcccttggcacaatctggtatgaactccacgccagggaatggcctttcaagacccaaccagcagaggcaataatctggcaaatgggcacaggcatgaaacccaacctcagccagattggcatgggaaaagaaatctcggacattcttctcttctgctgggcctttgaacaagaagagagacctaccttcaccaagctcatggacatgctggagaaactgccaaagcgaaaccgtcgcctgtctcaccctggacatttctggaagtctgcagagctgtgacctttggacatcgggacggcgcccagctgcctgggctcccgtcacctctccctccctactctgtcctctgccagctcaggaggccagagactcagcatcagagggtaccaaccccgaccgacctgggagcactggacaactgctcggcggcctccctgcacctcagacttgagcccttttcctcgggcagggttggggacccccgagctaggactgaaccggaccagccagggtgatgcgttattgatcagtgcggcccaggggacagcactaatgagagcactgcaggctgcacgtggtgcctttgggctatgggactaggacaggagaccccacgtgggggggctcacagacggggctatgtgtgtgtgtgtctgtgtgtttgacgttgttcactcttgtttccccttgacaagcaagagccagactgtcccaatgacggggcactcctcagttctgtctgtatgtggtaggttccagctgtaccatctgggaagctaagaggagggtacagagccgagtggcagcttagtcaaggctactgagccaagatcgagcagggaaggtcgggagtggctaagctcgttcctttggaaatatctgttttcagacaccccaacccgagcctgtcatggcgtgtggcacctttgcatagagctctgaagtacagtaggaaagttagaacgtcttttgagttctgggtctctctgggggacctattcccccatttctgctgttttctcctgttctctgagagtagcatcccttttcacctcactgcccgcacctccttgccatttggaaagccaagatgacttctgaggggctccttagagctcaccgtcattcagggcaccccctgaagtctggtccctgagaatcagggctctgggcagggagttctaggacattccttttcttccctcttctctgctactcacaccagtgaagcttattcccccaccaaggtggatgcgggttcttggggtacgtccatgttgggttatgtggctgtacctatgataacacgtttgcaaaagatttccctgcctgtcacccttgaggagtcctgttgggggagcacaaagggaggatgtttgttacacttctgcgttctttgctctagcctggtgcggggtcctcaagtagcttccccatcggaagcctgtgtccctcacctgtgtgtgttccctcagtgccccaccttccctccctcctcttgatcccaacctgggccggcgactcttcctgaccatgttggggaagcccctggtgttctgtatctgtaggaaggatgccgagagcaggctgggcatgcagatgggagaggagaacctctgggtcatttgcccatgttttcaaagccctgaccccctgcatgtgacctgatacaaaagggaaatctgtccccaagcagagcaatagcaggattatctgggcagtgaacaggaagcccagggcggccacagcccctctgtgtttcctgggtactacctgggccttagttttcttgtagctactatctatccaggcatctccctcctagagggccagagagaggaactggaacttcaaaaaccctacctgatcttactttcaaaatccaaatagacctatgaggatctcttccccaccttgggtgactcccagactggttcatgctctgggggccaaacctgcttccaaaccgggaagaatggtgagatcagtcatgcttcccaggagcctggctacaggaaacccctgtgtttcccaaagggccctcctgaattgcctttccaacactcccagcttactgggactagaggactaaagaccccggcttgggctgctcctaagcagacactgctcttctggggacatctatggctcttggcttgacgacgtgtgtgtgtcttggaggcattttatatatgtttgcctgagccccagccactctggggttgctggggatggctcttgtcaatggacacctccccatcccaacacaacactctgtgtcccagccctgggcctggacttgcacctgtcttggctctgcccagcagcctactgagtgcctgaaacccaaccactcacttctcttccatcacaccaggacttcttgggtccacaggctccagtccttgtcatgttcccttgtgccaagagacaggatatgaggaagggaagaggcagccagggtctactaccctgcagctgaaatgtccacaagaactggcaccttctcactcttgcctctcttgtttccagaattaactaaaatgtccaaccacagcctttggcaaggcctagcatgatctccaacagctgatttttccattcattcatgagcaccagtttgggattaaggacagggcctgagtgatccaggggaaaacccagccctttgtggaacagggtgccttgggtccatccctgaatctgagtcacttgctcttgacttctcgatctttccccacttcactactctgtccccacctgcattggtctctgctgcagccaggccaggatcctggccttcagtgccttcctgacgcccctaccctgtcccctctacaccgccctgacttgttgagaaaccagctttaatttgcacacatttaaatccaggaagaaccaaaccgctgctttccctgctggcttccatctttattcgctgatgaggttttgggaggaggttatattcatcttacgcagggaggaaaaaaaaagaggaaagaggctgtatatttttacatcataattaccagcctcacctgcaactcattctatacaatgacacgaccaagatttgtgtgtttgcccttgtcccatcacagctgcacacaggtgccctgtacacataagtcactgactcagcagcgagttgttccagtcagtcttgcttttagcaaaccgtcatatacatgggcttcccgaggggaccagtccacagggtgaagattcaccaggaagccttggctttgcagagagaaacatctcagctttctttaaagggcatgtggatttgcacataaatttcacccaactcttccaggatacagattattcataaaaccaaggagcttccttcttggccccctgtgggaggacgtgccccttgtgtccccatccccagagccaagctggaaacccaaagtcattgcttagatccattttgtcctggtattccttttactgatcaaagagaaaattttcatcttgccatggacccccccatcctcaccccatccacttgtctccacagctaccttggattgtcagtcaatagaagcccttgactgatattgaccactagacttttgtatccagggaacctagttcttccctttttctcacctcccatgccatatacacacatcatgcccctccccacaaacacacgaaaccagccttatctcaccttccaccattcccatccccacctacagctgatcatcaaaggtacacggaggaagtagtagacacggagctcaggccaatcattatcttgagaaatctaaacccagggctgtcaggctatgccccataggccatacccagcctgccaaatggtttttacatgttttaattgaggaaaaatcaaaagaataatatttcatgacatgaaaattctataacattcaaatttcatgtcaataaacaaaatgttattggagcacagtcacctctccatttacacaaccacggctgctcctatgcaactgtgacagagccagctatttgcaacagagacgatgtggcccacacagtcaaaaacttttacaatctggccctttcctaactttgctagcctttgatagagaggattggatatggctgtcaggggaggaacaggagcctttgatagagagggttggatatggctctcaggggaggaacaggaagttggagggggagagaacttgtttcagcggaagaaggccagcttgccccaagatgcagcgggctgcctccggaagtagagaactccctgtccttggatagggtggagcagatgttgactgcttggcctgtgtgatatggaggcaattcaggccctgaaggctggaccaactccctggactttaaaactcttcgtttgctaaggggggccataataacaaaatgtcacacactgagtggcttaaacaacacgaatttattcctcacaattcttgaggctggaagtcccaagatcaaggtgtcagcagggttggtttctggtgaggcctctttctttggcttgcagacagctgccctctgatcgtgacctcacgtggcctttcctctgtgactgcacatccccagtatctcctcctcttctgataaagacaacaatcttattagattagggttccaacgctctgtgattttattcccatccccggctttctttccccacactggttctcaatcttgagtcccgaaatatgccctccctatcctcatcctgtgcctaccttcacttcacccatccatcccctgcaggctggtcttgttccactgtgccaccatatccccaagcccccctcacctccgtgaggctcctaggactgctgcagcaaaccaccacccactggggcctacaacaacagatgtatcatctctcacccatctggatgccagaagtccaaaatcaaagtgttagcagggccatgttccccctgaaatctgtaagggaatccttcctggcggcttctgaattcctggtgctttcctggtcatcattggcattccttggcttgcagctgtgtcagtccaatccctgccctcatcatctctctgtgtgtccctatcttcatatggccatcttcttataaggacacgagtcacattggattaagggcccaccctatttcagtatgacctcatcttaactaattatatctgcaaagaccctctctccaaatgaagtctcattctgaggtactaggaatgaggacttcaacatgtctttttttttttttttttttttttgttggggacaccacaacttataacaccctctaagacattttctcttgtgccttgactggtcctccactgtagaacccaggtgcccttgaagatagattccccagaattcctggtctacaaggtcaggctgttgctgtcatgcttaccaagcttgccccaatcaacacgtcccatcactgaattccaacagctctggatctcagttctgtggctgtatgggaacagcctgtgtgtaagtggcttgtctgtagcggactgtcacttgacccctgaatgtgcctcatgaccctatccaaagcagttggtgacacagcatctgattttatctatactcttgttcattgacaaaggagtggattttgatgagctacattttgctgtttccttttttggctttgcctgtgatgtggggaagttcctaggcagactcatgtggccactctccctggctcccagcctcacctcctcccgtaccacctcaccctcacctgcacacacctgcaagggaatcactttgaactccaaggggagtgacaggcagcaaatgtcagtctgggtcctggaatgtggagccgcagtgaacctctgtcctctctggtcagtgcctgactatgatattaacccaaatcccagactcccttctcgaggccctgcaatccatacccattctgttaccagtttagttttgaaaccagtagtggggcaggaggttgatggaaaatctgcggtcccagtgacctcctggacttgtcttagtagtgcctggcacatagtaagtgctcaagaaatgtttacagaatgcagacagagaggtttgctgggtaagagtaagaccctggcacagggagttagaagggcaccattggcagggctggatggtattgggattcccctttgccagaccatgttgtgggtgccatatcaaccccaatgagtttgtttgttaggtttgttgttgtggtttagagttagagtcttgctctgtcacccaggctggagtacagcgtgatcatagctcactgcagcctcgaactcctggccacaagcaatcctcccaccttagcctctcaagttgctggtactacaggtgcacaccatcatgcctggctaattttttatttgttgtacagacagggtcttgctatgttgcccgcgctggtcttgaactcctggtctcaagcaatccccctgcttcagcctcccaaagcactgggattacagggctaagccattgtgctgagccagtttgccaggtttaatatctgtgacgtatgaagcgacccattgagtcaggtggcccaggatgtctaggaggcagagtaacaatccaccctgaacagccctcattcacagagcacttactacgtgccaggctggaattcctatgatggtttggggagatcagtagtcttattctcgttccaatggggcaactgtggtacagggacagaaaccagcctccaaattgcagacccagcattttaaaaacgagtctttgggctcatccattcccaggaacccacctccaggtcaaggggttcatgtccagctgctcatggggatgttacaatcccagcctctgagacttattggcaacttggaaccaggaaagagagagaggaaaagcaggaagttgtggaagggagggtgcaggggctggcagggaccatactgggagtttgcacggaagcttgaacttatgttctcaaactgacaggctgccagcagcagcccggatttccaggaaatgtacatctgggttggcagagtccctcctgggtccctccagtatccctgctccaggcttcctatcccctccgtctctcctgctggatgttgcactgtggtcccgtgttcctgagaggcgtacatcagtgagtgctcttccctctcaggggtgggaaagggcccttccttcccactcattgggatcatgcagctcccatttcctaacaccaagaatatgaaggattcatctcatggggttgagaatggctgtcctccttccactgaggactgagctggaggagatggactctgtctagaatgtgcctgatctaaataagaccttgtttcccaagcatgtcccatagacctttcattccatggaaaactcgccggatttgcattattgaaagggtcctgggacaagcatgcattggaaatgcttaggtaaaatgaaactaatttcttgattgcaggacttatcagaacttttaagacactattgtgtggttgaatctctaaatgcctgataggaggctgttcttcccaagctttcccaggcttgtttctgaatctccaacaaggtcaacctctgtgaatgagacttgataccttacctggtactgaaggaggcaatgtcaatgtactggcccacagaaaagagctgaccactagcattcatagacactgctaggagatgagaaaggtagcttagagcccgattccatccatgtggacagtggttccatgaacaagaacaccacatctggctgatggtgtcttccaatggaggggtcaaatctgctgtgtgttggtggcttctccaacataccatggcttggaggccaatgtgaaaagtatataagatgtaacaccctcagaagggttaagttttcacctgagttttcatcttcaaccaagtcattgggatggtgatctagaaggacctctaagatctagaaggataaagatctggtccaaggagtacaaatatgtaatggatctaccaccagtgtcccctgctgtactcttggcagacatcactaatccatcacagcatgccttcccactgatcacagatgtagcttcagggcattcgagttaccacttaagatggatatgagtgaccctcccttatctcactcttctcctttcacagaagcaggatctgaggcccagagagggaagctataataaactcccctaagtcaggtcccttctaagaggcagaggtaggtttagaactcaggcctcagaaacttccagaagccaagccatttgggctgtagttggtggacagtctatcagcgctctgcagatgtttcttctcagttagggaacttggaaaatgcagaaagaaagattctgtctctaagactctgtgtatgatcctactcggtaatctgcctgcttggagaaaaatcatttatcttctgggacggcttcaccacaaggcctgaatgctatgcccagtctagtaacagctgggctggaagtcacggcatatgggggccttaaggaataacagtgtgcgtggtggtgtgcaggagagctgcaagggcttttctttcttgaggaggtttgtaaaatttctgctgttcagtctgggcttctgggaagtcagggggtgctgcatataaagggcaggaaaaggagcctgactccaattgctctttggtttcttccctgaatggaaggctcaaaatcaagtttccacccagataagatcttgaggtcctagtggaccaccagctctactcctgagctcttgaaatacctctaatcaccagctcggtggctgagagtaccttcttgtccactgcctcttcttttccttctcgtcttcacttatcccccatccaacttctgcccgataatatctcccctgtattgtaaactgaggagaaagttgcacaattgtagagatgaaaaatagctgccatgtatttagcttaaattagctcagaagaaaggctccctccctccattgagcgggcagcacttgtttatgccaacatgctatttgcatcgcgccttcttaaatttgaaagtctaatgattaaaaacaaatcttagtttttcttttccaccacttaaaaaaaaaaaaccagcttggctagttcttctagtttaaaaataccctgacctccagcactacagtgagaattttggaaaggctggtaccaggatatcaggaggaaataaatacaggccaacaataaccagaggccttttctgagtggtgggcgacaggatgaacaaggtagaagagaggtctttgtgtcctcacacagatgctggcattctgggtttgtctggaattcagtgaacctctgtcctctctgacagagatttcttcaccaaccattcattcagtgggtgatttgttgagcatctactatgtgttagaccctgggcattcagtgatgagtgatacaatgtctcacctgttctgaagcctaaagcccaatggggaagagagacaagaagcaagtcaaccacaaatatataaatttgcaactcatgtagatctatggaaagaaaactcacgggggaccagaaacatgggagagggtatactgtgggagagctgctgacaaaggtctttctgaggaggtgacatttaagtcaagatctaaaggaagagaaggataaagagatgttcattctaagccagggtttctcaacctcagtactgttgagctatttggggccagataattctttgaggtggcgactgtcctgggcattggaggatgttaagcagcttcctcaactctccccacaagataccagtagcacctggtactggtgacatccaaaaacatccccagacacaccctgactttgctgtctggaatcaatcctcataaagccccaagccttggagcacagaggctggaagcccatatggtggcatgtcaggcatggtgtcacctgagcttctctgacccccacttctgatatggcatccagtttggagtctctgttctccatgagctcccatagctgtcccatattccacaaggcattgcttctgggccacggtcctctagttccagcatagccctatttttgggtatgttggtggatttcaaaagcctccagttgacatccaaagtgtgacatccaaaaccatctccagacattgccagatgtcccctgagttgtctccaggccacgcgactaggattcaaatccagcatcctgccatctgcaaccttccatgggagaaaggaaatcagaggagaacaggaaaacacaaggaggggactccttaagtgaacattgcagggaaataggtttttaaagcactagttagcatcaccagtggtttgaaggctgtctaggtaaggagaatgtggacttgcctttcaccgtctgcacggacaggggctgaaatctccagtcattctctccatccttccacagcccttctaagaagcagatcctcttgctgagctgaaatcttgagacttgcatccggcaatcttggtgttgctttctgaggctactcagggaaagcccttctgtattccccaggaaggaaagtctcccagatagtgaagggccttttctaccttccttgcaattcccagttcactgtgaagaagagagtcaggccgggttagaatggctgtctctggtagcaatgaagcaacaacatagacagtctggacaagatgtggcagttctgtccagtcccgtgtgactgatttgggcatggagacaggcagtgggtgaggatggcctctgtaggtccagctgttttacccctagaatcaaatccctggagcttccggcagtcccaggattgggaagggtaacagagaggacgagtcgggcactgcaaaagaccagatcttggaaaattgctttgggaattgggacaccttccaagaagacagttgagttggctggggctctgccctagatggggtcaacctctccccaacacagccctgcccaggttggggcattggcagcttaagtgcgtcctggacaacaaatgtaatgtattggtcctgtaagattctagccattttcctctgcttatttttctacatgtgttacaagtaataatgtttagatgggtacatatgaacttgtgtaagttcaagtaactgctatgtagctacagcatgggcatcaaggtactctaaggtacttgccctgccacaccgaggccccctgccccggccccctttccctcctagccagccttctagggagcactgcacaccctgccccttcaaagctatctggacagtcctggctcgactggagcattaagggaggggctgtccttggtcaggcttctgcccaactgtgtgatgcataaatctttgcctggctccttcttccttcttttcggaagtctatctcctcctgagggcctctgcggtcctaacctatcaaggaatatcatagattgtactccccaccccatcaaaacacaccctgactttgcgtctggaatcaatcctcataaagccccaaggcttggagcacagaggccagaagcccatatggtggcatgtcaggcatgctgtcacatgagcttctctgactccacttccaagatggcatccaatttggagtctctgttctccatgagctcccatagctgtcccatattccacaaggcactgcttctgggccccggtcctctagtttcctcatagccctatttttgggtacattggtggatttcaaatgcctacagttgagcagccgaaggattctaagaaaattttgcttgtatttcaaaggctcatgtccccagccccattcactacaccctcagcagagcccagcgtggagcaaccttgtcccttcattccccaaatcttcattttatatagtcatttagtaaatatttgttaagtgcctcctgtgattctggaaaaaatggagaaaagtgggtgctgccttcagggtactaggagtccgatgaagagagggaggagttccagtagggtcccgaggccccacaggagctcccaacccagagaaagaccctccaggaaggattctcagaggaggagacttctgaaccctgtcttgaaatttgagtagaatggtagggaacggtgtgtcagacagaaggaacagcctatgtgtggactcagaggcaagatcatgatttattgagggtaactgcaagtggctaaaatcctgccccctggcacttgcctgcctttccctgctttccccaaagcctgattttgggaccctggagtctccatctccaaacagagggtgccctggctcagatgtggagaccttgacttctttccccagcatgctctggttcctactgttagccttggtgtcctgtgggggaagatgtctgaggagagttttgtgcttgctggagtcagaccagtactcaggccacctcaggcctgctctgcatccctctctggctctacagacctctctctctctctctctctctctctctctctctctctgtctgtctgtctctgtgtctgtctctgtctctgcctgcctccacacagtgaaggatgtgtctctatttcttagtgccctgcattgggtcctgaagtccatgggcatcttggctatagatgggttggccatgagcccttctctctaatgcatttttcattcctgttcctcttttgcttcactttccctctatcgactcttgcgacctgtgtctctgatgtctctggggcccccagttctgtcttgccataccaaaaaaccttcttcagcaaaaaacctctttctgggacagttcatatcactctatgaataggcccctgaagtgttgaggtcaaggacatgtgtgaacgtggaaatgtatttatggaaagaccctacactgagggtctctaactaaacatttcaggtatgatgggcaaaatgctggtttgttacagaaatgactgaagaagacctaggggccatagtgggccacaggccaagcctgcaatacagcctgaagtgtgggaaagaatgtatcagtcctgttgatggagtggtgtgtttgctgtctctataaatatgtcagggtttgaaagacagaaaacaaagcatctttgctgaccgccagactcccagggtatatgtggctactgcaaattagcgaggcttgtttatctgcttcaacttgactcaatttgcatttcttgagccactgtctattgtggataatgatttcatcaacactttctcagcatcagcagcccctccagagtattccttgaattttcttagctttgtgcaacccacgagcacttaatatatcactaacccttgagtttattggagggagtgaatgaaataatgaatgtcaataacgttacgcaatacctggcacacagtaggtgcttcatcaatgtggcttttcttctcaatcacccaaatgaacctcccccagaatcccacctctagggggacattcctgaaaaataagggactagaatagcgaggtggtgggtgttacccatttatttagatatttgtgtcctggtgaacatggggagggatgcccaagtgtcataaggacaccccctccccccgtctacaaggcagaggtctcttaggatgtgagagagtctctggcaagaccagcccccaccccaccaaggccctcatagaaacagaacattcttcctccctatcccaaagcagaagttgactggggcagataaggcaagtcacattacatctgtgcccttgaccatacctggaccaggcagagaagatcccagacttaggtggtcaacgtttccaccccaagcctctcatttctcgctctctttgagacttgatcttgtaccaggatccactcgacagacttaacgcatgattaatttgattgattactcttgaagttactgaccttaggaaaattcctcaattgtaaaaaggctttctctatatgtaaattatgctgttatctttttctatacacaaagtatatagacctataaatattatacatatatattatatatataaagactaattcttgtacagaccaacgcggaccgatggtccatattcttttctccatgtttgtttgtgtcgactgttgcagagtgagttgatgtaagaaggtggtttcatgttttcttttggggggccacttctttcttttcctttccgtttctatctctgtctgtctccgtctctgtctctctctttctcacttgttgccaatgtcttgttgctgagaaggaacactctattcagatgccatccaggaaagaaaggccagatggatggagggtccactgtgtatatttgtacagaatcatttataaagttttctacacttctaaaaaaagtatttctaacttgggctgttggacagtttgtgtgcctctgagccagcaagcctgttgtttcttgtgtttagtgcaatgtttagtgagaaaccaatgtctgaattatttatgccaataaaaaatttgagaatta

SEQ ID NO: 146630 - DNA, 17008 bp, Homo sapiens
  Payload ID: 9008
  Gene Symbol: KSR2
  Gene Name: kinase suppressor of ras 2
  ENST ID: ENST00000425217
  CDS Start-End: 56-2821
gcagcagcctctgagtttgcaaaaagccttacagcagtgcgaactggtccaaaacatgatagacttgagcatctccaacctggaagggcttaggaccaaatgtgctacctccaacgacctcacacaaaaagaaatccggaccctggagagcaagctggtgaagtacttcagccggcagctgtcctgcaaaaagaaggtagccttgcaggagcgcaacgcggagctggacggcttcccccagctacggcactggttccgaatcgtcgatgtgcgcaaggaggtcctggaggaaatctcccccggccagctgagcctggaggacctcttggagatgacggatgaacaggtgtgcgagactgtggagaaatacggagccaaccgggaggagtgtgcccgcctcaacgcctccctctcctgcctcaggaatgtccacatgtcaggaggcaacctttccaaacaagactggaccatccagtggcccacgacagagacggggaaggagaacaatcccgtgtgccccccggagcccaccccgtggatccgcacccatctctcccagagccccagggtcccgtccaagtgcgtccagcactattgtcacaccagccccactcccggggcccctgtgtacacccacgtggacaggcttaccgtggacgcctacccgggcttgtgcccgcccccgccactggagtcgggccaccgttccctgcccccatcgccccggcagcggcacgcggtccgcaccccgccgcgcacccccaacatcgtcaccaccgtgaccccgccgggcacgccgcccatgaggaagaagaacaagctgaagcccccggggaccccaccgccctcctcccgaaaactgatacacttgatcccgggattcaccgcgctgcatcggagcaaatcccacgagttccagctggggcaccgcgtggacgaggcccacacgcccaaagccaagaagaagagcaaacccttgaacctcaagatccacagcagcgtaggcagctgcgagaacatcccctctcagcagcgctccccgctgctgtccgagcgctccctccgctccttctttgtgggacacgcacctttcctgccttccacccctcctgttcacactgaggccaacttctctgcaaacacactgtcagtgccacgctggtccccgcagatccctcgcagagatctcggcaactccatcaagcacaggttttccaccaagtactggatgtctcagacgtgcacagtctgtgggaaagggatgctttttggcctcaagtgtaaaaactgcaagttaaagtgccacaacaaatgcaccaaagaagccccaccctgtcatcttctgatcatccaccgaggagatccagcaaggttagtccggacagagtccgttccgtgtgacatcaacaaccctctacggaagccacctcgctattcagacctgcacatcagtcagacgctccccaaaaccaacaaaatcaacaaggaccacatccctgtcccttaccagccagactccagcagcaacccctcctccacgacgtcctccacgccctcctcgccagcaccccccctccctcctagtgccacgccgccttctcccctacacccttccccacagtgcacacggcagcagaagaacttcaacctgccagcatcccactactacaaatacaagcagcagttcatcttcccagatgtggtgccggtgccggagacgccgacccgggcgccccaggtcatcctgcatccggtgacctcgaatccaatcttggaaggaaatccattacttcaaattgaagtggagccaacgtcggagaatgaagaggtccatgatgaggccgaagagtcagaggatgacttcgaggagatgaacctgtccctcctctcggcccggagcttcccacgcaaggccagccagaccagcatcttccttcaggagtgggacatcccctttgagcagctggagatcggcgagctcattggaaagggccgctttgggcaagtgtaccacggccgctggcatggcgaggtggccatccggctgattgacattgagagggacaacgaggaccagctcaaggccttcaagcgggaggtgatggcctacaggcagacacggcatgagaacgtggtgcttttcatgggtgcctgcatgagcccgcctcacctggccatcatcaccagcctctgtaagggacggacgctctattccgttgtgagggatgccaaaatcgttttggatgtcaacaaaaccaggcagattgctcaagaaattgtgaagggcatgggctacctccacgccaagggaatcctacacaaggacctcaagtcaaagaacgtcttctatgacaacggcaaagtggtcatcacggactttggactcttcagcatttctggggtgctgcaggctggcaggcgggaggacaaactgcgcatccagaatggctggctatgccacctggcaccagagatcatccgccagctgtcccccgacacagaggaggataagctccccttctccaagcactctgacgtctttgcccttggcacaatctggtatgaactccacgccagggaatggcctttcaagacccaaccagcagaggcaataatctggcaaatgggcacaggcatgaaacccaacctcagccagattggcatgggaaaagaaatctcggacattcttctcttctgctgggcctttgaacaagaagagagacctaccttcaccaagctcatggacatgctggagaaactgccaaagcgaaaccgtcgcctgtctcaccctggacatttctggaagtctgcagagctgtgacctttggacatcgggacggcgcccagctgcctgggctcccgtcacctctccctccctactctgtcctctgccagctcaggaggccagagactcagcatcagagggtaccaaccccgaccgacctgggagcactggacaactgctcggcggcctccctgcacctcagacttgagcccttttcctcgggcagggttggggacccccgagctaggactgaaccggaccagccagggtgatgcgttattgatcagtgcggcccaggggacagcactaatgagagcactgcaggctgcacgtggtgcctttgggctatgggactaggacaggagaccccacgtgggggggctcacagacggggctatgtgtgtgtgtgtctgtgtgtttgacgttgttcactcttgtttccccttgacaagcaagagccagactgtcccaatgacggggcactcctcagttctgtctgtatgtggtaggttccagctgtaccatctgggaagctaagaggagggtacagagccgagtggcagcttagtcaaggctactgagccaagatcgagcagggaaggtcgggagtggctaagctcgttcctttggaaatatctgttttcagacaccccaacccgagcctgtcatggcgtgtggcacctttgcatagagctctgaagtacagtaggaaagttagaacgtcttttgagttctgggtctctctgggggacctattcccccatttctgctgttttctcctgttctctgagagtagcatcccttttcacctcactgcccgcacctccttgccatttggaaagccaagatgacttctgaggggctccttagagctcaccgtcattcagggcaccccctgaagtctggtccctgagaatcagggctctgggcagggagttctaggacattccttttcttccctcttctctgctactcacaccagtgaagcttattcccccaccaaggtggatgcgggttcttggggtacgtccatgttgggttatgtggctgtacctatgataacacgtttgcaaaagatttccctgcctgtcacccttgaggagtcctgttgggggagcacaaagggaggatgtttgttacacttctgcgttctttgctctagcctggtgcggggtcctcaagtagcttccccatcggaagcctgtgtccctcacctgtgtgtgttccctcagtgccccaccttccctccctcctcttgatcccaacctgggccggcgactcttcctgaccatgttggggaagcccctggtgttctgtatctgtaggaaggatgccgagagcaggctgggcatgcagatgggagaggagaacctctgggtcatttgcccatgttttcaaagccctgaccccctgcatgtgacctgatacaaaagggaaatctgtccccaagcagagcaatagcaggattatctgggcagtgaacaggaagcccagggcggccacagcccctctgtgtttcctgggtactacctgggccttagttttcttgtagctactatctatccaggcatctccctcctagagggccagagagaggaactggaacttcaaaaaccctacctgatcttactttcaaaatccaaatagacctatgaggatctcttccccaccttgggtgactcccagactggttcatgctctgggggccaaacctgcttccaaaccgggaagaatggtgagatcagtcatgcttcccaggagcctggctacaggaaacccctgtgtttcccaaagggccctcctgaattgcctttccaacactcccagcttactgggactagaggactaaagaccccggcttgggctgctcctaagcagacactgctcttctggggacatctatggctcttggcttgacgacgtgtgtgtgtcttggaggcattttatatatgtttgcctgagccccagccactctggggttgctggggatggctcttgtcaatggacacctccccatcccaacacaacactctgtgtcccagccctgggcctggacttgcacctgtcttggctctgcccagcagcctactgagtgcctgaaacccaaccactcacttctcttccatcacaccaggacttcttgggtccacaggctccagtccttgtcatgttcccttgtgccaagagacaggatatgaggaagggaagaggcagccagggtctactaccctgcagctgaaatgtccacaagaactggcaccttctcactcttgcctctcttgtttccagaattaactaaaatgtccaaccacagcctttggcaaggcctagcatgatctccaacagctgatttttccattcattcatgagcaccagtttgggattaaggacagggcctgagtgatccaggggaaaacccagccctttgtggaacagggtgccttgggtccatccctgaatctgagtcacttgctcttgacttctcgatctttccccacttcactactctgtccccacctgcattggtctctgctgcagccaggccaggatcctggccttcagtgccttcctgacgcccctaccctgtcccctctacaccgccctgacttgttgagaaaccagctttaatttgcacacatttaaatccaggaagaaccaaaccgctgctttccctgctggcttccatctttattcgctgatgaggttttgggaggaggttatattcatcttacgcagggaggaaaaaaaaagaggaaagaggctgtatatttttacatcataattaccagcctcacctgcaactcattctatacaatgacacgaccaagatttgtgtgtttgcccttgtcccatcacagctgcacacaggtgccctgtacacataagtcactgactcagcagcgagttgttccagtcagtcttgcttttagcaaaccgtcatatacatgggcttcccgaggggaccagtccacagggtgaagattcaccaggaagccttggctttgcagagagaaacatctcagctttctttaaagggcatgtggatttgcacataaatttcacccaactcttccaggatacagattattcataaaaccaaggagcttccttcttggccccctgtgggaggacgtgccccttgtgtccccatccccagagccaagctggaaacccaaagtcattgcttagatccattttgtcctggtattccttttactgatcaaagagaaaattttcatcttgccatggacccccccatcctcaccccatccacttgtctccacagctaccttggattgtcagtcaatagaagcccttgactgatattgaccactagacttttgtatccagggaacctagttcttccctttttctcacctcccatgccatatacacacatcatgcccctccccacaaacacacgaaaccagccttatctcaccttccaccattcccatccccacctacagctgatcatcaaaggtacacggaggaagtagtagacacggagctcaggccaatcattatcttgagaaatctaaacccagggctgtcaggctatgccccataggccatacccagcctgccaaatggtttttacatgttttaattgaggaaaaatcaaaagaataatatttcatgacatgaaaattctataacattcaaatttcatgtcaataaacaaaatgttattggagcacagtcacctctccatttacacaaccacggctgctcctatgcaactgtgacagagccagctatttgcaacagagacgatgtggcccacacagtcaaaaacttttacaatctggccctttcctaactttgctagcctttgatagagaggattggatatggctgtcaggggaggaacaggagcctttgatagagagggttggatatggctctcaggggaggaacaggaagttggagggggagagaacttgtttcagcggaagaaggccagcttgccccaagatgcagcgggctgcctccggaagtagagaactccctgtccttggatagggtggagcagatgttgactgcttggcctgtgtgatatggaggcaattcaggccctgaaggctggaccaactccctggactttaaaactcttcgtttgctaaggggggccataataacaaaatgtcacacactgagtggcttaaacaacacgaatttattcctcacaattcttgaggctggaagtcccaagatcaaggtgtcagcagggttggtttctggtgaggcctctttctttggcttgcagacagctgccctctgatcgtgacctcacgtggcctttcctctgtgactgcacatccccagtatctcctcctcttctgataaagacaacaatcttattagattagggttccaacgctctgtgattttattcccatccccggctttctttccccacactggttctcaatcttgagtcccgaaatatgccctccctatcctcatcctgtgcctaccttcacttcacccatccatcccctgcaggctggtcttgttccactgtgccaccatatccccaagcccccctcacctccgtgaggctcctaggactgctgcagcaaaccaccacccactggggcctacaacaacagatgtatcatctctcacccatctggatgccagaagtccaaaatcaaagtgttagcagggccatgttccccctgaaatctgtaagggaatccttcctggcggcttctgaattcctggtgctttcctggtcatcattggcattccttggcttgcagctgtgtcagtccaatccctgccctcatcatctctctgtgtgtccctatcttcatatggccatcttcttataaggacacgagtcacattggattaagggcccaccctatttcagtatgacctcatcttaactaattatatctgcaaagaccctctctccaaatgaagtctcattctgaggtactaggaatgaggacttcaacatgtctttttttttttttttttttttttgttggggacaccacaacttataacaccctctaagacattttctcttgtgccttgactggtcctccactgtagaacccaggtgcccttgaagatagattccccagaattcctggtctacaaggtcaggctgttgctgtcatgcttaccaagcttgccccaatcaacacgtcccatcactgaattccaacagctctggatctcagttctgtggctgtatgggaacagcctgtgtgtaagtggcttgtctgtagcggactgtcacttgacccctgaatgtgcctcatgaccctatccaaagcagttggtgacacagcatctgattttatctatactcttgttcattgacaaaggagtggattttgatgagctacattttgctgtttccttttttggctttgcctgtgatgtggggaagttcctaggcagactcatgtggccactctccctggctcccagcctcacctcctcccgtaccacctcaccctcacctgcacacacctgcaagggaatcactttgaactccaaggggagtgacaggcagcaaatgtcagtctgggtcctggaatgtggagccgcagtgaacctctgtcctctctggtcagtgcctgactatgatattaacccaaatcccagactcccttctcgaggccctgcaatccatacccattctgttaccagtttagttttgaaaccagtagtggggcaggaggttgatggaaaatctgcggtcccagtgacctcctggacttgtcttagtagtgcctggcacatagtaagtgctcaagaaatgtttacagaatgcagacagagaggtttgctgggtaagagtaagaccctggcacagggagttagaagggcaccattggcagggctggatggtattgggattcccctttgccagaccatgttgtgggtgccatatcaaccccaatgagtttgtttgttaggtttgttgttgtggtttagagttagagtcttgctctgtcacccaggctggagtacagcgtgatcatagctcactgcagcctcgaactcctggccacaagcaatcctcccaccttagcctctcaagttgctggtactacaggtgcacaccatcatgcctggctaattttttatttgttgtacagacagggtcttgctatgttgcccgcgctggtcttgaactcctggtctcaagcaatccccctgcttcagcctcccaaagcactgggattacagggctaagccattgtgctgagccagtttgccaggtttaatatctgtgacgtatgaagcgacccattgagtcaggtggcccaggatgtctaggaggcagagtaacaatccaccctgaacagccctcattcacagagcacttactacgtgccaggctggaattcctatgatggtttggggagatcagtagtcttattctcgttccaatggggcaactgtggtacagggacagaaaccagcctccaaattgcagacccagcattttaaaaacgagtctttgggctcatccattcccaggaacccacctccaggtcaaggggttcatgtccagctgctcatggggatgttacaatcccagcctctgagacttattggcaacttggaaccaggaaagagagagaggaaaagcaggaagttgtggaagggagggtgcaggggctggcagggaccatactgggagtttgcacggaagcttgaacttatgttctcaaactgacaggctgccagcagcagcccggatttccaggaaatgtacatctgggttggcagagtccctcctgggtccctccagtatccctgctccaggcttcctatcccctccgtctctcctgctggatgttgcactgtggtcccgtgttcctgagaggcgtacatcagtgagtgctcttccctctcaggggtgggaaagggcccttccttcccactcattgggatcatgcagctcccatttcctaacaccaagaatatgaaggattcatctcatggggttgagaatggctgtcctccttccactgaggactgagctggaggagatggactctgtctagaatgtgcctgatctaaataagaccttgtttcccaagcatgtcccatagacctttcattccatggaaaactcgccggatttgcattattgaaagggtcctgggacaagcatgcattggaaatgcttaggtaaaatgaaactaatttcttgattgcaggacttatcagaacttttaagacactattgtgtggttgaatctctaaatgcctgataggaggctgttcttcccaagctttcccaggcttgtttctgaatctccaacaaggtcaacctctgtgaatgagacttgataccttacctggtactgaaggaggcaatgtcaatgtactggcccacagaaaagagctgaccactagcattcatagacactgctaggagatgagaaaggtagcttagagcccgattccatccatgtggacagtggttccatgaacaagaacaccacatctggctgatggtgtcttccaatggaggggtcaaatctgctgtgtgttggtggcttctccaacataccatggcttggaggccaatgtgaaaagtatataagatgtaacaccctcagaagggttaagttttcacctgagttttcatcttcaaccaagtcattgggatggtgatctagaaggacctctaagatctagaaggataaagatctggtccaaggagtacaaatatgtaatggatctaccaccagtgtcccctgctgtactcttggcagacatcactaatccatcacagcatgccttcccactgatcacagatgtagcttcagggcattcgagttaccacttaagatggatatgagtgaccctcccttatctcactcttctcctttcacagaagcaggatctgaggcccagagagggaagctataataaactcccctaagtcaggtcccttctaagaggcagaggtaggtttagaactcaggcctcagaaacttccagaagccaagccatttgggctgtagttggtggacagtctatcagcgctctgcagatgtttcttctcagttagggaacttggaaaatgcagaaagaaagattctgtctctaagactctgtgtatgatcctactcggtaatctgcctgcttggagaaaaatcatttatcttctgggacggcttcaccacaaggcctgaatgctatgcccagtctagtaacagctgggctggaagtcacggcatatgggggccttaaggaataacagtgtgcgtggtggtgtgcaggagagctgcaagggcttttctttcttgaggaggtttgtaaaatttctgctgttcagtctgggcttctgggaagtcagggggtgctgcatataaagggcaggaaaaggagcctgactccaattgctctttggtttcttccctgaatggaaggctcaaaatcaagtttccacccagataagatcttgaggtcctagtggaccaccagctctactcctgagctcttgaaatacctctaatcaccagctcggtggctgagagtaccttcttgtccactgcctcttcttttccttctcgtcttcacttatcccccatccaacttctgcccgataatatctcccctgtattgtaaactgaggagaaagttgcacaattgtagagatgaaaaatagctgccatgtatttagcttaaattagctcagaagaaaggctccctccctccattgagcgggcagcacttgtttatgccaacatgctatttgcatcgcgccttcttaaatttgaaagtctaatgattaaaaacaaatcttagtttttcttttccaccacttaaaaaaaaaaaaccagcttggctagttcttctagtttaaaaataccctgacctccagcactacagtgagaattttggaaaggctggtaccaggatatcaggaggaaataaatacaggccaacaataaccagaggccttttctgagtggtgggcgacaggatgaacaaggtagaagagaggtctttgtgtcctcacacagatgctggcattctgggtttgtctggaattcagtgaacctctgtcctctctgacagagatttcttcaccaaccattcattcagtgggtgatttgttgagcatctactatgtgttagaccctgggcattcagtgatgagtgatacaatgtctcacctgttctgaagcctaaagcccaatggggaagagagacaagaagcaagtcaaccacaaatatataaatttgcaactcatgtagatctatggaaagaaaactcacgggggaccagaaacatgggagagggtatactgtgggagagctgctgacaaaggtctttctgaggaggtgacatttaagtcaagatctaaaggaagagaaggataaagagatgttcattctaagccagggtttctcaacctcagtactgttgagctatttggggccagataattctttgaggtggcgactgtcctgggcattggaggatgttaagcagcttcctcaactctccccacaagataccagtagcacctggtactggtgacatccaaaaacatccccagacacaccctgactttgctgtctggaatcaatcctcataaagccccaagccttggagcacagaggctggaagcccatatggtggcatgtcaggcatggtgtcacctgagcttctctgacccccacttctgatatggcatccagtttggagtctctgttctccatgagctcccatagctgtcccatattccacaaggcattgcttctgggccacggtcctctagttccagcatagccctatttttgggtatgttggtggatttcaaaagcctccagttgacatccaaagtgtgacatccaaaaccatctccagacattgccagatgtcccctgagttgtctccaggccacgcgactaggattcaaatccagcatcctgccatctgcaaccttccatgggagaaaggaaatcagaggagaacaggaaaacacaaggaggggactccttaagtgaacattgcagggaaataggtttttaaagcactagttagcatcaccagtggtttgaaggctgtctaggtaaggagaatgtggacttgcctttcaccgtctgcacggacaggggctgaaatctccagtcattctctccatccttccacagcccttctaagaagcagatcctcttgctgagctgaaatcttgagacttgcatccggcaatcttggtgttgctttctgaggctactcagggaaagcccttctgtattccccaggaaggaaagtctcccagatagtgaagggccttttctaccttccttgcaattcccagttcactgtgaagaagagagtcaggccgggttagaatggctgtctctggtagcaatgaagcaacaacatagacagtctggacaagatgtggcagttctgtccagtcccgtgtgactgatttgggcatggagacaggcagtgggtgaggatggcctctgtaggtccagctgttttacccctagaatcaaatccctggagcttccggcagtcccaggattgggaagggtaacagagaggacgagtcgggcactgcaaaagaccagatcttggaaaattgctttgggaattgggacaccttccaagaagacagttgagttggctggggctctgccctagatggggtcaacctctccccaacacagccctgcccaggttggggcattggcagcttaagtgcgtcctggacaacaaatgtaatgtattggtcctgtaagattctagccattttcctctgcttatttttctacatgtgttacaagtaataatgtttagatgggtacatatgaacttgtgtaagttcaagtaactgctatgtagctacagcatgggcatcaaggtactctaaggtacttgccctgccacaccgaggccccctgccccggccccctttccctcctagccagccttctagggagcactgcacaccctgccccttcaaagctatctggacagtcctggctcgactggagcattaagggaggggctgtccttggtcaggcttctgcccaactgtgtgatgcataaatctttgcctggctccttcttccttcttttcggaagtctatctcctcctgagggcctctgcggtcctaacctatcaaggaatatcatagattgtactccccaccccatcaaaacacaccctgactttgcgtctggaatcaatcctcataaagccccaaggcttggagcacagaggccagaagcccatatggtggcatgtcaggcatgctgtcacatgagcttctctgactccacttccaagatggcatccaatttggagtctctgttctccatgagctcccatagctgtcccatattccacaaggcactgcttctgggccccggtcctctagtttcctcatagccctatttttgggtacattggtggatttcaaatgcctacagttgagcagccgaaggattctaagaaaattttgcttgtatttcaaaggctcatgtccccagccccattcactacaccctcagcagagcccagcgtggagcaaccttgtcccttcattccccaaatcttcattttatatagtcatttagtaaatatttgttaagtgcctcctgtgattctggaaaaaatggagaaaagtgggtgctgccttcagggtactaggagtccgatgaagagagggaggagttccagtagggtcccgaggccccacaggagctcccaacccagagaaagaccctccaggaaggattctcagaggaggagacttctgaaccctgtcttgaaatttgagtagaatggtagggaacggtgtgtcagacagaaggaacagcctatgtgtggactcagaggcaagatcatgatttattgagggtaactgcaagtggctaaaatcctgccccctggcacttgcctgcctttccctgctttccccaaagcctgattttgggaccctggagtctccatctccaaacagagggtgccctggctcagatgtggagaccttgacttctttccccagcatgctctggttcctactgttagccttggtgtcctgtgggggaagatgtctgaggagagttttgtgcttgctggagtcagaccagtactcaggccacctcaggcctgctctgcatccctctctggctctacagacctctctctctctctctctctctctctctctctctctctgtctgtctgtctctgtgtctgtctctgtctctgcctgcctccacacagtgaaggatgtgtctctatttcttagtgccctgcattgggtcctgaagtccatgggcatcttggctatagatgggttggccatgagcccttctctctaatgcatttttcattcctgttcctcttttgcttcactttccctctatcgactcttgcgacctgtgtctctgatgtctctggggcccccagttctgtcttgccataccaaaaaaccttcttcagcaaaaaacctctttctgggacagttcatatcactctatgaataggcccctgaagtgttgaggtcaaggacatgtgtgaacgtggaaatgtatttatggaaagaccctacactgagggtctctaactaaacatttcaggtatgatgggcaaaatgctggtttgttacagaaatgactgaagaagacctaggggccatagtgggccacaggccaagcctgcaatacagcctgaagtgtgggaaagaatgtatcagtcctgttgatggagtggtgtgtttgctgtctctataaatatgtcagggtttgaaagacagaaaacaaagcatctttgctgaccgccagactcccagggtatatgtggctactgcaaattagcgaggcttgtttatctgcttcaacttgactcaatttgcatttcttgagccactgtctattgtggataatgatttcatcaacactttctcagcatcagcagcccctccagagtattccttgaattttcttagctttgtgcaacccacgagcacttaatatatcactaacccttgagtttattggagggagtgaatgaaataatgaatgtcaataacgttacgcaatacctggcacacagtaggtgcttcatcaatgtggcttttcttctcaatcacccaaatgaacctcccccagaatcccacctctagggggacattcctgaaaaataagggactagaatagcgaggtggtgggtgttacccatttatttagatatttgtgtcctggtgaacatggggagggatgcccaagtgtcataaggacaccccctccccccgtctacaaggcagaggtctcttaggatgtgagagagtctctggcaagaccagcccccaccccaccaaggccctcatagaaacagaacattcttcctccctatcccaaagcagaagttgactggggcagataaggcaagtcacattacatctgtgcccttgaccatacctggaccaggcagagaagatcccagacttaggtggtcaacgtttccaccccaagcctctcatttctcgctctctttgagacttgatcttgtaccaggatccactcgacagacttaacgcatgattaatttgattgattactcttgaagttactgaccttaggaaaattcctcaattgtaaaaaggctttctctatatgtaaattatgctgttatctttttctatacacaaagtatatagacctataaatattatacatatatattatatatataaagactaattcttgtacagaccaacgcggaccgatggtccatattcttttctccatgtttgtttgtgtcgactgttgcagagtgagttgatgtaagaaggtggtttcatgttttcttttggggggccacttctttcttttcctttccgtttctatctctgtctgtctccgtctctgtctctctctttctcacttgttgccaatgtcttgttgctgagaaggaacactctattcagatgccatccaggaaagaaaggccagatggatggagggtccactgtgtatatttgtacagaatcatttataaagttttctacacttctaaaaaaagtatttctaacttgggctgttggacagtttgtgtgcctctgagccagcaagcctgttgtttcttgtgtttagtgcaatgtttagtgagaaaccaatgtctgaattatttatgccaataaaaaatttgagaattactgcattgcactactgccaagacaggtctgaattctattgtt

SEQ ID NO: 146631 - DNA, 4134 bp, Homo sapiens
  Payload ID: 9009
  Gene Symbol: KTN1
  Gene Name: kinectin 1 (kinesin receptor)
  Uniprot ID: Q86UP2
  ENST ID: ENST00000395308
  CDS Start-End: 186-4106
tcttcccggtctcctttcccggccgcacagggtagattttcgttccgtcacccaggctggagtgcagtggtgtgaccttggcttgctgcaaccctttgcctcctgggttcaagtgattctcattgcctcagcctcctaagtagctgggattacaggttttataggatcacattgacaaaagtaccatggagttttatgagtcagcatattttattgttcttattccttcaatagttattacagtaattttcctcttcttctggcttttcatgaaagaaacattatatgatgaagttcttgcaaaacagaaaagagaacaaaagcttattcctaccaaaacagataaaaagaaagcagaaaagaaaaagaataaaaagaaagaaatccagaatggaaacctccatgaatccgactctgagagtgtacctcgagactttaaattatcagatgctttggcagtagaagatgatcaagttgcacctgttccattgaatgtcgttgaaacttcaagtagtgttagggaaagaaaaaagaaggaaaagaaacaaaagcctgtgcttgaagagcaggtcatcaaagaaagtgacgcatcaaagattcctggcaaaaaagtagaacctgtcccagttactaaacagcccacccctccctctgaagcagctgcctcgaagaagaaaccagggcagaagaagtctaaaaatggaagcgatgaccaggataaaaaggtggaaactctcatggtaccatcaaaaaggcaagaagcattgcccctccaccaagagactaaacaagaaagtggatcagggaagaagaaagcttcatcaaagaaacaaaagacagaaaatgtcttcgtagatgaaccccttattcatgcaactacttatattcctttgatggataatgctgactcaagtcctgtggtagataagagagaggttattgatttgcttaaacctgaccaagtagaagggatccagaaatctgggactaaaaaactgaagaccgaaactgacaaagaaaatgctgaagtgaagtttaaagattttcttctgtccttgaagactatgatgttttctgaagatgaggctctttgtgttgtagacttgctaaaggagaagtctggtgtaatacaagatgctttaaagaagtcaagtaagggagaattgactacgcttatacatcagcttcaagaaaaggacaagttactcgctgctgtgaaggaagatgctgctgctacaaaggatcggtgtaagcagttaacccaggaaatgatgacagagaaagaaagaagcaatgtggttataacaaggatgaaagatcgaattggaacattagaaaaggaacataatgtatttcaaaacaaaatacatgtcagttatcaagagactcaacagatgcagatgaagtttcagcaagttcgtgagcagatggaggcagagatagctcacttgaagcaggaaaatggtatactgagagatgcagtcagcaacactacaaatcaactggaaagcaagcagtctgcagaactaaataaactacgccaggattatgctaggttggtgaatgagctgactgagaaaacaggaaagctacagcaagaggaagtccaaaagaagaatgctgagcaagcagctactcagttgaaggttcaactacaagaagctgagagaaggtgggaagaagttcagagctacatcaggaagagaacagcggaacatgaggcagcacagcaagatttacagagtaaatttgtggccaaagaaaatgaagtacagagtctgcatagtaagcttacagataccttggtatcaaaacaacagttggagcaaagactaatgcagttaatggaatcagagcagaaaagggtgaacaaagaagagtctctacaaatgcaggttcaggatattttggagcagaatgaggctttgaaagctcaaattcagcagttccattcccagatagcagcccagacctccgcttcagttctagcagaagaattacataaagtgattgcagaaaaggataagcagataaaacagactgaagattctttagcaagtgaacgtgatcgtttaacaagtaaagaagaggaacttaaggatatacagaatatgaatttcttattaaaagctgaagtgcagaaattacaggccctggcaaatgagcaggctgctgctgcacatgaattggagaagatgcaacaaagtgtttatgttaaagatgataaaataagattgctggaagagcaactacaacatgaaatttcaaacaaaatggaagaatttaagattctaaatgaccaaaacaaagcattaaaatcagaagttcagaagctacagactcttgtttctgaacagcctaataaggatgttgtggaacaaatggaaaaatgcattcaagaaaaagatgagaagttaaagactgtggaagaattacttgaaactggacttattcaggtggcaactaaagaagaggagctgaatgcaataagaacagaaaattcatctctgacaaaagaagttcaagacttaaaagctaagcaaaatgatcaggtttcttttgcctctctagttgaagaacttaagaaagtgatccatgagaaagatggaaagatcaagtctgtagaagagcttctggaggcagaacttctcaaagttgctaacaaggagaaaactgttcagttatctatcacttccaaagttcaggagcttcagaacttattaaaaggaaaagaggaacagatgaataccatgaaggctgttttggaagagaaagagaaagacctagccaatacagggaagtggttacaggatcttcaagaagaaaatgaatctttaaaagcacatgttcaggaagtagcacaacataacttgaaagaggcctcttctgcatcacagtttgaagaacttgagattgtgttgaaagaaaaggaaaatgaattgaagaggttagaagccatgctaaaagagagggagagtgatctttctagcaaaacacagctgttacaggatgtacaagatgaaaacaaattgtttaagtcccaaattgagcagcttaaacaacaaaactaccaacaggcatcttcttttccccctcatgaagaattattaaaagtaatttcagaaagagagaaagaaataagtggtctctggaatgagttagattctttgaaggatgcagttgaacaccagaggaagaaaaacaatgaccttcgggagaaaaactgggaagcaatggaagcattggcatcaactgaaaaaatgctgcaggacaaagtgaacaagacttccaaggaaaggcagcaacaggtggaagctgttgagttggaggctaaagaagttctcaaaaaattatttccaaaggtgtctgtcccttctaatttgagttatggtgaatggttgcatggatttgaaaaaaaggcaaaagaatgtatggctggaacttcagggtcagaggaggttaaggttctagagcacaagttgaaagaagctgatgaaatgcacacattgttacagctagagtgtgaaaaatacaaatccgtccttgcagaaacagaaggaattttacagaagctacagagaagtgttgagcaagaagaaaataaatggaaagttaaggtcgatgaatcacacaagactattaaacagatgcagtcatcatttacatcttcagaacaagagctagagcgattaagaagcgaaaataaggatattgaaaatctgagaagagaacgagaacatttggaaatggaactagaaaaggcagagatggaacgatctacctatgttacagaagtcagagagttgaaggcacagttaaatgaaacactcacaaaacttagaactgaacaaaatgaaagacagaaggtagctggtgatttgcataaggctcaacagtcactggagcttatccagtcaaaaatagtaaaagctgctggagacactactgttattgaaaatagtgatgtttccccagaaacggagtcttctgagaaggagacaatgtctgtaagtctaaatcagactgtaacacagttacagcagttgcttcaggcggtaaaccaacagctcacaaaggagaaagagcactaccaggtgttagagtgatcatcctctggcctaccttgacacatgc

SEQ ID NO: 146632 - DNA, 4021 bp, Homo sapiens
  Payload ID: 9009
  Gene Symbol: KTN1
  Gene Name: kinectin 1 (kinesin receptor)
  Uniprot ID: Q86UP2
  ENST ID: ENST00000395309
  CDS Start-End: 73-3993
ggttctttttttttttttgtccccaccttcttccctatttaggttttataggatcacattgacaaaagtaccatggagttttatgagtcagcatattttattgttcttattccttcaatagttattacagtaattttcctcttcttctggcttttcatgaaagaaacattatatgatgaagttcttgcaaaacagaaaagagaacaaaagcttattcctaccaaaacagataaaaagaaagcagaaaagaaaaagaataaaaagaaagaaatccagaatggaaacctccatgaatccgactctgagagtgtacctcgagactttaaattatcagatgctttggcagtagaagatgatcaagttgcacctgttccattgaatgtcgttgaaacttcaagtagtgttagggaaagaaaaaagaaggaaaagaaacaaaagcctgtgcttgaagagcaggtcatcaaagaaagtgacgcatcaaagattcctggcaaaaaagtagaacctgtcccagttactaaacagcccacccctccctctgaagcagctgcctcgaagaagaaaccagggcagaagaagtctaaaaatggaagcgatgaccaggataaaaaggtggaaactctcatggtaccatcaaaaaggcaagaagcattgcccctccaccaagagactaaacaagaaagtggatcagggaagaagaaagcttcatcaaagaaacaaaagacagaaaatgtcttcgtagatgaaccccttattcatgcaactacttatattcctttgatggataatgctgactcaagtcctgtggtagataagagagaggttattgatttgcttaaacctgaccaagtagaagggatccagaaatctgggactaaaaaactgaagaccgaaactgacaaagaaaatgctgaagtgaagtttaaagattttcttctgtccttgaagactatgatgttttctgaagatgaggctctttgtgttgtagacttgctaaaggagaagtctggtgtaatacaagatgctttaaagaagtcaagtaagggagaattgactacgcttatacatcagcttcaagaaaaggacaagttactcgctgctgtgaaggaagatgctgctgctacaaaggatcggtgtaagcagttaacccaggaaatgatgacagagaaagaaagaagcaatgtggttataacaaggatgaaagatcgaattggaacattagaaaaggaacataatgtatttcaaaacaaaatacatgtcagttatcaagagactcaacagatgcagatgaagtttcagcaagttcgtgagcagatggaggcagagatagctcacttgaagcaggaaaatggtatactgagagatgcagtcagcaacactacaaatcaactggaaagcaagcagtctgcagaactaaataaactacgccaggattatgctaggttggtgaatgagctgactgagaaaacaggaaagctacagcaagaggaagtccaaaagaagaatgctgagcaagcagctactcagttgaaggttcaactacaagaagctgagagaaggtgggaagaagttcagagctacatcaggaagagaacagcggaacatgaggcagcacagcaagatttacagagtaaatttgtggccaaagaaaatgaagtacagagtctgcatagtaagcttacagataccttggtatcaaaacaacagttggagcaaagactaatgcagttaatggaatcagagcagaaaagggtgaacaaagaagagtctctacaaatgcaggttcaggatattttggagcagaatgaggctttgaaagctcaaattcagcagttccattcccagatagcagcccagacctccgcttcagttctagcagaagaattacataaagtgattgcagaaaaggataagcagataaaacagactgaagattctttagcaagtgaacgtgatcgtttaacaagtaaagaagaggaacttaaggatatacagaatatgaatttcttattaaaagctgaagtgcagaaattacaggccctggcaaatgagcaggctgctgctgcacatgaattggagaagatgcaacaaagtgtttatgttaaagatgataaaataagattgctggaagagcaactacaacatgaaatttcaaacaaaatggaagaatttaagattctaaatgaccaaaacaaagcattaaaatcagaagttcagaagctacagactcttgtttctgaacagcctaataaggatgttgtggaacaaatggaaaaatgcattcaagaaaaagatgagaagttaaagactgtggaagaattacttgaaactggacttattcaggtggcaactaaagaagaggagctgaatgcaataagaacagaaaattcatctctgacaaaagaagttcaagacttaaaagctaagcaaaatgatcaggtttcttttgcctctctagttgaagaacttaagaaagtgatccatgagaaagatggaaagatcaagtctgtagaagagcttctggaggcagaacttctcaaagttgctaacaaggagaaaactgttcagttatctatcacttccaaagttcaggagcttcagaacttattaaaaggaaaagaggaacagatgaataccatgaaggctgttttggaagagaaagagaaagacctagccaatacagggaagtggttacaggatcttcaagaagaaaatgaatctttaaaagcacatgttcaggaagtagcacaacataacttgaaagaggcctcttctgcatcacagtttgaagaacttgagattgtgttgaaagaaaaggaaaatgaattgaagaggttagaagccatgctaaaagagagggagagtgatctttctagcaaaacacagctgttacaggatgtacaagatgaaaacaaattgtttaagtcccaaattgagcagcttaaacaacaaaactaccaacaggcatcttcttttccccctcatgaagaattattaaaagtaatttcagaaagagagaaagaaataagtggtctctggaatgagttagattctttgaaggatgcagttgaacaccagaggaagaaaaacaatgaccttcgggagaaaaactgggaagcaatggaagcattggcatcaactgaaaaaatgctgcaggacaaagtgaacaagacttccaaggaaaggcagcaacaggtggaagctgttgagttggaggctaaagaagttctcaaaaaattatttccaaaggtgtctgtcccttctaatttgagttatggtgaatggttgcatggatttgaaaaaaaggcaaaagaatgtatggctggaacttcagggtcagaggaggttaaggttctagagcacaagttgaaagaagctgatgaaatgcacacattgttacagctagagtgtgaaaaatacaaatccgtccttgcagaaacagaaggaattttacagaagctacagagaagtgttgagcaagaagaaaataaatggaaagttaaggtcgatgaatcacacaagactattaaacagatgcagtcatcatttacatcttcagaacaagagctagagcgattaagaagcgaaaataaggatattgaaaatctgagaagagaacgagaacatttggaaatggaactagaaaaggcagagatggaacgatctacctatgttacagaagtcagagagttgaaggcacagttaaatgaaacactcacaaaacttagaactgaacaaaatgaaagacagaaggtagctggtgatttgcataaggctcaacagtcactggagcttatccagtcaaaaatagtaaaagctgctggagacactactgttattgaaaatagtgatgtttccccagaaacggagtcttctgagaaggagacaatgtctgtaagtctaaatcagactgtaacacagttacagcagttgcttcaggcggtaaaccaacagctcacaaaggagaaagagcactaccaggtgttagagtgatcatcctctggcctaccttgacacatgc

SEQ ID NO: 146633 - DNA, 4516 bp, Homo sapiens
  Payload ID: 9009
  Gene Symbol: KTN1
  Gene Name: kinectin 1 (kinesin receptor)
  Uniprot ID: Q86UP2
  ENST ID: ENST00000395311
  CDS Start-End: 120-4040
gtggtgtgaccttggcttgctgcaaccctttgcctcctgggttcaagtgattctcattgcctcagcctcctaagtagctgggattacaggttttataggatcacattgacaaaagtaccatggagttttatgagtcagcatattttattgttcttattccttcaatagttattacagtaattttcctcttcttctggcttttcatgaaagaaacattatatgatgaagttcttgcaaaacagaaaagagaacaaaagcttattcctaccaaaacagataaaaagaaagcagaaaagaaaaagaataaaaagaaagaaatccagaatggaaacctccatgaatccgactctgagagtgtacctcgagactttaaattatcagatgctttggcagtagaagatgatcaagttgcacctgttccattgaatgtcgttgaaacttcaagtagtgttagggaaagaaaaaagaaggaaaagaaacaaaagcctgtgcttgaagagcaggtcatcaaagaaagtgacgcatcaaagattcctggcaaaaaagtagaacctgtcccagttactaaacagcccacccctccctctgaagcagctgcctcgaagaagaaaccagggcagaagaagtctaaaaatggaagcgatgaccaggataaaaaggtggaaactctcatggtaccatcaaaaaggcaagaagcattgcccctccaccaagagactaaacaagaaagtggatcagggaagaagaaagcttcatcaaagaaacaaaagacagaaaatgtcttcgtagatgaaccccttattcatgcaactacttatattcctttgatggataatgctgactcaagtcctgtggtagataagagagaggttattgatttgcttaaacctgaccaagtagaagggatccagaaatctgggactaaaaaactgaagaccgaaactgacaaagaaaatgctgaagtgaagtttaaagattttcttctgtccttgaagactatgatgttttctgaagatgaggctctttgtgttgtagacttgctaaaggagaagtctggtgtaatacaagatgctttaaagaagtcaagtaagggagaattgactacgcttatacatcagcttcaagaaaaggacaagttactcgctgctgtgaaggaagatgctgctgctacaaaggatcggtgtaagcagttaacccaggaaatgatgacagagaaagaaagaagcaatgtggttataacaaggatgaaagatcgaattggaacattagaaaaggaacataatgtatttcaaaacaaaatacatgtcagttatcaagagactcaacagatgcagatgaagtttcagcaagttcgtgagcagatggaggcagagatagctcacttgaagcaggaaaatggtatactgagagatgcagtcagcaacactacaaatcaactggaaagcaagcagtctgcagaactaaataaactacgccaggattatgctaggttggtgaatgagctgactgagaaaacaggaaagctacagcaagaggaagtccaaaagaagaatgctgagcaagcagctactcagttgaaggttcaactacaagaagctgagagaaggtgggaagaagttcagagctacatcaggaagagaacagcggaacatgaggcagcacagcaagatttacagagtaaatttgtggccaaagaaaatgaagtacagagtctgcatagtaagcttacagataccttggtatcaaaacaacagttggagcaaagactaatgcagttaatggaatcagagcagaaaagggtgaacaaagaagagtctctacaaatgcaggttcaggatattttggagcagaatgaggctttgaaagctcaaattcagcagttccattcccagatagcagcccagacctccgcttcagttctagcagaagaattacataaagtgattgcagaaaaggataagcagataaaacagactgaagattctttagcaagtgaacgtgatcgtttaacaagtaaagaagaggaacttaaggatatacagaatatgaatttcttattaaaagctgaagtgcagaaattacaggccctggcaaatgagcaggctgctgctgcacatgaattggagaagatgcaacaaagtgtttatgttaaagatgataaaataagattgctggaagagcaactacaacatgaaatttcaaacaaaatggaagaatttaagattctaaatgaccaaaacaaagcattaaaatcagaagttcagaagctacagactcttgtttctgaacagcctaataaggatgttgtggaacaaatggaaaaatgcattcaagaaaaagatgagaagttaaagactgtggaagaattacttgaaactggacttattcaggtggcaactaaagaagaggagctgaatgcaataagaacagaaaattcatctctgacaaaagaagttcaagacttaaaagctaagcaaaatgatcaggtttcttttgcctctctagttgaagaacttaagaaagtgatccatgagaaagatggaaagatcaagtctgtagaagagcttctggaggcagaacttctcaaagttgctaacaaggagaaaactgttcagttatctatcacttccaaagttcaggagcttcagaacttattaaaaggaaaagaggaacagatgaataccatgaaggctgttttggaagagaaagagaaagacctagccaatacagggaagtggttacaggatcttcaagaagaaaatgaatctttaaaagcacatgttcaggaagtagcacaacataacttgaaagaggcctcttctgcatcacagtttgaagaacttgagattgtgttgaaagaaaaggaaaatgaattgaagaggttagaagccatgctaaaagagagggagagtgatctttctagcaaaacacagctgttacaggatgtacaagatgaaaacaaattgtttaagtcccaaattgagcagcttaaacaacaaaactaccaacaggcatcttcttttccccctcatgaagaattattaaaagtaatttcagaaagagagaaagaaataagtggtctctggaatgagttagattctttgaaggatgcagttgaacaccagaggaagaaaaacaatgaccttcgggagaaaaactgggaagcaatggaagcattggcatcaactgaaaaaatgctgcaggacaaagtgaacaagacttccaaggaaaggcagcaacaggtggaagctgttgagttggaggctaaagaagttctcaaaaaattatttccaaaggtgtctgtcccttctaatttgagttatggtgaatggttgcatggatttgaaaaaaaggcaaaagaatgtatggctggaacttcagggtcagaggaggttaaggttctagagcacaagttgaaagaagctgatgaaatgcacacattgttacagctagagtgtgaaaaatacaaatccgtccttgcagaaacagaaggaattttacagaagctacagagaagtgttgagcaagaagaaaataaatggaaagttaaggtcgatgaatcacacaagactattaaacagatgcagtcatcatttacatcttcagaacaagagctagagcgattaagaagcgaaaataaggatattgaaaatctgagaagagaacgagaacatttggaaatggaactagaaaaggcagagatggaacgatctacctatgttacagaagtcagagagttgaaggcacagttaaatgaaacactcacaaaacttagaactgaacaaaatgaaagacagaaggtagctggtgatttgcataaggctcaacagtcactggagcttatccagtcaaaaatagtaaaagctgctggagacactactgttattgaaaatagtgatgtttccccagaaacggagtcttctgagaaggagacaatgtctgtaagtctaaatcagactgtaacacagttacagcagttgcttcaggcggtaaaccaacagctcacaaaggagaaagagcactaccaggtgttagagtgaagtaattgggaaactgttcatttgaggataaaaaaggcattgtattatattttgccaaattaaagccttatttatgttttcaccctttctactttgtcagaaacactgaacagagttttgtcttttctaatccttgttagactactgatttaaagaaggaaaaaaaaaagccaactctgtagacaccttcagagtttagttttataataaaaactgtttgaataattagacctttacattcctgaagataaacatgtaatcttttatcttattttgctcaataaaattgttcagaagatcaaagtggtaaagacaatgtaaaatttaacattttaatactgatgttgtacactgttttacttaacattttgggaagtaactgcctctgacttcaactcaagaaaacacttttttgttgctaatgtaatcggtttttgtaatggcgtcagcaaataaaaggatgcttattattcaaa

SEQ ID NO: 146634 - DNA, 4618 bp, Homo sapiens
  Payload ID: 9009
  Gene Symbol: KTN1
  Gene Name: kinectin 1 (kinesin receptor)
  Uniprot ID: Q86UP2
  ENST ID: ENST00000395314
  CDS Start-End: 69-4142
cgccgcgtcttcccggtctcctttcccggccgcacagggttttataggatcacattgacaaaagtaccatggagttttatgagtcagcatattttattgttcttattccttcaatagttattacagtaattttcctcttcttctggcttttcatgaaagaaacattatatgatgaagttcttgcaaaacagaaaagagaacaaaagcttattcctaccaaaacagataaaaagaaagcagaaaagaaaaagaataaaaagaaagaaatccagaatggaaacctccatgaatccgactctgagagtgtacctcgagactttaaattatcagatgctttggcagtagaagatgatcaagttgcacctgttccattgaatgtcgttgaaacttcaagtagtgttagggaaagaaaaaagaaggaaaagaaacaaaagcctgtgcttgaagagcaggtcatcaaagaaagtgacgcatcaaagattcctggcaaaaaagtagaacctgtcccagttactaaacagcccacccctccctctgaagcagctgcctcgaagaagaaaccagggcagaagaagtctaaaaatggaagcgatgaccaggataaaaaggtggaaactctcatggtaccatcaaaaaggcaagaagcattgcccctccaccaagagactaaacaagaaagtggatcagggaagaagaaagcttcatcaaagaaacaaaagacagaaaatgtcttcgtagatgaaccccttattcatgcaactacttatattcctttgatggataatgctgactcaagtcctgtggtagataagagagaggttattgatttgcttaaacctgaccaagtagaagggatccagaaatctgggactaaaaaactgaagaccgaaactgacaaagaaaatgctgaagtgaagtttaaagattttcttctgtccttgaagactatgatgttttctgaagatgaggctctttgtgttgtagacttgctaaaggagaagtctggtgtaatacaagatgctttaaagaagtcaagtaagggagaattgactacgcttatacatcagcttcaagaaaaggacaagttactcgctgctgtgaaggaagatgctgctgctacaaaggatcggtgtaagcagttaacccaggaaatgatgacagagaaagaaagaagcaatgtggttataacaaggatgaaagatcgaattggaacattagaaaaggaacataatgtatttcaaaacaaaatacatgtcagttatcaagagactcaacagatgcagatgaagtttcagcaagttcgtgagcagatggaggcagagatagctcacttgaagcaggaaaatggtatactgagagatgcagtcagcaacactacaaatcaactggaaagcaagcagtctgcagaactaaataaactacgccaggattatgctaggttggtgaatgagctgactgagaaaacaggaaagctacagcaagaggaagtccaaaagaagaatgctgagcaagcagctactcagttgaaggttcaactacaagaagctgagagaaggtgggaagaagttcagagctacatcaggaagagaacagcggaacatgaggcagcacagcaagatttacagagtaaatttgtggccaaagaaaatgaagtacagagtctgcatagtaagcttacagataccttggtatcaaaacaacagttggagcaaagactaatgcagttaatggaatcagagcagaaaagggtgaacaaagaagagtctctacaaatgcaggttcaggatattttggagcagaatgaggctttgaaagctcaaattcagcagttccattcccagatagcagcccagacctccgcttcagttctagcagaagaattacataaagtgattgcagaaaaggataagcagataaaacagactgaagattctttagcaagtgaacgtgatcgtttaacaagtaaagaagaggaacttaaggatatacagaatatgaatttcttattaaaagctgaagtgcagaaattacaggccctggcaaatgagcaggctgctgctgcacatgaattggagaagatgcaacaaagtgtttatgttaaagatgataaaataagattgctggaagagcaactacaacatgaaatttcaaacaaaatggaagaatttaagattctaaatgaccaaaacaaagcattaaaatcagaagttcagaagctacagactcttgtttctgaacagcctaataaggatgttgtggaacaaatggaaaaatgcattcaagaaaaagatgagaagttaaagactgtggaagaattacttgaaactggacttattcaggtggcaactaaagaagaggagctgaatgcaataagaacagaaaattcatctctgacaaaagaagttcaagacttaaaagctaagcaaaatgatcaggtttcttttgcctctctagttgaagaacttaagaaagtgatccatgagaaagatggaaagatcaagtctgtagaagagcttctggaggcagaacttctcaaagttgctaacaaggagaaaactgttcaggatttgaaacaggaaataaaggctctaaaagaagaaataggaaatgtccagcttgaaaaggctcaacagttatctatcacttccaaagttcaggagcttcagaacttattaaaaggaaaagaggaacagatgaataccatgaaggctgttttggaagagaaagagaaagacctagccaatacagggaagtggttacaggatcttcaagaagaaaatgaatctttaaaagcacatgttcaggaagtagcacaacataacttgaaagaggcctcttctgcatcacagtttgaagaacttgagattgtgttgaaagaaaaggaaaatgaattgaagaggttagaagccatgctaaaagagagggagagtgatctttctagcaaaacacagctgttacaggatgtacaagatgaaaacaaattgtttaagtcccaaattgagcagcttaaacaacaaaactaccaacaggcatcttcttttccccctcatgaagaattattaaaagtaatttcagaaagagagaaagaaataagtggtctctggaatgagttagattctttgaaggatgcagttgaacaccagaggaagaaaaacaatgaccttcgggagaaaaactgggaagcaatggaagcattggcatcaactgaaaaaatgctgcaggacaaagtgaacaagacttccaaggaaaggcagcaacaggtggaagctgttgagttggaggctaaagaagttctcaaaaaattatttccaaaggtgtctgtcccttctaatttgagttatggtgaatggttgcatggatttgaaaaaaaggcaaaagaatgtatggctggaacttcagggtcagaggaggttaaggttctagagcacaagttgaaagaagctgatgaaatgcacacattgttacagctagagtgtgaaaaatacaaatccgtccttgcagaaacagaaggaattttacagaagctacagagaagtgttgagcaagaagaaaataaatggaaagttaaggtcgatgaatcacacaagactattaaacagatgcagtcatcatttacatcttcagaacaagagctagagcgattaagaagcgaaaataaggatattgaaaatctgagaagagaacgagaacatttggaaatggaactagaaaaggcagagatggaacgatctacctatgttacagaagtcagagagctgaaagatctgttgactgaattgcagaaaaaacttgatgattcatattctgaagcagtaagacagaatgaagagctaaatttgttgaaggcacagttaaatgaaacactcacaaaacttagaactgaacaaaatgaaagacagaaggtagctggtgatttgcataaggctcaacagtcactggagcttatccagtcaaaaatagtaaaagctgctggagacactactgttattgaaaatagtgatgtttccccagaaacggagtcttctgagaaggagacaatgtctgtaagtctaaatcagactgtaacacagttacagcagttgcttcaggcggtaaaccaacagctcacaaaggagaaagagcactaccaggtgttagagtgaagtaattgggaaactgttcatttgaggataaaaaaggcattgtattatattttgccaaattaaagccttatttatgttttcaccctttctactttgtcagaaacactgaacagagttttgtcttttctaatccttgttagactactgatttaaagaaggaaaaaaaaaagccaactctgtagacaccttcagagtttagttttataataaaaactgtttgaataattagacctttacattcctgaagataaacatgtaatcttttatcttattttgctcaataaaattgttcagaagatcaaagtggtaaagacaatgtaaaatttaacattttaatactgatgttgtacactgttttacttaacattttgggaagtaactgcctctgacttcaactcaagaaaacacttttttgttgctaatgtaatcggtttttgtaatggcgtcagcaaataaaaggatgcttattattcaaa

SEQ ID NO: 146635 - DNA, 4449 bp, Homo sapiens
  Payload ID: 9009
  Gene Symbol: KTN1
  Gene Name: kinectin 1 (kinesin receptor)
  Uniprot ID: Q86UP2
  ENST ID: ENST00000438792
  CDS Start-End: 71-3973
gccgccgcgtcttcccggtctcctttcccggccgcacagggttttataggatcacattgacaaaagtaccatggagttttatgagtcagcatattttattgttcttattccttcaatagttattacagtaattttcctcttcttctggcttttcatgaaagaaacattatatgatgaagttcttgcaaaacagaaaagagaacaaaagcttattcctaccaaaacagataaaaagaaagcagaaaagaaaaagaataaaaagaaagaaatccagaatggaaacctccatgaatccgactctgagagtgtacctcgagactttaaattatcagatgctttggcagtagaagatgatcaagttgcacctgttccattgaatgtcgttgaaacttcaagtagtgttagggaaagaaaaaagaaggaaaagaaacaaaagcctgtgcttgaagagcaggtcatcaaagaaagtgacgcatcaaagattcctggcaaaaaagtagaacctgtcccagttactaaacagcccacccctccctctgaagcagctgcctcgaagaagaaaccagggcagaagaagtctaaaaatggaagcgatgaccaggataaaaaggtggaaactctcatggtaccatcaaaaaggcaagaagcattgcccctccaccaagagactaaacaagaaagtggatcagggaagaagaaagcttcatcaaagaaacaaaagacagaaaatgtcttcgtagatgaaccccttattcatgcaactacttatattcctttgatggataatgctgactcaagtcctgtggtagataagagagaggttattgatttgcttaaacctgaccaagtagaagggatccagaaatctgggactaaaaaactgaagaccgaaactgacaaagaaaatgctgaagtgaagtttaaagattttcttctgtccttgaagactatgatgttttctgaagatgaggctctttgtgttgtagacttgctaaaggagaagtctggtgtaatacaagatgctttaaagaagtcaagtaagggagaattgactacgcttatacatcagcttcaagaaaaggacaagttactcgctgctgtgaaggaagatgctgctgctacaaaggatcggtgtaagcagttaacccaggaaatgatgacagagaaagaaagaagcaatgtggttataacaaggatgaaagatcgaattggaacattagaaaaggaacataatgtatttcaaaacaaaatacatgtcagttatcaagagactcaacagatgcagatgaagtttcagcaagttcgtgagcagatggaggcagagatagctcacttgaagcaggaaaatggtatactgagagatgcagtcagcaacactacaaatcaactggaaagcaagcagtctgcagaactaaataaactacgccaggattatgctaggttggtgaatgagctgactgagaaaacaggaaagctacagcaagaggaagtccaaaagaagaatgctgagcaagcagctactcagttgaaggttcaactacaagaagctgagagaaggtgggaagaagttcagagctacatcaggaagagaacagcggaacatgaggcagcacagcaagatttacagagtaaatttgtggccaaagaaaatgaagtacagagtctgcatagtaagcttacagataccttggtatcaaaacaacagttggagcaaagactaatgcagttaatggaatcagagcagaaaagggtgaacaaagaagagtctctacaaatgcaggttcaggatattttggagcagaatgaggctttgaaagctcaaattcagcagttccattcccagatagcagcccagacctccgcttcagttctagcagaagaattacataaagtgattgcagaaaaggataagcagataaaacagactgaagattctttagcaagtgaacgtgatcgtttaacaagtaaagaagaggaacttaaggatatacagaatatgaatttcttattaaaagctgaagtgcagaaattacaggccctggcaaatgagcaggctgctgctgcacatgaattggagaagatgcaacaaagtgtttatgttaaagatgataaaataagattgctggaagagcaactacaacatgaaatttcaaacaaaatggaagaatttaagattctaaatgaccaaaacaaagcattaaaatcagaagttcagaagctacagactcttgtttctgaacagcctaataaggatgttgtggaacaaatggaaaaatgcattcaagaaaaagatgagaagttaaagactgtggaagaattacttgaaactggacttattcaggtggcaactaaagaagaggagctgaatgcaataagaacagaaaattcatctctgacaaaagaagttcaagacttaaaagctaagcaaaatgatcaggtttcttttgcctctctagttgaagaacttaagaaagtgatccatgagaaagatggaaagatcaagtctgtagaagagcttctggaggcagaacttctcaaagttgctaacaaggagaaaactgttcaggatttgaaacaggaaataaaggctctaaaagaagaaataggaaatgtccagcttgaaaaggctcaacagttatctatcacttccaaagttcaggagcttcagaacttattaaaaggaaaagaggaacagatgaataccatgaaggctgttttggaagagaaagagaaagacctagccaatacagggaagtggttacaggatcttcaagaagaaaatgaatctttaaaagcacatgttcaggaagtagcacaacataacttgaaagaggcctcttctgcatcacagtttgaagaacttgagattgtgttgaaagaaaaggaaaatgaattgaagaggttagaagccatgctaaaagagagggagagtgatctttctagcaaaacacagctgttacaggatgtacaagatgaaaacaaattgtttaagtcccaaattgagcagcttaaacaacaaaactaccaacaggcatcttcttttccccctcatgaagaattattaaaagtaatttcagaaagagagaaagaaataagtggtctctggaatgagttagattctttgaaggatgcagttgaacaccagaggaagaaaaacaatgaaaggcagcaacaggtggaagctgttgagttggaggctaaagaagttctcaaaaaattatttccaaaggtgtctgtcccttctaatttgagttatggtgaatggttgcatggatttgaaaaaaaggcaaaagaatgtatggctggaacttcagggtcagaggaggttaaggttctagagcacaagttgaaagaagctgatgaaatgcacacattgttacagctagagtgtgaaaaatacaaatccgtccttgcagaaacagaaggaattttacagaagctacagagaagtgttgagcaagaagaaaataaatggaaagttaaggtcgatgaatcacacaagactattaaacagatgcagtcatcatttacatcttcagaacaagagctagagcgattaagaagcgaaaataaggatattgaaaatctgagaagagaacgagaacatttggaaatggaactagaaaaggcagagatggaacgatctacctatgttacagaagtcagagagttgaaggcacagttaaatgaaacactcacaaaacttagaactgaacaaaatgaaagacagaaggtagctggtgatttgcataaggctcaacagtcactggagcttatccagtcaaaaatagtaaaagctgctggagacactactgttattgaaaatagtgatgtttccccagaaacggagtcttctgagaaggagacaatgtctgtaagtctaaatcagactgtaacacagttacagcagttgcttcaggcggtaaaccaacagctcacaaaggagaaagagcactaccaggtgttagagtgaagtaattgggaaactgttcatttgaggataaaaaaggcattgtattatattttgccaaattaaagccttatttatgttttcaccctttctactttgtcagaaacactgaacagagttttgtcttttctaatccttgttagactactgatttaaagaaggaaaaaaaaaagccaactctgtagacaccttcagagtttagttttataataaaaactgtttgaataattagacctttacattcctgaagataaacatgtaatcttttatcttattttgctcaataaaattgttcagaagatcaaagtggtaaagacaatgtaaaatttaacattttaatactgatgttgtacactgttttacttaacattttgggaagtaactgcctctgacttcaactcaagaaaacacttttttgttgctaatgtaatcggtttttgtaatggcgtcagcaaataaaaggatgcttattattcaaa

SEQ ID NO: 146636 - DNA, 4473 bp, Homo sapiens
  Payload ID: 9009
  Gene Symbol: KTN1
  Gene Name: kinectin 1 (kinesin receptor)
  Uniprot ID: Q86UP2
  ENST ID: ENST00000413890
  CDS Start-End: 73-3993
ggttctttttttttttttgtccccaccttcttccctatttaggttttataggatcacattgacaaaagtaccatggagttttatgagtcagcatattttattgttcttattccttcaatagttattacagtaattttcctcttcttctggcttttcatgaaagaaacattatatgatgaagttcttgcaaaacagaaaagagaacaaaagcttattcctaccaaaacagataaaaagaaagcagaaaagaaaaagaataaaaagaaagaaatccagaatggaaacctccatgaatccgactctgagagtgtacctcgagactttaaattatcagatgctttggcagtagaagatgatcaagttgcacctgttccattgaatgtcgttgaaacttcaagtagtgttagggaaagaaaaaagaaggaaaagaaacaaaagcctgtgcttgaagagcaggtcatcaaagaaagtgacgcatcaaagattcctggcaaaaaagtagaacctgtcccagttactaaacagcccacccctccctctgaagcagctgcctcgaagaagaaaccagggcagaagaagtctaaaaatggaagcgatgaccaggataaaaaggtggaaactctcatggtaccatcaaaaaggcaagaagcattgcccctccaccaagagactaaacaagaaagtggatcagggaagaagaaagcttcatcaaagaaacaaaagacagaaaatgtcttcgtagatgaaccccttattcatgcaactacttatattcctttgatggataatgctgactcaagtcctgtggtagataagagagaggttattgatttgcttaaacctgaccaagtagaagggatccagaaatctgggactaaaaaactgaagaccgaaactgacaaagaaaatgctgaagtgaagtttaaagattttcttctgtccttgaagactatgatgttttctgaagatgaggctctttgtgttgtagacttgctaaaggagaagtctggtgtaatacaagatgctttaaagaagtcaagtaagggagaattgactacgcttatacatcagcttcaagaaaaggacaagttactcgctgctgtgaaggaagatgctgctgctacaaaggatcggtgtaagcagttaacccaggaaatgatgacagagaaagaaagaagcaatgtggttataacaaggatgaaagatcgaattggaacattagaaaaggaacataatgtatttcaaaacaaaatacatgtcagttatcaagagactcaacagatgcagatgaagtttcagcaagttcgtgagcagatggaggcagagatagctcacttgaagcaggaaaatggtatactgagagatgcagtcagcaacactacaaatcaactggaaagcaagcagtctgcagaactaaataaactacgccaggattatgctaggttggtgaatgagctgactgagaaaacaggaaagctacagcaagaggaagtccaaaagaagaatgctgagcaagcagctactcagttgaaggttcaactacaagaagctgagagaaggtgggaagaagttcagagctacatcaggaagagaacagcggaacatgaggcagcacagcaagatttacagagtaaatttgtggccaaagaaaatgaagtacagagtctgcatagtaagcttacagataccttggtatcaaaacaacagttggagcaaagactaatgcagttaatggaatcagagcagaaaagggtgaacaaagaagagtctctacaaatgcaggttcaggatattttggagcagaatgaggctttgaaagctcaaattcagcagttccattcccagatagcagcccagacctccgcttcagttctagcagaagaattacataaagtgattgcagaaaaggataagcagataaaacagactgaagattctttagcaagtgaacgtgatcgtttaacaagtaaagaagaggaacttaaggatatacagaatatgaatttcttattaaaagctgaagtgcagaaattacaggccctggcaaatgagcaggctgctgctgcacatgaattggagaagatgcaacaaagtgtttatgttaaagatgataaaataagattgctggaagagcaactacaacatgaaatttcaaacaaaatggaagaatttaagattctaaatgaccaaaacaaagcattaaaatcagaagttcagaagctacagactcttgtttctgaacagcctaataaggatgttgtggaacaaatggaaaaatgcattcaagaaaaagatgagaagttaaagactgtggaagaattacttgaaactggacttattcaggtggcaactaaagaagaggagctgaatgcaataagaacagaaaattcatctctgacaaaagaagttcaagacttaaaagctaagcaaaatgatcaggtttcttttgcctctctagttgaagaacttaagaaagtgatccatgagaaagatggaaagatcaagtctgtagaagagcttctggaggcagaacttctcaaagttgctaacaaggagaaaactgttcagttatctatcacttccaaagttcaggagcttcagaacttattaaaaggaaaagaggaacagatgaataccatgaaggctgttttggaagagaaagagaaagacctagccaatacagggaagtggttacaggatcttcaagaagaaaatgaatctttaaaagcacatgttcaggaagtagcacaacataacttgaaagaggcctcttctgcatcacagtttgaagaacttgagattgtgttgaaagaaaaggaaaatgaattgaagaggttagaagccatgctaaaagagagggagagtgatctttctagcaaaacacagctgttacaggatgtacaagatgaaaacaaattgtttaagtcccaaattgagcagcttaaacaacaaaactaccaacaggcatcttcttttccccctcatgaagaattattaaaagtaatttcagaaagagagaaagaaataagtggtctctggaatgagttagattctttgaaggatgcagttgaacaccagaggaagaaaaacaatgaccttcgggagaaaaactgggaagcaatggaagcattggcatcaactgaaaaaatgctgcaggacaaagtgaacaagacttccaaggaaaggcagcaacaggtggaagctgttgagttggaggctaaagaagttctcaaaaaattatttccaaaggtgtctgtcccttctaatttgagttatggtgaatggttgcatggatttgaaaaaaaggcaaaagaatgtatggctggaacttcagggtcagaggaggttaaggttctagagcacaagttgaaagaagctgatgaaatgcacacattgttacagctagagtgtgaaaaatacaaatccgtccttgcagaaacagaaggaattttacagaagctacagagaagtgttgagcaagaagaaaataaatggaaagttaaggtcgatgaatcacacaagactattaaacagatgcagtcatcatttacatcttcagaacaagagctagagcgattaagaagcgaaaataaggatattgaaaatctgagaagagaacgagaacatttggaaatggaactagaaaaggcagagatggaacgatctacctatgttacagaagtcagagagttgaaggcacagttaaatgaaacactcacaaaacttagaactgaacaaaatgaaagacagaaggtagctggtgatttgcataaggctcaacagtcactggagcttatccagtcaaaaatagtaaaagctgctggagacactactgttattgaaaatagtgatgtttccccagaaacggagtcttctgagaaggagacaatgtctgtaagtctaaatcagactgtaacacagttacagcagttgcttcaggcggtaaaccaacagctcacaaaggagaaagagcactaccaggtgttagagtgaagtaattgggaaactgttcatttgaggataaaaaaggcattgtattatattttgccaaattaaagccttatttatgttttcaccctttctactttgtcagaaacactgaacagagttttgtcttttctaatccttgttagactactgatttaaagaaggaaaaaaaaaagccaactctgtagacaccttcagagtttagttttataataaaaactgtttgaataattagacctttacattcctgaagataaacatgtaatcttttatcttattttgctcaataaaattgttcagaagatcaaagtggtaaagacaatgtaaaatttaacattttaatactgatgttgtacactgttttacttaacattttgggaagtaactgcctctgacttcaactcaagaaaacacttttttgttgctaatgtaatcggtttttgtaatggcgtcagcaaataaaaggatgcttattattcaaacttg

SEQ ID NO: 146637 - DNA, 4793 bp, Homo sapiens
  Payload ID: 9009
  Gene Symbol: KTN1
  Gene Name: kinectin 1 (kinesin receptor)
  Uniprot ID: Q86UP2
  ENST ID: ENST00000459737
  CDS Start-End: 188-4261
cgtcttcccggtctcctttcccggccgcacagggtagattttcgttccgtcacccaggctggagtgcagtggtgtgaccttggcttgctgcaaccctttgcctcctgggttcaagtgattctcattgcctcagcctcctaagtagctgggattacaggttttataggatcacattgacaaaagtaccatggagttttatgagtcagcatattttattgttcttattccttcaatagttattacagtaattttcctcttcttctggcttttcatgaaagaaacattatatgatgaagttcttgcaaaacagaaaagagaacaaaagcttattcctaccaaaacagataaaaagaaagcagaaaagaaaaagaataaaaagaaagaaatccagaatggaaacctccatgaatccgactctgagagtgtacctcgagactttaaattatcagatgctttggcagtagaagatgatcaagttgcacctgttccattgaatgtcgttgaaacttcaagtagtgttagggaaagaaaaaagaaggaaaagaaacaaaagcctgtgcttgaagagcaggtcatcaaagaaagtgacgcatcaaagattcctggcaaaaaagtagaacctgtcccagttactaaacagcccacccctccctctgaagcagctgcctcgaagaagaaaccagggcagaagaagtctaaaaatggaagcgatgaccaggataaaaaggtggaaactctcatggtaccatcaaaaaggcaagaagcattgcccctccaccaagagactaaacaagaaagtggatcagggaagaagaaagcttcatcaaagaaacaaaagacagaaaatgtcttcgtagatgaaccccttattcatgcaactacttatattcctttgatggataatgctgactcaagtcctgtggtagataagagagaggttattgatttgcttaaacctgaccaagtagaagggatccagaaatctgggactaaaaaactgaagaccgaaactgacaaagaaaatgctgaagtgaagtttaaagattttcttctgtccttgaagactatgatgttttctgaagatgaggctctttgtgttgtagacttgctaaaggagaagtctggtgtaatacaagatgctttaaagaagtcaagtaagggagaattgactacgcttatacatcagcttcaagaaaaggacaagttactcgctgctgtgaaggaagatgctgctgctacaaaggatcggtgtaagcagttaacccaggaaatgatgacagagaaagaaagaagcaatgtggttataacaaggatgaaagatcgaattggaacattagaaaaggaacataatgtatttcaaaacaaaatacatgtcagttatcaagagactcaacagatgcagatgaagtttcagcaagttcgtgagcagatggaggcagagatagctcacttgaagcaggaaaatggtatactgagagatgcagtcagcaacactacaaatcaactggaaagcaagcagtctgcagaactaaataaactacgccaggattatgctaggttggtgaatgagctgactgagaaaacaggaaagctacagcaagaggaagtccaaaagaagaatgctgagcaagcagctactcagttgaaggttcaactacaagaagctgagagaaggtgggaagaagttcagagctacatcaggaagagaacagcggaacatgaggcagcacagcaagatttacagagtaaatttgtggccaaagaaaatgaagtacagagtctgcatagtaagcttacagataccttggtatcaaaacaacagttggagcaaagactaatgcagttaatggaatcagagcagaaaagggtgaacaaagaagagtctctacaaatgcaggttcaggatattttggagcagaatgaggctttgaaagctcaaattcagcagttccattcccagatagcagcccagacctccgcttcagttctagcagaagaattacataaagtgattgcagaaaaggataagcagataaaacagactgaagattctttagcaagtgaacgtgatcgtttaacaagtaaagaagaggaacttaaggatatacagaatatgaatttcttattaaaagctgaagtgcagaaattacaggccctggcaaatgagcaggctgctgctgcacatgaattggagaagatgcaacaaagtgtttatgttaaagatgataaaataagattgctggaagagcaactacaacatgaaatttcaaacaaaatggaagaatttaagattctaaatgaccaaaacaaagcattaaaatcagaagttcagaagctacagactcttgtttctgaacagcctaataaggatgttgtggaacaaatggaaaaatgcattcaagaaaaagatgagaagttaaagactgtggaagaattacttgaaactggacttattcaggtggcaactaaagaagaggagctgaatgcaataagaacagaaaattcatctctgacaaaagaagttcaagacttaaaagctaagcaaaatgatcaggtttcttttgcctctctagttgaagaacttaagaaagtgatccatgagaaagatggaaagatcaagtctgtagaagagcttctggaggcagaacttctcaaagttgctaacaaggagaaaactgttcaggatttgaaacaggaaataaaggctctaaaagaagaaataggaaatgtccagcttgaaaaggctcaacagttatctatcacttccaaagttcaggagcttcagaacttattaaaaggaaaagaggaacagatgaataccatgaaggctgttttggaagagaaagagaaagacctagccaatacagggaagtggttacaggatcttcaagaagaaaatgaatctttaaaagcacatgttcaggaagtagcacaacataacttgaaagaggcctcttctgcatcacagtttgaagaacttgagattgtgttgaaagaaaaggaaaatgaattgaagaggttagaagccatgctaaaagagagggagagtgatctttctagcaaaacacagctgttacaggatgtacaagatgaaaacaaattgtttaagtcccaaattgagcagcttaaacaacaaaactaccaacaggcatcttcttttccccctcatgaagaattattaaaagtaatttcagaaagagagaaagaaataagtggtctctggaatgagttagattctttgaaggatgcagttgaacaccagaggaagaaaaacaatgaccttcgggagaaaaactgggaagcaatggaagcattggcatcaactgaaaaaatgctgcaggacaaagtgaacaagacttccaaggaaaggcagcaacaggtggaagctgttgagttggaggctaaagaagttctcaaaaaattatttccaaaggtgtctgtcccttctaatttgagttatggtgaatggttgcatggatttgaaaaaaaggcaaaagaatgtatggctggaacttcagggtcagaggaggttaaggttctagagcacaagttgaaagaagctgatgaaatgcacacattgttacagctagagtgtgaaaaatacaaatccgtccttgcagaaacagaaggaattttacagaagctacagagaagtgttgagcaagaagaaaataaatggaaagttaaggtcgatgaatcacacaagactattaaacagatgcagtcatcatttacatcttcagaacaagagctagagcgattaagaagcgaaaataaggatattgaaaatctgagaagagaacgagaacatttggaaatggaactagaaaaggcagagatggaacgatctacctatgttacagaagtcagagagctgaaagatctgttgactgaattgcagaaaaaacttgatgattcatattctgaagcagtaagacagaatgaagagctaaatttgttgaaggcacagttaaatgaaacactcacaaaacttagaactgaacaaaatgaaagacagaaggtagctggtgatttgcataaggctcaacagtcactggagcttatccagtcaaaaatagtaaaagctgctggagacactactgttattgaaaatagtgatgtttccccagaaacggagtcttctgagaaggagacaatgtctgtaagtctaaatcagactgtaacacagttacagcagttgcttcaggcggtaaaccaacagctcacaaaggagaaagagcactaccaggtgttagagtgatcatcctctggcctaccttgacacatgctctccttcaaaatgctaattcagagtgaagtaattgggaaactgttcatttgaggataaaaaaggcattgtattatattttgccaaattaaagccttatttatgttttcaccctttctactttgtcagaaacactgaacagagttttgtcttttctaatccttgttagactactgatttaaagaaggaaaaaaaaaagccaactctgtagacaccttcagagtttagttttataataaaaactgtttgaataattagacctttacattcctgaagataaacatgtaatcttttatcttattttgctcaataaaattgttcagaagatcaaagtggtaaagacaatgtaaaatttaacattttaatactgatgttgtacactgttttacttaacattttgggaagtaactgcctctgacttcaactcaagaaaacacttttttgttgctaatgtaatcggtttttgtaatggcgtcagcaaataaaaggatgcttattattcaaa

SEQ ID NO: 146638 - DNA, 255 bp, Homo sapiens
  Payload ID: 9009
  Gene Symbol: KTN1
  Gene Name: kinectin 1 (kinesin receptor)
  ENST ID: ENST00000553710
  CDS Start-End: 1-49
gaaagagcactaccaggtgttaggagcgttttgtctcactttagagtgatcatcctctggcctaccttgacacatgctctccttcaaaatgctaattcagagtgaagtaattgggaaactgttcatttgaggataaaaaaggcattgtattatattttgccaaattaaagccttatttatgttttcaccctttctactttgtcagaaacactgaacagagttttgtcttttctaatccttgttagactactgatt

SEQ ID NO: 146639 - DNA, 291 bp, Homo sapiens
  Payload ID: 9009
  Gene Symbol: KTN1
  Gene Name: kinectin 1 (kinesin receptor)
  ENST ID: ENST00000557267
  CDS Start-End: 110-291
agggactctgcctctaaggatgatgtctgccttggcctgccatgcctggaattccaattcatctttactggttctaaaggttttataggatcacattgacaaaagtaccatggagttttatgagtcagcatattttattgttcttattccttcaatagttattacagtaattttcctcttcttctggcttttcatgaaagaaacattatatgatgaagttcttgcaaaacagaaaagagaacaaaagcttattcctaccaaaacagataaaaagaaagcagaaaagaaaaa

SEQ ID NO: 146640 - DNA, 1712 bp, Homo sapiens
  Payload ID: 9009
  Gene Symbol: KTN1
  Gene Name: kinectin 1 (kinesin receptor)
  ENST ID: ENST00000555573
  CDS Start-End: 235-1239
gatgagatttctctttagcacaagcctgagcataccatattaggcataaaaacttatattagaaatcatttctgaaattcataggatgggctttgtatggtcaacagtaggtagactctttaatgtacttttcaaggtgctatctcttgatatttttattttgtaatagcaaatgttgataggtagggatctaagttgtattactgtttacctaaaatcttgctacatgtattcatgttctggtttagaatttcagaaagagagaaagaaataagtggtctctggaatgagttagattctttgaaggatgcagttgaacaccagaggaagaaaaacaatgaccttcgggagaaaaactgggaagcaatggaagcattggcatcaactgaaaaaatgctgcaggacaaagtgaacaagacttccaaggaaaggcagcaacaggtggaagctgttgagttggaggctaaagaagttctcaaaaaattatttccaaaggtgtctgtcccttctaatttgagttatggtgaatggttgcatggatttgaaaaaaaggcaaaagaatgtatggctggaacttcagggtcagaggaggttaaggttctagagcacaagttgaaagaagctgatgaaatgcacacattgttacagctagagtgtgaaaaatacaaatccgtccttgcagaaacagaaggaattttacagaagctacagagaagtgttgagcaagaagaaaataaatggaaagttaaggtcgatgaatcacacaagactattaaacagatgcagtcatcatttacatcttcagaacaagagctagagcgattaagaagcgaaaataaggatattgaaaatctgagaagagaacgagaacatttggaaatggaactagaaaaggcagagatggaacgatctacctatgttacagaagtcagagagttgaaggcacagttaaatgaaacactcacaaaacttagaactgaacaaaatgaaagacagaaggtagctggtgatttgcataaggctcaacagtcactggagcttatccagtcaaaaatagtaaaagctgctggagacactactgttattgaaaatagtgatgtttccccagaaacggagtcttctgagaaggagacaatgtctgtaagtctaaatcagactgtaacacagttacagcagttgcttcaggcggtaaaccaacagctcacaaaggagaaagagcactaccaggtgttagagtgaagtaattgggaaactgttcatttgaggataaaaaaggcattgtattatattttgccaaattaaagccttatttatgttttcaccctttctactttgtcagaaacactgaacagagttttgtcttttctaatccttgttagactactgatttaaagaaggaaaaaaaaaagccaactctgtagacaccttcagagtttagttttataataaaaactgtttgaataattagacctttacattcctgaagataaacatgtaatcttttatcttattttgctcaataaaattgttcagaagatcaaagtggtaaagacaatgtaaaatttaacattttaatactgatgttgtacactgttttacttaacattttgggaagtaactgcctctgacttcaactcaagaaaacacttttttgttgctaatgtaatcggtttttgtaatggcgtcagcaaataaaaggatgcttattattc

SEQ ID NO: 146641 - DNA, 564 bp, Homo sapiens
  Payload ID: 9009
  Gene Symbol: KTN1
  Gene Name: kinectin 1 (kinesin receptor)
  ENST ID: ENST00000554294
  CDS Start-End: 1-416
tgagaagagaacgagaacatttggaaatggaactagaaaaggcagagatggaacgatctacctatgttacagaagtcagagagttgaaggcacagttaaatgaaacactcacaaaacttagaactgaacaaaatgaaagacagaaggtagctggtgatttgcataaggctcaacagtcactggagcttatccagtcaaaaatagtaaaagctgctggagacactactgttattgaaaatagtgatgtttccccagaaacggagtcttctgagaaggagacaatgtctgtaagtctaaatcagactgtaacacagttacagcagttgcttcaggcggtaaaccaacagctcacaaaggagaaagagcactaccaggtgttagacacgatggttggtgatgcagcagccatcttgtgaccaagaagaaaggccaaaagaattgcaggagaattggccctaaaatcaatgaaactctcacccacccctttaacctcttgtctccagacttctgggtatgtaaaaacacaacacaacaaaacaaacaaacagaacaacaacaacaaca

SEQ ID NO: 146642 - DNA, 595 bp, Homo sapiens
  Payload ID: 9009
  Gene Symbol: KTN1
  Gene Name: kinectin 1 (kinesin receptor)
  ENST ID: ENST00000555498
  CDS Start-End: 371-595
gcggcggcggcggcggcggcggcggcgcctcggagcgggcggcccgggctgtagtgccggcgccgccgcgtcttcccggtctcctttcccggccgcacagggtagattttcgttccgtcacccaggctggagtgcagtggtgtgaccttggcttgctgcaaccctttgcctcctgggttcaagtgattctcattgcctcagcctcctaagtagctgggattacagttcttttaagatagggcaggaatgaaaactctcaatatagagcaggattttaaacctggggcccgtgcatattcttcagggaatccagaaacctggagattatatgtaaaacttagttttataggatcacattgacaaaagtaccatggagttttatgagtcagcatattttattgttcttattccttcaatagttattacagtaattttcctcttcttctggcttttcatgaaagaaacattatatgatgaagttcttgcaaaacagaaaagagaacaaaagcttattcctaccaaaacagataaaaagaaagcagaaaagaaaaagaataaaaagaaagaaatccagaatggaaacctccatgaatcc

SEQ ID NO: 146643 - DNA, 2057 bp, Homo sapiens
  Payload ID: 9009
  Gene Symbol: KTN1
  Gene Name: kinectin 1 (kinesin receptor)
  ENST ID: ENST00000554507
  CDS Start-End: 113-1900
aagtgacagttgagagattgaacagtttagttatgtaaaaatttcagtccttttaccccatggatttttattctggaggaaaagattgagcgtataaaagcagaaaccaataatggtgccaagttgttgtttcttcaggtgtaggaagcagaaagacaacaggtaccaacctaataaggatgttgtggaacaaatggaaaaatgcattcaagaaaaagatgagaagttaaagactgtggaagaattacttgaaactggacttattcaggtggcaactaaagaagaggagctgaatgcaataagaacagaaaattcatctctgacaaaagaagttcaagacttaaaagctaagcaaaatgatcaggtttcttttgcctctctagttgaagaacttaagaaagtgatccatgagaaagatggaaagatcaagtctgtagaagagcttctggaggcagaacttctcaaagttgctaacaaggagaaaactgttcaggatttgaaacaggaaataaaggctctaaaagaagaaataggaaatgtccagcttgaaaaggctcaacagttatctatcacttccaaagttcaggagcttcagaacttattaaaaggaaaagaggaacagatgaataccatgaaggctgttttggaagagaaagagaaagacctagccaatacagggaagtggttacaggatcttcaagaagaaaatgaatctttaaaagcacatgttcaggaagtagcacaacataacttgaaagaggcctcttctgcatcacagtttgaagaacttgagattgtgttgaaagaaaaggaaaatgaattgaagaggttagaagccatgctaaaagagagggagagtgatctttctagcaaaacacagctgttacaggatgtacaagatgaaaacaaattgtttaagtcccaaattgagcagcttaaacaacaaaactaccaacaggcatcttcttttccccctcatgaagaattattaaaagtaatttcagaaagagagaaagaaataagtggtctctggaatgagttagattctttgaaggatgcagttgaacaccagaggaagaaaaacaatgaaaggcagcaacaggtggaagctgttgagttggaggctaaagaagttctcaaaaaattatttccaaaggtgtctgtcccttctaatttgagttatggtgaatggttgcatggatttgaaaaaaaggcaaaagaatgtatggctggaacttcagggtcagaggaggttaaggttctagagcacaagttgaaagaagctgatgaaatgcacacattgttacagctagagtgtgaaaaatacaaatccgtccttgcagaaacagaaggaattttacagaagctacagagaagtgttgagcaagaagaaaataaatggaaagttaaggtcgatgaatcacacaagactattaaacagatgcagtcatcatttacatcttcagaacaagagctagagcgattaagaagcgaaaataaggatattgaaaatctgagaagagaacgagaacatttggaaatggaactagaaaaggcagagatggaacgatctacctatgttacagaagtcagagagttgaaggcacagttaaatgaaacactcacaaaacttagaactgaacaaaatgaaagacagaaggtagctggtgatttgcataaggctcaacagtcactggagcttatccagtcaaaaatagtaaaagctgctggagacactactgttattgaaaatagtgatgtttccccagaaacggagtcttctgagaaggagacaatgtctgtaagtctaaatcagactgtaacacagttacagcagttgcttcaggcggtaaaccaacagctcacaaaggagaaagagcactaccaggtgttagagtgaagtaattgggaaactgttcatttgaggataaaaaaggcattgtattatattttgccaaattaaagccttatttatgttttcaccctttctactttgtcagaaacactgaacagagttttgtcttttctaatccttgttagactactgatttaaagaa

SEQ ID NO: 146644 - DNA, 521 bp, Homo sapiens
  Payload ID: 9009
  Gene Symbol: KTN1
  Gene Name: kinectin 1 (kinesin receptor)
  ENST ID: ENST00000554570
  CDS Start-End: 1-274
tgatctttctagcaaaacacagctgttacaggatgtacaagatgaaaacaaattgtttaagtcccaaattgagcagcttaaacaacaaaactaccaacaggcatcttcttttccccctcatgaagaattattaaaagtaatttcagaaagagagaaagaaataagtggtctctggaatgagttagattctttgaaggatgcagttgaacaccagaggaagaaaaacaatgagggcatggtaatgcagcagcagcagcagcgctggagacattgaacccgtgtgaaaagagccaggacactggaggccagcagatagcagtgtcagtctttccttctagttttgccacttcgttttctgtgtatacttggctcagtttcctaacttacttgagctgtggtttccctatctatagaatgggaataaatacctcatggggttgttgtaacggtgagaatttgtgaactgccaagtacagtggttggcatatattaagtaataaatggtgattattggcttttta

SEQ ID NO: 146645 - DNA, 588 bp, Homo sapiens
  Payload ID: 9009
  Gene Symbol: KTN1
  Gene Name: kinectin 1 (kinesin receptor)
  ENST ID: ENST00000554890
  CDS Start-End: 102-588
gagagattgaacagtttagttatgtaaaaatttcagtccttttaccccatggatttttattctggaggaaaagattgagcgtataaaagcagaaaccaataatggtgccaagttgttgtttcttcaggtgtaggaagcagaaagacaacaggtaccaacctaataaggatgttgtggaacaaatggaaaaatgcattcaagaaaaagatgagaagttaaagactgtggaagaattacttgaaactggacttattcaggcaataagaacagaaaattcatctctgacaaaagaagttcaagacttaaaagctaagcaaaatgatcaggtttcttttgcctctctagttgaagaacttaagaaagtgatccatgagaaagatggaaagatcaagtctgtagaagagcttctggaggcagaacttctcaaagttgctaacaaggagaaaactgttcaggatttgaaacaggaaataaaggctctaaaagaagaaataggaaatgtccagcttgaaaaggctcaacagttatctatcacttccaaagttcaggagcttcagaacttattaaaaggaaaagaggaacagatga

SEQ ID NO: 146646 - DNA, 731 bp, Homo sapiens
  Payload ID: 9009
  Gene Symbol: KTN1
  Gene Name: kinectin 1 (kinesin receptor)
  ENST ID: ENST00000553624
  CDS Start-End: 250-731
tatcttcataatatgtttcttaggggatgagatttctctttagcacaagcctgagcataccatattaggcataaaaacttatattagaaatcatttctgaaattcataggatgggctttgtatggtcaacaaatttcagaaagagagaaagaaataagtggtctctggaatgagttagattctttgaaggatgcagttgaacaccagaggaagaaaaacaatgaccttcgggagaaaaactgggaagcaatggaagcattggcatcaactgaaaaaatgctgcaggacaaagtgaacaagacttccaaggaaaggcagcaacaggtggaagctgttgagttggaggctaaagaagttctcaaaaaattatttccaaaggtgtctgtcccttctaatttgagttatggtgaatggttgcatggatttgaaaaaaaggcaaaagaatgtatggctggaacttcagggtcagaggaggttaaggttctagagcacaagttgaaagaagctgatgaaatgcacacattgttacagctagagtgtgaaaaatacaaatccgtccttgcagaaacagaaggaattttacagaagctacagagaagtgttgagcaagaagaaaataaatggaaagttaaggtcgatgaatcacacaagactattaaacagatgcagtcatcatttacatcttcagaacaagagctagagcgattaagaagcgaaaataaggatattga

SEQ ID NO: 146647 - DNA, 730 bp, Homo sapiens
  Payload ID: 9009
  Gene Symbol: KTN1
  Gene Name: kinectin 1 (kinesin receptor)
  ENST ID: ENST00000554567
  CDS Start-End: 688-730
gccgcccgtttcctgccgagcggcgcgacggcacctgagcgactgcggcggcggcggcggcggcggcggcgcctcggagcgggcggcccgggctgtagtgccggcgccgccgcgtcttcccggtctcctttcccggccgcacaggtcaagtaagggagaattgactacgcttatacatcagcttcaagaaaaggacaagttactcgctgctgtgaaggaagatgctgctgctacaaaggatcggtgtaagcagttaacccagtttcagcaagttcgtgagcagatggaggcagagatagctcacttgaagcaggaaaatggtatactgagagatgcagtcagcaacactacaaatcaactggaaagcaatctgcagaactaaataaactacgccaggattatgctaggttggtgaatgagctgactgagaaaacaggaaagctacagcaagaggaagtccaaaagaagaatgctgagcaagcagctactcagttgaaggttcaactacaagaagctgagagaaggtgggaagaagttcagagctacatcaggaagagaacagcggaacatgaggcagcacagcaagatttacagagtaaatttgtggccaaagaaaatgaagtacagagtctgcatagtaagcttacagataccttggtatcaaaacaacagttggagcaaagactaatgcagttaatggaatcagagcagaaaagggtgaacaaagaag

SEQ ID NO: 146648 - DNA, 993 bp, Homo sapiens
  Payload ID: 9009
  Gene Symbol: KTN1
  Gene Name: kinectin 1 (kinesin receptor)
  ENST ID: ENST00000553360
  CDS Start-End: 1-462
gtttctgaacagcctaataaggatgttgtggaacaaatggaaaaatgcattcaagaaaaagatgagaagttaaagactgtggaagaattacttgaaactggacttattcaggtggcaactaaagaagaggagctgaatgcaataagaacagaaaattcatctctgacaaaagaagttcaagacttaaaagctaagcaaaatgatcaggtttcttttgcctctctagttgaagaacttaagaaagtgatccatgagaaagatggaaagatcaagtctgtagaagagcttctggaggcagaacttctcaaagttgctaacaaggagaaaactgttcaggatttgaaacaggaaataaaggctctaaaagaagaaataggaaatgtccagcttgaaaaggctcaacagattgagagttcaggaaagtcttctcctgaggaactgacatctaagccaagaatctgaagggcctgtgagaagagagtggaggataaaagttatctatcacttccaaagttcaggagcttcagaacttattaaaaggaaaagaggaacagatgaataccatgaaggctgttttggaagagaaagagaaagacctagccaatacagggaagtggttacaggatcttcaagaagaaaatgaatctttaaaagcacatgttcaggaagtagcacaacataacttgaaagaggcctcttctgcatcacagtttgaagaacttgagattgtgttgaaagaaaaggaaaatgaattgaagaggttagaagccatgctaaaagagagggagagtgatctttctagcaaaacacagctgttacaggatgtacaagatgaaaacaaattgtttaagtcccaaattgagcagcttaaacaacaaaactaccaacaggcatcttcttttccccctcatgaagaattattaaaagtaatttcagaaagagagaaagaaataagtggtctctggaatgagttagattctttgaaggatgcag

SEQ ID NO: 146649 - DNA, 4860 bp, Homo sapiens
  Payload ID: 9010
  Gene Symbol: KIF11
  Gene Name: kinesin family member 11
  Uniprot ID: P52732
  ENST ID: ENST00000260731
  CDS Start-End: 91-3261
agactccggcccctgtcggccgccaagcccctccgcccctcacagcgcccaggtccgcggccgggccttgattttttggcggggaccgtcatggcgtcgcagccaaattcgtctgcgaagaagaaagaggagaaggggaagaacatccaggtggtggtgagatgcagaccatttaatttggcagagcggaaagctagcgcccattcaatagtagaatgtgatcctgtacgaaaagaagttagtgtacgaactggaggattggctgacaagagctcaaggaaaacatacacttttgatatggtgtttggagcatctactaaacagattgatgtttaccgaagtgttgtttgtccaattctggatgaagttattatgggctataattgcactatctttgcgtatggccaaactggcactggaaaaacttttacaatggaaggtgaaaggtcacctaatgaagagtatacctgggaagaggatcccttggctggtataattccacgtacccttcatcaaatttttgagaaacttactgataatggtactgaattttcagtcaaagtgtctctgttggagatctataatgaagagctttttgatcttcttaatccatcatctgatgtttctgagagactacagatgtttgatgatccccgtaacaagagaggagtgataattaaaggtttagaagaaattacagtacacaacaaggatgaagtctatcaaattttagaaaagggggcagcaaaaaggacaactgcagctactctgatgaatgcatactctagtcgttcccactcagttttctctgttacaatacatatgaaagaaactacgattgatggagaagagcttgttaaaatcggaaagttgaacttggttgatcttgcaggaagtgaaaacattggccgttctggagctgttgataagagagctcgggaagctggaaatataaatcaatccctgttgactttgggaagggtcattactgcccttgtagaaagaacacctcatgttccttatcgagaatctaaactaactagaatcctccaggattctcttggagggcgtacaagaacatctataattgcaacaatttctcctgcatctctcaatcttgaggaaactctgagtacattggaatatgctcatagagcaaagaacatattgaataagcctgaagtgaatcagaaactcaccaaaaaagctcttattaaggagtatacggaggagatagaacgtttaaaacgagatcttgctgcagcccgtgagaaaaatggagtgtatatttctgaagaaaattttagagtcatgagtggaaaattaactgttcaagaagagcagattgtagaattgattgaaaaaattggtgctgttgaggaggagctgaatagggttacagagttgtttatggataataaaaatgaacttgaccagtgtaaatctgacctgcaaaataaaacacaagaacttgaaaccactcaaaaacatttgcaagaaactaaattacaacttgttaaagaagaatatatcacatcagctttggaaagtactgaggagaaacttcatgatgctgccagcaagctgcttaacacagttgaagaaactacaaaagatgtatctggtctccattccaaactggatcgtaagaaggcagttgaccaacacaatgcagaagctcaggatatttttggcaaaaacctgaatagtctgtttaataatatggaagaattaattaaggatggcagctcaaagcaaaaggccatgctagaagtacataagaccttatttggtaatctgctgtcttccagtgtctctgcattagataccattactacagtagcacttggatctctcacatctattccagaaaatgtgtctactcatgtttctcagatttttaatatgatactaaaagaacaatcattagcagcagaaagtaaaactgtactacaggaattgattaatgtactcaagactgatcttctaagttcactggaaatgattttatccccaactgtggtgtctatactgaaaatcaatagtcaactaaagcatattttcaagacttcattgacagtggccgataagatagaagatcaaaaaaaggaactagatggctttctcagtatactgtgtaacaatctacatgaactacaagaaaataccatttgttccttggttgagtcacaaaagcaatgtggaaacctaactgaagacctgaagacaataaagcagacccattcccaggaactttgcaagttaatgaatctttggacagagagattctgtgctttggaggaaaagtgtgaaaatatacagaaaccacttagtagtgtccaggaaaatatacagcagaaatctaaggatatagtcaacaaaatgacttttcacagtcaaaaattttgtgctgattctgatggcttctcacaggaactcagaaattttaaccaagaaggtacaaaattggttgaagaatctgtgaaacactctgataaactcaatggcaacctggaaaaaatatctcaagagactgaacagagatgtgaatctctgaacacaagaacagtttatttttctgaacagtgggtatcttccttaaatgaaagggaacaggaacttcacaacttattggaggttgtaagccaatgttgtgaggcttcaagttcagacatcactgagaaatcagatggacgtaaggcagctcatgagaaacagcataacatttttcttgatcagatgactattgatgaagataaattgatagcacaaaatctagaacttaatgaaaccataaaaattggtttgactaagcttaattgctttctggaacaggatctgaaactggatatcccaacaggtacgacaccacagaggaaaagttatttatacccatcaacactggtaagaactgaaccacgtgaacatctccttgatcagctgaaaaggaaacagcctgagctgttaatgatgctaaactgttcagaaaacaacaaagaagagacaattccggatgtggatgtagaagaggcagttctggggcagtatactgaagaacctctaagtcaagagccatctgtagatgctggtgtggattgttcatcaattggcggggttccatttttccagcataaaaaatcacatggaaaagacaaagaaaacagaggcattaacacactggagaggtctaaagtggaagaaactacagagcacttggttacaaagagcagattacctctgcgagcccagatcaacctttaattcacttgggggttggcaattttatttttaaagaaaacttaaaaataaaacctgaaaccccagaacttgagccttgtgtatagattttaaaagaatatatatatcagccgggcgcggtggctcatgcctgtaatcccagcactttgggaggctgaggcgggtggattgcttgagcccaggagtttgagaccagcctggccaacgtggcaaaacctcgtctctgttaaaaattagccgggcgtggtggcacactcctgtaatcccagctactggggaggctgaggcacgagaatcacttgaacccaggaagcggggttgcagtgagccaaaggtacaccactacactccagcctgggcaacagagcaagactcggtctcaaaaacaaaatttaaaaaagatataaggcagtactgtaaattcagttgaattttgatatctacccatttttctgtcatccctatagttcactttgtattaaattgggtttcatttgggatttgcaatgtaaatacgtatttctagttttcatataaagtagttcttttataacaaatgaaaagtatttttcttgtatattattaagtaatgaatatataagaactgtactcttctcagcttgagcttacataggtaaatatcaccaacatctgtccttagaaaggaccatctcatgttttttttcttgctatgacttgtgtattttcttgcatcctccctagacttccctatttcgctttctcctcggctcactttctccctttttatttttcaccaaaccatttgtagagctacaaaaggtatcctttcttattttcagtagtcagaattttatctagaaatcttttaacacctttttagtggttatttctaaaatcactgtcaacaataaatctaaccctagttgtatccctcctttcagtatttttcacttgttgccccaaatgtgaaagcatttcattcctttaagaggcctaactcattcaccctgacagagttcacaaaaagcccacttaagagtatacattgctattatgggagaccacccagacatctgactaatggctctgtgcccacactccaagacctgtgccttttagagaagctcacaatgatttaaggactgtttgaaacttccaattatgtctataatttatattcttttgtttacatgatgaaactttttgttgttgcttgtttgtatataatacaatgtgtacatgtatctttttctcgattcaaatcttaacccttaggactctggtatttttgatctggcaaccatatttctggaagttgagatgtttcagcttgaagaaccaaaacagaaggaatatgtacaaagaataaattttctgctcacgatgagtttagtgtgtaaagtttagagacatctgactttgatagctaaattaaaccaaaccctattgaagaattgaatatatgctacttcaagaaactaaattgatctcgtagaattatcttaataaaataatggctataatttctctgcaaaatcagatgtcagcataagcgatggataatacctaataaactgccctcagtaaatccatggttaataaatgtggtttctacattaa

SEQ ID NO: 146650 - DNA, 2003 bp, Homo sapiens
  Payload ID: 9011
  Gene Symbol: KIF12
  Gene Name: kinesin family member 12
  ENST ID: ENST00000374118
  CDS Start-End: 239-1780
ggaagacatcaggatgtaccatctgcccttctgtcggaccccagggtacgtcccatgagcgcggccgagctgcgtcgagggcagcagagcgtgctgcactgctcagggacccggactctgcagtttctcctgcactgttttcacctttggccagacgggctctgggaagacctacaccctgactggaccccctccccagggggagggggtgcctgtaccccccagcctggctggcatcatgcagaggaccttcgcctggctgttggaccgcgtgcagcacctgggtgcccctgtcacccttcgcgcctcttatctggagatctacaatgagcaggttcgggacttgctgagcctggggtctccccggcccctccctgttcgctggaacaagactcggggcttctatgtggagcagctgcgggtggtggaatttgggagtctggaggccctgatggaacttttgcaaacgggtctcagccgtcgaaggaactcagcccacaccctgaaccaggcctccagccgaagccatgccctgctcaccctttacatcagccgtcaaactgcccagcagatgccttctgtggaccctggggagccccctgttggtgggaagctgtgctttgtggacctggcaggcagtgagaaggtagcagccacgggatcccgtggggagctgatgcttgaggctaacagcatcaaccgaagcctgctggccctgggtcactgcatctccctgctgctggacccacagcggaagcagagccacatccctttccgggacagcaagctcaccaagttgctggcagactcactgggagggcgcggggtcaccctcatggtggcctgcgtgtccccctcagcccagtgccttcctgagactctcagcaccctgcgatatgcaagccgagctcagcgggtcaccacccgaccacaggcccccaagtctcctgtggcaaagcagccccagcgtttggagacagagatgctgcagctccaggaggagaaccgtcgcctgcagttccagctggaccaaatggactgcaaggcctcagggctcagtggagcccgggtggcctgggcccagcggaacctgtacgggatgctacaggagttcatgctagagaatgagaggctcaggaaagaaaagagccagctgcagaatagccgagacctggcccagaatgagcagcgcatcctggcccagcaggtccatgcactagagaggcgtctcctctctgcctgctaccatcaccagcagggtcctggcctgaccccaccgtgtccctgcttgatggccccagctcccccttgccatgcactgccacccctctactcctgcccctgctgccacatctgcccactgtgtcgagtgcccctggcccactgggcctgcctgccaggggagcaccacctgccccaggtgttggaccctgaggcctcaggtggcaggcccccatctgcccggcccccaccctgggcacccccatgcagccctggctctgccaagtgcccaagagagaggagtcacagtgactggactcagacccgagtcctggcagagatgttgacggaggaggaggtggtaccttctgcacctcccctgcctgtgaggcccccgaagacatcaccagggctcagaggtggggccggggttccaaacctggcccagagactggaggccctcagagaccagattggcagctccctgcgacgtggccgcagccagccaccctgcagtgagggcgcacggagcccaggccaagtcctccctccccattgaaggccaagtgggaacccaggagactgctgtgtgacctcagactgggctccacactcttgggcttcagtctgcccatctgctgaatggagacagcagctgctactccacctgcagctgggctaggggcggggactgggggtgctatttaggggaacaaggggattcaggagaaaccaggcagcaggggatgaaatacatgaataaagagaggcatcagctccaa

SEQ ID NO: 146651 - DNA, 2564 bp, Homo sapiens
  Payload ID: 9011
  Gene Symbol: KIF12
  Gene Name: kinesin family member 12
  ENST ID: ENST00000468460
  CDS Start-End: 859-1860
cgaggagtcctgaacagccgctaggtgcaggtatgataagtcgcattgctgcccacagggatctcgcgcggagcctggagcaagggccagaggggccggaaacgcccatccaggtggtgctcagggtacgtcccatgagcgcggccgagctgcgtcgagggcagcagagcgtgctgcactgctcagggacccggactctgcaggtgagtcctccaggcgggggtccagaagtggcgttccgcttcggtgcggtgctagacgcggcgcgcacgcaggaggacgtgttccgggcgtgcggcgtgcggcgcctgggggagctggcgctgcgcgggtgagtgaagcttcgcctccgctccgcgccgggcctggcggggccccgaagcacccccagcccccaccccgggtagccgccggagtccagccacgcccttgccgcccgcagtttctcctgcactgttttcacctttggccagacgggctctgggaagacctacaccctgactggaccccctccccagggggagggggtgcctgtaccccccagcctggctggcatcatgcagaggaccttcgcctggctgttggaccgcgtgcagcacctgggtgcccctgtcacccttcgcgcctcttatctggagatctacaatgagcaggtaagggaatgagaggaatagaaagacagcccatgaggaaacggagcgcttctttccagggagcctggatcaaaggacagaagaggcggttcgggacttgctgagcctggggtctccccggcccctccctgttcgctggaacaagactcggggcttctatgtggagcagctgcgggtggtggaatttgggagtctggaggccctgatggaacttttgcaaacgggtctcagccgtcgaaggaactcagcccacaccctgaaccaggcctccagccgaagccatgccctgctcaccctttacatcagccgtcaaactgcccagcagatgccttctgtggaccctggggagccccctgttggtgggaagctgtgctttgtggacctggcaggcagtgagaaggtagcagccacgggatcccgtggggagctgatgcttgaggctaacagcatcaaccgaagcctgctggccctgggtcactgcatctccctgctgctggacccacagcggaagcagagccacatccctttccgggacagcaagctcaccaagttgctggcagactcactgggagggcgcggggtcaccctcatggtggcctgcgtgtccccctcagcccagtgccttcctgagactctcagcaccctgcgatatgcaagccgagctcagcgggtcaccacccgaccacaggcccccaagtctcctgtggcaaagcagccccagcgtttggagacagagatgctgcagctccaggaggagaaccgtcgcctgcagttccagctggaccaaatggactgcaaggcctcagggctcagtggagcccgggtggcctgggcccagcggaacctgtacgggatgctacaggagttcatgctagagaatgagaggctcaggaaagaaaagagccagctgcagaatagccgagacctggcccagaatgagcagcgcatcctggcccagcaggtccatgcactagagaggcgtctcctctctgcctgctaccatcaccagcagggtcctggcctgaccccaccgtgtccctgcttgatggccccagctcccccttgccatgcactgccacccctctactcctgcccctgctgccacatctgcccactgtgtcgagtgcccctggcccactgggcctgcctgccaggggagcaccacctgccccagcctctcttctgggctctgaggagtcagaaatagaccagacgtggttcctgctctcaggaggcttctagtctcaggagaggacggtagaagaaccatctgctgcacacagaaggcgaccaagaccccacccctttatgccatcctgacattcttggtgttggaccctgaggcctcaggtggcaggcccccatctgcccggcccccaccctgggcacccccatgcagccctggctctgccaagtgcccaagagagaggagtcacagtgactggactcagacccgagtcctggcagagatgttgacggaggaggaggtggtaccttctgcacctcccctgcctgtgaggcccccgaagacatcaccagggctcagaggtggggccggggttccaaacctggcccagagactggaggccctcagagaccagattggcagctccctgcgacgtggccgcagccagccaccctgcagtgagggcgcacggagcccaggccaagtcctccctccccattgaaggccaagtgggaacccaggagactgctgtgtgacctcagactgggctccacactcttgggcttcagtctgcccatctgctgaatggagacagcagctgctactccacctgcagctgggctaggggcggggactgggggtgctatttaggggaacaaggggattcaggagaaaccaggcagcaggggatgaaatacatgaataaagagaggcatcagctccaa

SEQ ID NO: 146652 - DNA, 5941 bp, Homo sapiens
  Payload ID: 9012
  Gene Symbol: KIF13A
  Gene Name: kinesin family member 13A
  Uniprot ID: Q9H1H9
  ENST ID: ENST00000259711
  CDS Start-End: 107-5524
gcggccgcgctcgaggggcgcgcggctgcagcggcggcggcgccgcgcgtgaggggccgcctaaggccgagcgggcgcggcgagcggccgggcgagcgcagccaacatgtcggataccaaggtaaaagttgccgtccgggtccggcccatgaaccgacgagaactggaactgaacaccaagtgcgtggtggagatggaagggaatcaaacggtcctgcaccctcctccttctaacaccaaacagggagaaaggaaacctcccaaggtatttgcctttgattattgcttttggtccatggatgaatctaacactacaaaatacgctggtcaagaagtggttttcaagtgccttggggaaggaattcttgaaaaagcctttcaggggtataatgcgtgtatttttgcatatggacagacaggttcgggaaaatccttttccatgatgggccatgctgagcagctgggccttattccaaggctctgctgtgctttatttaaaaggatctctttggagcaaaatgagtcacagacctttaaagttgaagtgtcctatatggaaatttataatgagaaagttcgggatcttttagaccccaaagggagtagacagtctcttaaagttcgagaacataaagttttgggaccatatgtagatggtttatctcaactagctgtcactagttttgaggatattgagtcattgatgtctgagggaaataagtctcgaacggtagctgctaccaacatgaacgaagaaagcagccgctcccatgctgtgttcaacatcataatcacacagacactttatgacctgcagtctgggaattccggggagaaagtcagtaaggtcagcttggtagacctggcgggtagcgaaagagtatctaaaacaggagctgcaggagagcgactgaaagaaggcagcaacattaacaaatcgcttacaaccttggggttggttatatcatcactggctgaccaggcagctggcaagggtaaaagcaaatttgtgccttatcgagattcagtcctcacttggctgcttaaggacaacttggggggcaacagccaaacctctatgatagccacaatcagcccagccgcagacaactatgaagagaccctctccacattaagatatgcagaccgagccaaaaggattgtgaaccatgctgttgtgaatgaggaccccaacgcaaaagtgatccgagaactgcgggaggaagtcgagaaactgagagagcagctctctcaggcagaggccatgaaggcccctgaactgaaggagaagctcgaagagtctgaaaagctgataaaagaactaacagtgacttgggaagagaagctgagaaaaacagaagagatagcacaggaaagacaacgacaacttgaaagcatggggatttccctggagatgtccggtatcaaggtgggggatgacaaatgctacttagtcaatctgaatgcagaccctgctcttaacgaacttctggtttattatttaaaggatcacaccagggtgggtgcagatacctctcaagatatccagctttttggcataggaattcagcctcagcactgtgagattgacattgcatctgatggagacgtcactctcactccaaaagaaaatgcaaggtcctgtgtgaacggcacccttgtgtgcagtaccacccagctgtggcatggtgaccgaatcctatggggaaataatcacttttttagaataaacttacctaagaggaaacgtcgagattggttgaaagactttgaaaaagaaacgggcccgccagagcatgacctggatgcagccagtgaggcttcctctgaaccagactataactatgaatttgcacagatggaagttatcatgaaaaccctgaatagtaatgacccagttcaaaatgtggttcaggtcctggagaaacaatacctagaagaaaagagaagtgccctagaggagcagcggctcatgtatgagcgggaactggagcaactccgccagcagctctcccccgacaggcagccacagagtagcggccctgaccgcctggcctacagcagccagacagcgcagcagaaggtgacccagtgggcagaagagagggatgaactcttccgacaaagcctggcaaaactgcgagagcagctggttaaagctaataccttggtgagggaagcaaacttcctggctgaggaaatgagcaaactcaccgattaccaagtgactcttcagatccctgctgcaaacctcagtgccaataggaagagaggtgcaatagtgagtgaaccagctatccaagtgaggaggaaaggaaagagcacccaagtgtggaccattgagaagctggagaataaattaattgacatgagagacctttaccaagaatggaaggaaaaagttcctgaggcaaagagactctacggaaaacgaggtgaccctttctatgaagcccaagaaaatcacaacctcatcggggtggcgaatgtattcttggaatgcctcttctgtgatgtgaaacttcagtatgcagtccctatcatcagccagcagggggaggttgcagggcgtctccacgtggaagtgatgcgtgttacaggagctgttccagagcgtgtggtggaggatgactcttcggagaattccagtgaaagtgggagccttgaagtcgtagacagcagcggggaaatcattcaccgagtcaaaaagctgacatgtcgggtaaaaattaaagaagcaacggggctgcccttaaacctctcaaattttgtcttctgtcaatacacattctgggaccagtgtgagtctacggtggctgccccggtggtggaccccgaggtgccttcaccacagtccaaggatgcccagtacacagtgaccttctcccactgtaaggactatgtggtgaatgtaacagaagaatttctggagttcatttcagatggagcactggccattgaagtatggggccaccggtgtgctggaaatggcagctccatctgggaggtcgattctcttcatgctaagacaagaacactgcatgacaggtggaatgaagtaacgcgaagaatagaaatgtggatctccatattagaattgaatgagttaggagagtatgctgcagtggaacttcatcaggcaaaagatgtcaacacaggaggcatctttcaacttagacagggtcattcccgtagagtacaagtcacggtgaaacctgtgcagcattcagggacactgccacttatggttgaagccatcctgtcagtatccatcggctgtgtaactgccaggtccaccaaactccaaagagggctggacagttaccagagagatgatgaggatggtgatgatatggatagttatcaggaagaagacttaaactgcgtaagggagaggtggtcagatgcactcattaaacgacgagaatacctggatgaacagataaaaaaagtcagcaataaaacagagaaaacagaggacgatgtggagcgggaagcccagcttgtggagcagtgggtagggctgactgaggaaaggaatgctgtgctggtgccagccccaggcagtgggattcctggggcacctgccgactggatcccacctcctggaatggaaacccacataccagttctcttcctcgatttgaatgcggatgacctcagtgccaatgagcagcttgttggcccccatgcatccggcgtgaactccatcctgcccaaggagcatggcagccagtttttctacctgcccatcataaagcacagtgatgatgaggtttcagccacagcctcttgggattcctcggtgcatgattctgttcacttgaatagggtcacaccacagaatgaaaggatttacctaattgtgaaaaccacagttcaactcagccaccctgctgctatggagttagtattacgaaaacgaattgcagccaatatttacaacaaacagagtttcacgcagagtttgaagaggagaatatccctgaaaaatatattttattcctgtggtgtaacctatgaaatagtatccaatataccaaaggcaactgaggagatagaggaccgggaaacgctggctctcctggcagcaaggagtgaaaacgaaggcacatcagatggggagacgtacattgagaagtacactcgaggcgtgctgcaggtggaaaacattctgagtcttgaacggctccggcaggccgtcacagtcaaagaagcactttccaccaaagcccggcacattcggaggagcctcagtacaccaaatgttcataatgtctcttccagccgaccggacctttctggctttgatgaagatgacaagggttggccagagaaccagttggacatgtctgactatagctccagttaccaagatgtagcatgttatggaactttacccagggattctcctcgaaggaataaagaaggttgtacatcagagactcctcatgccttaaccgtcagcccttttaaagcattctctcctcagccaccaaagtttttcaagcccctaatgcctgtaaaagaggagcataagaaaaggatagccctggaagcaaggcctcttctaagccaggagagcatgcctccacctcaggcacataaccctggctgcattgtaccctcaggaagcaatggcagcagcatgccagtagaacacaatagcaaacgtgagaagaagattgactctgaggaggaagaaaatgagctggaagctattaacaggaagctaataagttcacagccttatgtacctgtggagtttgctgacttcagtgtttacaatgccagcttggagaacagggaatggttttcctctaaagtagatctgtcaaactcacgggtcttggagaaagaagtgtcccgtagccctaccaccagcagtattaccagtggctacttttcccacagtgcctccaatgccaccctgtctgacatggtggtcccttctagtgacagctcagaccagctggccattcagacgaaggatgcagactccaccgagcactccacaccatcgcttgtgcatgatttcaggccgtcctcaaacaaagagttgacagaagtcgaaaaaggcttggtaaaggacaagataattgtggtgccactcaaggaaaacagtgccttagccaaagggagcccatcatcccagagcatccctgagaaaaactccaaatcactgtgcaggactggctcatgttcagaactagatgcctgccccagcaaaattagccagccagccaggggattctgccccagggaggtgacggtagaacacaccaccaacatccttgaagaccattctttcacagaatttatgggagtgtcagagggaaaagattttgatggtttgacagattcttctgctggagagctttccagtaggaggagtctaccaaataaaacaggcggcaagactgtctccgatgggctccaccaccccagccagctgcattccaagttagagaatgaccaggtaataattccagaggcagccttttgggttctgtgctgtcaatgagtatgtctaactgtatgtcaaccccagaggcccttcaccgcaacaacttggtaggaaagattcatccagttgtttgtgacagcaaagatgagcccacagagaagcaggctcacttcctgcacagctgtctctgtcggagagcaagtctgttttgggaactagaacgcaattgtgaaattataagaccagtggatttttttacctggcacatgggttggtgttgaatgaagtgttcagatggataaggatcaatctcatattcattccctgggatgtttagttaccagttttcccaaagtgttctggtagcatctaccatatttcatcaaatctgtgattcctttgattattatatgaaccattattttatgtatcattaagaaaaaatactgccaattaaactctgtcatatcaaca

SEQ ID NO: 146653 - DNA, 4200 bp, Homo sapiens
  Payload ID: 9012
  Gene Symbol: KIF13A
  Gene Name: kinesin family member 13A
  ENST ID: ENST00000358380
  CDS Start-End: 1-2669
aacaatacctagaagaaaagagaagtgccctagaggagcagcggctcatgtatgagcgggaactggagcaactccgccagcagctctcccccgacaggcagccacagagtagcggccctgaccgcctggcctacagcagccagacagcgcagcagaaggtgacccagtgggcagaagagagggatgaactcttccgacaaagcctggcaaaactgcgagagcagctggttaaagctaataccttggtgagggaagcaaacttcctggctgaggaaatgagcaaactcaccgattaccaagtgactcttcagatccctgctgcaaacctcagtgccaataggaagagaggtgcaatagtgagtgaaccagctatccaagtgaggaggaaaggaaagagcacccaagtgtggaccattgagaagctggagaataaattaattgacatgagagacctttaccaagaatggaaggaaaaagttcctgaggcaaagagactctacggaaaacgaggtgaccctttctatgaagcccaagaaaatcacaacctcatcggggtggcgaatgtattcttggaatgcctcttctgtgatgtgaaacttcagtatgcagtccctatcatcagccagcagggggaggttgcagggcgtctccacgtggaagtgatgcgtgttacaggagctgttccagagcgtgtggtggaggatgactcttcggagaattccagtgaaagtgggagccttgaagtcgtagacagcagcggggaaatcattcaccgagtcaaaaagctgacatgtcgggtaaaaattaaagaagcaacggggctgcccttaaacctctcaaattttgtcttctgtcaatacacattctgggaccagtgtgagtctacggtggctgccccggtggtggaccccgaggtgccttcaccacagtccaaggatgcccagtacacagtgaccttctcccactgtaaggactatgtggtgaatgtaacagaagaatttctggagttcatttcagatggagcactggccattgaagtatggggccaccggtgtgctggaaatggcagctccatctgggaggtcgattctcttcatgctaagacaagaacactgcatgacaggtggaatgaagtaacgcgaagaatagaaatgtggatctccatattagaattgaatgagttaggagagtatgctgcagtggaacttcatcaggcaaaagatgtcaacacaggaggcatctttcaacttagacagggtcattcccgtagagtacaagtcacggtgaaacctgtgcagcattcagggacactgccacttatggttgaagccatcctgtcagtatccatcggctgtgtaactgccaggtccaccaaactccaaagagggctggacagttaccagagagatgatgaggatggtgatgatatggatagttatcaggaagaagacttaaactgcgtaagggagaggtggtcagatgcactcattaaacgacgagaatacctggatgaacagataaaaaaagtcagcaataaaacagagaaaacagaggacgatgtggagcgggaagcccagcttgtggagcagtgggtagggctgactgaggaaaggaatgctgtgctggtgccagccccaggcagtgggattcctggggcacctgccgactggatcccacctcctggaatggaaacccacataccagttctcttcctcgatttgaatgcggatgacctcagtgccaatgagcagcttgttggcccccatgcatccggcgtgaactccatcctgcccaaggagcatggcagccagtttttctacctgcccatcataaagcacagtgatgatgaggtttcagccacagcctcttgggattcctcggtgcatgattctgttcacttgaatagggtcacaccacagaatgaaaggatttacctaattgtgaaaaccacagttcaactcagccaccctgctgctatggagttagtattacgaaaacgaattgcagccaatatttacaacaaacagagtttcacgcagagtttgaagaggagaatatccctgaaaaatatattttattcctgtggtgtaacctatgaaatagtatccaatataccaaaggcaactgaggagatagaggaccgggaaacgctggctctcctggcagcaaggagtgaaaacgaaggcacatcagatggggagacgtacattgagaagtacactcgaggcgtgctgcaggtggaaaacattctgagtcttgaacggctccggcaggccgtcacagtcaaagaagcactttccaccaaagcccggcacattcggaggagcctcagtacaccaaatgttcataatgtctcttccagccgaccggacctttctggctttgatgaagatgacaagggttggccagagaaccagttggacatgtctgactatagctccagttaccaagatgtagcatgttatggaactttacccagggattctcctcgaaggaataaagaaggttgtacatcagagactcctcatgccttaaccgtcagcccttttaaagcattctctcctcagccaccaaagtttttcaagcccctaatgcctgtaaaagaggagcataagaaaaggatagccctggaagcaaggcctcttctaagccaggaggtaaatgcttgacttgtctgtactatgcagaatagagcagagttgtgtcacctgtgaagcagcagtgtgcattaacaagctgagtgctgcatgtggacatgcacggtcatcactccatggttcccgttctcgaattcctctttctcaagcatgcagagtcatggtagaatctcttgtttgttgttgctgctgtggttttatttctttgtgtttatggcttttcaaagtatttttttatgtttcaagtgagaaagatgttttctaggtgttttgaaaagattaaaggccttttttaaaattatttttcttttttgtctttttggggatttctgattttgttttttatagagatagggtcttgctgtgttgcccaggctggtctgaaactcctggcctcaagtgattcttttgccccagcctcccaaggcactgggattgcaggcatgagccgttgtacctggtcaaaaggctgttttttaaataagactaattatgctttttgccacagaatctgtttattcctgtcatatctctccagtagtttaactctggcctgcagaattggctgctgcattactcacatgtaataagagtgttagcattgcttttctaacttgcatgtacttaatatgtattttggccgttgtcgtctttgtgtgtgatgcatctgtgtgtcttaacctttgcagagcatgcctccacctcaggcacataaccctggctgcattgtaccctcaggaagcaatggcagcagcatgccagtagaacacaatagcaaacgtgagaagaagattgtaagttccggaaccatttctgtcatattgcctggtggtgggtttaaggccctttcacagacaatcatccaaatgctagaagaaattaagacatgtattgggtctttgtcttaaagaaaataaaaatgtgaccattggtaatgatattttgcatggatgtggccatgacctacaattttatcttatttatttatttattttttgcttaagtttgcttagaaaaagggagaaaggcacttttattgcttctggcctttataaaaagtgtaacaaagagatctttttaataccaaaatctttctaatgtgcctatacatattgcctagattctgaagttaatctacctagaggaagtgcacttacttggagtaagtaatcatgcatttaatgcatttagctgtggatatgtttggaagcttttttatgttgcctgatgctattgccaagataattctgtagttagagctgcactacaatctatcataatcacccttcatcgtctcactgtctagggtagcctttgttaattagctggcaaaatatattccaataccttggtgccagccttgcattcaggatggcttatatatattttgccacaggtaggctgaaactctacccacaaaacctcattccttagcacttggttttaaaattattaatttgagatacagttttaaaaacactgcataccaggcaccttaggttataaattatacctcaatttacaaaaaaaaaaaaaaaaaaaa

SEQ ID NO: 146654 - DNA, 6924 bp, Homo sapiens
  Payload ID: 9012
  Gene Symbol: KIF13A
  Gene Name: kinesin family member 13A
  Uniprot ID: Q9H1H9
  ENST ID: ENST00000378814
  CDS Start-End: 1-5250
atgtcggataccaaggtaaaagttgccgtccgggtccggcccatgaaccgacgagaactggaactgaacaccaagtgcgtggtggagatggaagggaatcaaacggtcctgcaccctcctccttctaacaccaaacagggagaaaggaaacctcccaaggtatttgcctttgattattgcttttggtccatggatgaatctaacactacaaaatacgctggtcaagaagtggttttcaagtgccttggggaaggaattcttgaaaaagcctttcaggggtataatgcgtgtatttttgcatatggacagacaggttcgggaaaatccttttccatgatgggccatgctgagcagctgggccttattccaaggctctgctgtgctttatttaaaaggatctctttggagcaaaatgagtcacagacctttaaagttgaagtgtcctatatggaaatttataatgagaaagttcgggatcttttagaccccaaagggagtagacagtctcttaaagttcgagaacataaagttttgggaccatatgtagatggtttatctcaactagctgtcactagttttgaggatattgagtcattgatgtctgagggaaataagtctcgaacggtagctgctaccaacatgaacgaagaaagcagccgctcccatgctgtgttcaacatcataatcacacagacactttatgacctgcagtctgggaattccggggagaaagtcagtaaggtcagcttggtagacctggcgggtagcgaaagagtatctaaaacaggagctgcaggagagcgactgaaagaaggcagcaacattaacaaatcgcttacaaccttggggttggttatatcatcactggctgaccaggcagctggcaagggtaaaagcaaatttgtgccttatcgagattcagtcctcacttggctgcttaaggacaacttggggggcaacagccaaacctctatgatagccacaatcagcccagccgcagacaactatgaagagaccctctccacattaagatatgcagaccgagccaaaaggattgtgaaccatgctgttgtgaatgaggaccccaacgcaaaagtgatccgagaactgcgggaggaagtcgagaaactgagagagcagctctctcaggcagaggccatgaaggcccctgaactgaaggagaagctcgaagagtctgaaaagctgataaaagaactaacagtgacttgggaagagaagctgagaaaaacagaagagatagcacaggaaagacaacgacaacttgaaagcatggggatttccctggagatgtccggtatcaaggtgggggatgacaaatgctacttagtcaatctgaatgcagaccctgctcttaacgaacttctggtttattatttaaaggatcacaccagggtgggtgcagatacctctcaagatatccagctttttggcataggaattcagcctcagcactgtgagattgacattgcatctgatggagacgtcactctcactccaaaagaaaatgcaaggtcctgtgtgaacggcacccttgtgtgcagtaccacccagctgtggcatggtgaccgaatcctatggggaaataatcacttttttagaataaacttacctaagaggaaacgtcgagattggttgaaagactttgaaaaagaaacgggcccgccagagcatgacctggatgcagccagtgaggcttcctctgaaccagactataactatgaatttgcacagatggaagttatcatgaaaaccctgaatagtaatgacccagttcaaaatgtggttcaggtcctggagaaacaatacctagaagaaaagagaagtgccctagaggagcagcggctcatgtatgagcgggaactggagcaactccgccagcagctctcccccgacaggcagccacagagtagcggccctgaccgcctggcctacagcagccagacagcgcagcagaaggtgacccagtgggcagaagagagggatgaactcttccgacaaagcctggcaaaactgcgagagcagctggttaaagctaataccttggtgagggaagcaaacttcctggctgaggaaatgagcaaactcaccgattaccaagtgactcttcagatccctgctgcaaacctcagtgccaataggaagagaggtgcaatagtgagtgaaccagctatccaagtgaggaggaaaggaaagagcacccaagtgtggaccattgagaagctggagaataaattaattgacatgagagacctttaccaagaatggaaggaaaaagttcctgaggcaaagagactctacggaaaacgaggtgaccctttctatgaagcccaagaaaatcacaacctcatcggggtggcgaatgtattcttggaatgcctcttctgtgatgtgaaacttcagtatgcagtccctatcatcagccagcagggggaggttgcagggcgtctccacgtggaagtgatgcgtgttacaggagctgttccagagcgtgtggtggaggatgactcttcggagaattccagtgaaagtgggagccttgaagtcgtagacagcagcggggaaatcattcaccgagtcaaaaagctgacatgtcgggtaaaaattaaagaagcaacggggctgcccttaaacctctcaaattttgtcttctgtcaatacacattctgggaccagtgtgagtctacggtggctgccccggtggtggaccccgaggtgccttcaccacagtccaaggatgcccagtacacagtgaccttctcccactgtaaggactatgtggtgaatgtaacagaagaatttctggagttcatttcagatggagcactggccattgaagtatggggccaccggtgtgctggaaatggcagctccatctgggaggtcgattctcttcatgctaagacaagaacactgcatgacaggtggaatgaagtaacgcgaagaatagaaatgtggatctccatattagaattgaatgagttaggagagtatgctgcagtggaacttcatcaggcaaaagatgtcaacacaggaggcatctttcaacttagacagggtcattcccgtagagtacaagtcacggtgaaacctgtgcagcattcagggacactgccacttatggttgaagccatcctgtcagtatccatcggctgtgtaactgccaggtccaccaaactccaaagagggctggacagttaccaggaagaagacttaaactgcgtaagggagaggtggtcagatgcactcattaaacgacgagaatacctggatgaacagataaaaaaagtcagcaataaaacagagaaaacagaggacgatgtggagcgggaagcccagcttgtggagcagtgggtagggctgactgaggaaaggaatgctgtgctggtgccagccccaggcagtgggattcctggggcacctgccgactggatcccacctcctggaatggaaacccacataccagttctcttcctcgatttgaatgcggatgacctcagtgccaatgagcagcttgttggcccccatgcatccggcgtgaactccatcctgcccaaggagcatggcagccagtttttctacctgcccatcataaagcacagtgatgatgaggtttcagccacagcctcttgggattcctcggtgcatgattctgttcacttgaatagggtcacaccacagaatgaaaggatttacctaattgtgaaaaccacagttcaactcagccaccctgctgctatggagttagtattacgaaaacgaattgcagccaatatttacaacaaacagagtttcacgcagagtttgaagaggagaatatccctgaaaaatatattttattcctgtggtgtaacctatgaaatagtatccaatataccaaaggcaactgaggagatagaggaccgggaaacgctggctctcctggcagcaaggagtgaaaacgaaggcacatcagatggggagacgtacattgagaagtacactcgaggcgtgctgcaggtggaaaacattctgagtcttgaacggctccggcaggccgtcacagtcaaagaagcactttccaccaaagcccggcacattcggaggagcctcagtacaccaaatgttcataatgtctcttccagccgaccggacctttctggctttgatgaagatgacaagggttggccagagaaccagttggacatgtctgactatagctccagttaccaagatgtagcatgttatggaactttacccagggattctcctcgaaggaataaagaaggttgtacatcagagactcctcatgccttaaccgtcagcccttttaaagcattctctcctcagccaccaaagtttttcaagcccctaatgcctgtaaaagaggagcataagaaaaggatagccctggaagcaaggcctcttctaagccaggaggactctgaggaggaagaaaatgagctggaagctattaacaggaagctaataagttcacagccttatgtacctgtggagtttgctgacttcagtgtttacaatgccagcttggagaacagggaatggttttcctctaaagtagatctgtcaaactcacgggtcttggagaaagaagtgtcccgtagccctaccaccagcagtattaccagtggctacttttcccacagtgcctccaatgccaccctgtctgacatggtggtcccttctagtgacagctcagaccagctggccattcagacgaaggatgcagactccaccgagcactccacaccatcgcttgtgcatgatttcaggccgtcctcaaacaaagagttgacagaagtcgaaaaaggcttggtaaaggacaagataattgtggtgccactcaaggaaaacagtgccttagccaaagggagcccatcatcccagagcatccctgagaaaaactccaaatcactgtgcaggactggctcatgttcagaactagatgcctgccccagcaaaattagccagccagccaggggattctgccccagggaggtgacggtagaacacaccaccaacatccttgaagaccattctttcacagaatttatgggagtgtcagagggaaaagattttgatggtttgacagattcttctgctggagagctttccagtaggaggagtctaccaaataaaacaggcggcaagactgtctccgatgggctccaccaccccagccagctgcattccaagttagagaatgaccagggaggcacaacctcacggtgagagcagcaagcacccctcctcaggccacagcttggcgtctttgttcgcctggtcaccttgggcaagcaccagccccatctctaaaacatgctgccgcctggctggacctcagaccagaagctggagaatccacaccgtgcacttcctgggccacctcctttcccctccccagtgggagaagcggcactttgtcacttgggtgaatcaacagcctctgctttttccagaaagcaagagaactgaaaatcctggattaactaagtgacagtatttttttttgcacttactacacacctccactgtatagaaacctctacagattccaacagactttattcttgtacaattttaatcagttcttactgtagaatctggagtcaatgctctaatctgttttttataaataatatatattatgtatatgaaatgtgtatctatagtatgtctggagacagacaaggctgcacactaaaatgcagataaaggtgatttgtagaaaatcataaggtactggacttcgttacaaagcaacttgggcgatctcttatacatgagcagatgaaaaatattttattgcctaagaatgagcttgcaaatccctctttgcagaaaaggttatagaatgctgttctttataaccaaagaacttacataagacaacatttttgctgtccactcttttgtgtgaacatgtatgtttgactgcaagtttggtgccataattcccttggctaccaagccacgtgctgccattctctgtcctttgtttcataagcacactgagaaatctcacagctatattctttggtcttccacctgcccctccacctgctgacttgacattgtattataactgttgacaatgactggggtcctgactccacagttgcctggaccgtggctcagcccagctgggcaggtggaatgaagagagccgtattactgtaagaaaacacaaggacagccaggagtagtggtggggtgggtggggtgggaggtgttgatttttgtgtgtttctgtgtgtgtggttttgttttggattggtaggtttcactgtggcgtggttttgctgttgttattttgcttgattctggaaaatgctgaggagatggactgagctatgaagttcaatggttcaccctttaccatgtttgcaggagatgatcgaatacagatgaccctgctgtcgtgtcttcatttgtaaaattctcctacaaatggagacattgaaggattatgtgtatggaaatttttacaaaattcctttctgtacctattctgtagatgcctgtataatcggtctggatgtacagctataaatgtgttgtgagagcaagagagagagaatgggtagagcctgctgtaccttttttcttttaaattcttcgagttggtaaatgagtaagatattggaaaccttaatgaaaagctgctgttcatgatttgtgtgtatagtgagctgactgtagtattttactattgtctgttaaaaaaagaaaaactgtaatttatatcccctttgaactttattgtgtttaattggtacacatttctgtgtgtgtgtgtgtgtatgtgttttagaatacaaactgtgtaattcagattttaaaacactaatcatttgtctttaataaccctgcctttagtttcaaatctaacttaccatatttcta

SEQ ID NO: 146655 - DNA, 5747 bp, Homo sapiens
  Payload ID: 9012
  Gene Symbol: KIF13A
  Gene Name: kinesin family member 13A
  Uniprot ID: Q9H1H9
  ENST ID: ENST00000378826
  CDS Start-End: 20-5332
ccgggcgagcgcagccaacatgtcggataccaaggtaaaagttgccgtccgggtccggcccatgaaccgacgagaactggaactgaacaccaagtgcgtggtggagatggaagggaatcaaacggtcctgcaccctcctccttctaacaccaaacagggagaaaggaaacctcccaaggtatttgcctttgattattgcttttggtccatggatgaatctaacactacaaaatacgctggtcaagaagtggttttcaagtgccttggggaaggaattcttgaaaaagcctttcaggggtataatgcgtgtatttttgcatatggacagacaggttcgggaaaatccttttccatgatgggccatgctgagcagctgggccttattccaaggctctgctgtgctttatttaaaaggatctctttggagcaaaatgagtcacagacctttaaagttgaagtgtcctatatggaaatttataatgagaaagttcgggatcttttagaccccaaagggagtagacagtctcttaaagttcgagaacataaagttttgggaccatatgtagatggtttatctcaactagctgtcactagttttgaggatattgagtcattgatgtctgagggaaataagtctcgaacggtagctgctaccaacatgaacgaagaaagcagccgctcccatgctgtgttcaacatcataatcacacagacactttatgacctgcagtctgggaattccggggagaaagtcagtaaggtcagcttggtagacctggcgggtagcgaaagagtatctaaaacaggagctgcaggagagcgactgaaagaaggcagcaacattaacaaatcgcttacaaccttggggttggttatatcatcactggctgaccaggcagctggcaagggtaaaagcaaatttgtgccttatcgagattcagtcctcacttggctgcttaaggacaacttggggggcaacagccaaacctctatgatagccacaatcagcccagccgcagacaactatgaagagaccctctccacattaagatatgcagaccgagccaaaaggattgtgaaccatgctgttgtgaatgaggaccccaacgcaaaagtgatccgagaactgcgggaggaagtcgagaaactgagagagcagctctctcaggcagaggccatgaaggcccctgaactgaaggagaagctcgaagagtctgaaaagctgataaaagaactaacagtgacttgggaagagaagctgagaaaaacagaagagatagcacaggaaagacaacgacaacttgaaagcatggggatttccctggagatgtccggtatcaaggtgggggatgacaaatgctacttagtcaatctgaatgcagaccctgctcttaacgaacttctggtttattatttaaaggatcacaccagggtgggtgcagatacctctcaagatatccagctttttggcataggaattcagcctcagcactgtgagattgacattgcatctgatggagacgtcactctcactccaaaagaaaatgcaaggtcctgtgtgaacggcacccttgtgtgcagtaccacccagctgtggcatggtgaccgaatcctatggggaaataatcacttttttagaataaacttacctaagaggaaacgtcgagattggttgaaagactttgaaaaagaaacgggcccgccagagcatgacctggatgcagccagtgaggcttcctctgaaccagactataactatgaatttgcacagatggaagttatcatgaaaaccctgaatagtaatgacccagttcaaaatgtggttcaggtcctggagaaacaatacctagaagaaaagagaagtgccctagaggagcagcggctcatgtatgagcgggaactggagcaactccgccagcagctctcccccgacaggcagccacagagtagcggccctgaccgcctggcctacagcagccagacagcgcagcagaaggtgacccagtgggcagaagagagggatgaactcttccgacaaagcctggcaaaactgcgagagcagctggttaaagctaataccttggtgagggaagcaaacttcctggctgaggaaatgagcaaactcaccgattaccaagtgactcttcagatccctgctgcaaacctcagtgccaataggaagagaggtgcaatagtgagtgaaccagctatccaagtgaggaggaaaggaaagagcacccaagtgtggaccattgagaagctggagaataaattaattgacatgagagacctttaccaagaatggaaggaaaaagttcctgaggcaaagagactctacggaaaacgaggtgaccctttctatgaagcccaagaaaatcacaacctcatcggggtggcgaatgtattcttggaatgcctcttctgtgatgtgaaacttcagtatgcagtccctatcatcagccagcagggggaggttgcagggcgtctccacgtggaagtgatgcgtgttacaggagctgttccagagcgtgtggtggaggatgactcttcggagaattccagtgaaagtgggagccttgaagtcgtagacagcagcggggaaatcattcaccgagtcaaaaagctgacatgtcgggtaaaaattaaagaagcaacggggctgcccttaaacctctcaaattttgtcttctgtcaatacacattctgggaccagtgtgagtctacggtggctgccccggtggtggaccccgaggtgccttcaccacagtccaaggatgcccagtacacagtgaccttctcccactgtaaggactatgtggtgaatgtaacagaagaatttctggagttcatttcagatggagcactggccattgaagtatggggccaccggtgtgctggaaatggcagctccatctgggaggtcgattctcttcatgctaagacaagaacactgcatgacaggtggaatgaagtaacgcgaagaatagaaatgtggatctccatattagaattgaatgagttaggagagtatgctgcagtggaacttcatcaggcaaaagatgtcaacacaggaggcatctttcaacttagacagggtcattcccgtagagtacaagtcacggtgaaacctgtgcagcattcagggacactgccacttatggttgaagccatcctgtcagtatccatcggctgtgtaactgccaggtccaccaaactccaaagagggctggacagttaccagagagatgatgaggatggtgatgatatggatagttatcaggaagaagacttaaactgcgtaagggagaggtggtcagatgcactcattaaacgacgagaatacctggatgaacagataaaaaaagtcagcaataaaacagagaaaacagaggacgatgtggagcgggaagcccagcttgtggagcagtgggtagggctgactgaggaaaggaatgctgtgctggtgccagccccaggcagtgggattcctggggcacctgccgactggatcccacctcctggaatggaaacccacataccagttctcttcctcgatttgaatgcggatgacctcagtgccaatgagcagcttgttggcccccatgcatccggcgtgaactccatcctgcccaaggagcatggcagccagtttttctacctgcccatcataaagcacagtgatgatgaggtttcagccacagcctcttgggattcctcggtgcatgattctgttcacttgaatagggtcacaccacagaatgaaaggatttacctaattgtgaaaaccacagttcaactcagccaccctgctgctatggagttagtattacgaaaacgaattgcagccaatatttacaacaaacagagtttcacgcagagtttgaagaggagaatatccctgaaaaatatattttattcctgtggtgtaacctatgaaatagtatccaatataccaaaggcaactgaggagatagaggaccgggaaacgctggctctcctggcagcaaggagtgaaaacgaaggcacatcagatggggagacgtacattgagaagtacactcgaggcgtgctgcaggtggaaaacattctgagtcttgaacggctccggcaggccgtcacagtcaaagaagcactttccaccaaagcccggcacattcggaggagcctcagtacaccaaatgttcataatgtctcttccagccgaccggacctttctggctttgatgaagatgacaagggttggccagagaaccagttggacatgtctgactatagctccagttaccaagatgtagcatgttatggaactttacccagggattctcctcgaaggaataaagaaggttgtacatcagagactcctcatgccttaaccgtcagcccttttaaagcattctctcctcagccaccaaagtttttcaagcccctaatgcctgtaaaagaggagcataagaaaaggatagccctggaagcaaggcctcttctaagccaggaggactctgaggaggaagaaaatgagctggaagctattaacaggaagctaataagttcacagccttatgtacctgtggagtttgctgacttcagtgtttacaatgccagcttggagaacagggaatggttttcctctaaagtagatctgtcaaactcacgggtcttggagaaagaagtgtcccgtagccctaccaccagcagtattaccagtggctacttttcccacagtgcctccaatgccaccctgtctgacatggtggtcccttctagtgacagctcagaccagctggccattcagacgaaggatgcagactccaccgagcactccacaccatcgcttgtgcatgatttcaggccgtcctcaaacaaagagttgacagaagtcgaaaaaggcttggtaaaggacaagataattgtggtgccactcaaggaaaacagtgccttagccaaagggagcccatcatcccagagcatccctgagaaaaactccaaatcactgtgcaggactggctcatgttcagaactagatgcctgccccagcaaaattagccagccagccaggggattctgccccagggaggtgacggtagaacacaccaccaacatccttgaagaccattctttcacagaatttatgggagtgtcagagggaaaagattttgatggtttgacagattcttctgctggagagctttccagtaggaggagtctaccaaataaaacaggcggcaagactgtctccgatgggctccaccaccccagccagctgcattccaagttagagaatgaccaggtaataattccagaggcagccttttgggttctgtgctgtcaatgagtatgtctaactgtatgtcaaccccagaggcccttcaccgcaacaacttggtaggaaagattcatccagttgtttgtgacagcaaagatgagcccacagagaagcaggctcacttcctgcacagctgtctctgtcggagagcaagtctgttttgggaactagaacgcaattgtgaaattataagaccagtggatttttttacctggcacatgggttggtgttgaatgaagtgttcagatggataaggatcaatctcatattcattccctgggatgtttagttaccagttttcccaaagtgttctggtagcatctaccatatttcatcaaatctgtgattcctttgattattatatgaaccattattttatgtatcattaagaaaaaatactgccaattaaactctgtcatatcaa

SEQ ID NO: 146656 - DNA, 5707 bp, Homo sapiens
  Payload ID: 9012
  Gene Symbol: KIF13A
  Gene Name: kinesin family member 13A
  Uniprot ID: Q9H1H9
  ENST ID: ENST00000378843
  CDS Start-End: 19-5292
cgggcgagcgcagccaacatgtcggataccaaggtaaaagttgccgtccgggtccggcccatgaaccgacgagaactggaactgaacaccaagtgcgtggtggagatggaagggaatcaaacggtcctgcaccctcctccttctaacaccaaacagggagaaaggaaacctcccaaggtatttgcctttgattattgcttttggtccatggatgaatctaacactacaaaatacgctggtcaagaagtggttttcaagtgccttggggaaggaattcttgaaaaagcctttcaggggtataatgcgtgtatttttgcatatggacagacaggttcgggaaaatccttttccatgatgggccatgctgagcagctgggccttattccaaggctctgctgtgctttatttaaaaggatctctttggagcaaaatgagtcacagacctttaaagttgaagtgtcctatatggaaatttataatgagaaagttcgggatcttttagaccccaaagggagtagacagtctcttaaagttcgagaacataaagttttgggaccatatgtagatggtttatctcaactagctgtcactagttttgaggatattgagtcattgatgtctgagggaaataagtctcgaacggtagctgctaccaacatgaacgaagaaagcagccgctcccatgctgtgttcaacatcataatcacacagacactttatgacctgcagtctgggaattccggggagaaagtcagtaaggtcagcttggtagacctggcgggtagcgaaagagtatctaaaacaggagctgcaggagagcgactgaaagaaggcagcaacattaacaaatcgcttacaaccttggggttggttatatcatcactggctgaccaggcagctggcaagggtaaaagcaaatttgtgccttatcgagattcagtcctcacttggctgcttaaggacaacttggggggcaacagccaaacctctatgatagccacaatcagcccagccgcagacaactatgaagagaccctctccacattaagatatgcagaccgagccaaaaggattgtgaaccatgctgttgtgaatgaggaccccaacgcaaaagtgatccgagaactgcgggaggaagtcgagaaactgagagagcagctctctcaggcagaggccatgaaggcccctgaactgaaggagaagctcgaagagtctgaaaagctgataaaagaactaacagtgacttgggaagagaagctgagaaaaacagaagagatagcacaggaaagacaacgacaacttgaaagcatggggatttccctggagatgtccggtatcaaggtgggggatgacaaatgctacttagtcaatctgaatgcagaccctgctcttaacgaacttctggtttattatttaaaggatcacaccagggtgggtgcagatacctctcaagatatccagctttttggcataggaattcagcctcagcactgtgagattgacattgcatctgatggagacgtcactctcactccaaaagaaaatgcaaggtcctgtgtgaacggcacccttgtgtgcagtaccacccagctgtggcatggtgaccgaatcctatggggaaataatcacttttttagaataaacttacctaagaggaaacgtcgagattggttgaaagactttgaaaaagaaacgggcccgccagagcatgacctggatgcagccagtgaggcttcctctgaaccagactataactatgaatttgcacagatggaagttatcatgaaaaccctgaatagtaatgacccagttcaaaatgtggttcaggtcctggagaaacaatacctagaagaaaagagaagtgccctagaggagcagcggctcatgtatgagcgggaactggagcaactccgccagcagctctcccccgacaggcagccacagagtagcggccctgaccgcctggcctacagcagccagacagcgcagcagaaggtgacccagtgggcagaagagagggatgaactcttccgacaaagcctggcaaaactgcgagagcagctggttaaagctaataccttggtgagggaagcaaacttcctggctgaggaaatgagcaaactcaccgattaccaagtgactcttcagatccctgctgcaaacctcagtgccaataggaagagaggtgcaatagtgagtgaaccagctatccaagtgaggaggaaaggaaagagcacccaagtgtggaccattgagaagctggagaataaattaattgacatgagagacctttaccaagaatggaaggaaaaagttcctgaggcaaagagactctacggaaaacgaggtgaccctttctatgaagcccaagaaaatcacaacctcatcggggtggcgaatgtattcttggaatgcctcttctgtgatgtgaaacttcagtatgcagtccctatcatcagccagcagggggaggttgcagggcgtctccacgtggaagtgatgcgtgttacaggagctgttccagagcgtgtggtggaggatgactcttcggagaattccagtgaaagtgggagccttgaagtcgtagacagcagcggggaaatcattcaccgagtcaaaaagctgacatgtcgggtaaaaattaaagaagcaacggggctgcccttaaacctctcaaattttgtcttctgtcaatacacattctgggaccagtgtgagtctacggtggctgccccggtggtggaccccgaggtgccttcaccacagtccaaggatgcccagtacacagtgaccttctcccactgtaaggactatgtggtgaatgtaacagaagaatttctggagttcatttcagatggagcactggccattgaagtatggggccaccggtgtgctggaaatggcagctccatctgggaggtcgattctcttcatgctaagacaagaacactgcatgacaggtggaatgaagtaacgcgaagaatagaaatgtggatctccatattagaattgaatgagttaggagagtatgctgcagtggaacttcatcaggcaaaagatgtcaacacaggaggcatctttcaacttagacagggtcattcccgtagagtacaagtcacggtgaaacctgtgcagcattcagggacactgccacttatggttgaagccatcctgtcagtatccatcggctgtgtaactgccaggtccaccaaactccaaagagggctggacagttaccaggaagaagacttaaactgcgtaagggagaggtggtcagatgcactcattaaacgacgagaatacctggatgaacagataaaaaaagtcagcaataaaacagagaaaacagaggacgatgtggagcgggaagcccagcttgtggagcagtgggtagggctgactgaggaaaggaatgctgtgctggtgccagccccaggcagtgggattcctggggcacctgccgactggatcccacctcctggaatggaaacccacataccagttctcttcctcgatttgaatgcggatgacctcagtgccaatgagcagcttgttggcccccatgcatccggcgtgaactccatcctgcccaaggagcatggcagccagtttttctacctgcccatcataaagcacagtgatgatgaggtttcagccacagcctcttgggattcctcggtgcatgattctgttcacttgaatagggtcacaccacagaatgaaaggatttacctaattgtgaaaaccacagttcaactcagccaccctgctgctatggagttagtattacgaaaacgaattgcagccaatatttacaacaaacagagtttcacgcagagtttgaagaggagaatatccctgaaaaatatattttattcctgtggtgtaacctatgaaatagtatccaatataccaaaggcaactgaggagatagaggaccgggaaacgctggctctcctggcagcaaggagtgaaaacgaaggcacatcagatggggagacgtacattgagaagtacactcgaggcgtgctgcaggtggaaaacattctgagtcttgaacggctccggcaggccgtcacagtcaaagaagcactttccaccaaagcccggcacattcggaggagcctcagtacaccaaatgttcataatgtctcttccagccgaccggacctttctggctttgatgaagatgacaagggttggccagagaaccagttggacatgtctgactatagctccagttaccaagatgtagcatgttatggaactttacccagggattctcctcgaaggaataaagaaggttgtacatcagagactcctcatgccttaaccgtcagcccttttaaagcattctctcctcagccaccaaagtttttcaagcccctaatgcctgtaaaagaggagcataagaaaaggatagccctggaagcaaggcctcttctaagccaggaggactctgaggaggaagaaaatgagctggaagctattaacaggaagctaataagttcacagccttatgtacctgtggagtttgctgacttcagtgtttacaatgccagcttggagaacagggaatggttttcctctaaagtagatctgtcaaactcacgggtcttggagaaagaagtgtcccgtagccctaccaccagcagtattaccagtggctacttttcccacagtgcctccaatgccaccctgtctgacatggtggtcccttctagtgacagctcagaccagctggccattcagacgaaggatgcagactccaccgagcactccacaccatcgcttgtgcatgatttcaggccgtcctcaaacaaagagttgacagaagtcgaaaaaggcttggtaaaggacaagataattgtggtgccactcaaggaaaacagtgccttagccaaagggagcccatcatcccagagcatccctgagaaaaactccaaatcactgtgcaggactggctcatgttcagaactagatgcctgccccagcaaaattagccagccagccaggggattctgccccagggaggtgacggtagaacacaccaccaacatccttgaagaccattctttcacagaatttatgggagtgtcagagggaaaagattttgatggtttgacagattcttctgctggagagctttccagtaggaggagtctaccaaataaaacaggcggcaagactgtctccgatgggctccaccaccccagccagctgcattccaagttagagaatgaccaggtaataattccagaggcagccttttgggttctgtgctgtcaatgagtatgtctaactgtatgtcaaccccagaggcccttcaccgcaacaacttggtaggaaagattcatccagttgtttgtgacagcaaagatgagcccacagagaagcaggctcacttcctgcacagctgtctctgtcggagagcaagtctgttttgggaactagaacgcaattgtgaaattataagaccagtggatttttttacctggcacatgggttggtgttgaatgaagtgttcagatggataaggatcaatctcatattcattccctgggatgtttagttaccagttttcccaaagtgttctggtagcatctaccatatttcatcaaatctgtgattcctttgattattatatgaaccattattttatgtatcattaagaaaaaatactgccaattaaactctgtcatatcaa

SEQ ID NO: 146657 - DNA, 810 bp, Homo sapiens
  Payload ID: 9012
  Gene Symbol: KIF13A
  Gene Name: kinesin family member 13A
  ENST ID: ENST00000506044
  CDS Start-End: 1-810
ctggagttcatttcagatggagcactggccattgaagtatggggccaccggtgtgctggaaatggcagctccatctgggaggtcgattctcttcatgctaagacaagaacactgcatgacaggtggaatgaagtaacgcgaagaatagaaatgtggatctccatattagaattgaatgagttaggagagtatgctgcagtggaacttcatcaggcaaaagatgtcaacacaggaggcatctttcaacttagacaggaagaagacttaaactgcgtaagggagaggtggtcagatgcactcattaaacgacgagaatacctggatgaacagataaaaaaagtcagcaataaaacagagaaaacagaggacgatgtggagcgggaagcccagcttgtggagcagtgggtagggctgactgaggaaaggaatgctgtgctggtgccagccccaggcagtgggattcctggggcacctgccgactggatcccacctcctggaatggaaacccacataccagttctcttcctcgatttgaatgcggatgacctcagtgccaatgagcagcttgttggcccccatgcatccggcgtgaactccatcctgcccaaggagcatggcagccagtttttctacctgcccatcataaagcacagtgatgatgaggtttcagccacagcctcttgggattcctcggtgcatgattctgttcacttgaatagggtcacaccacagaatgaaaggatttacctaattgtgaaaaccacagttcaactcagccaccctgctgctatggagttagtattacgaaaa

SEQ ID NO: 146658 - DNA, 1330 bp, Homo sapiens
  Payload ID: 9012
  Gene Symbol: KIF13A
  Gene Name: kinesin family member 13A
  Uniprot ID: Q9H1H9
  ENST ID: ENST00000502704
  CDS Start-End: 161-373
cgggatggcccgcgcgcctcggcgctgcctctcggagctcacggcggagcggcggcggccgcgctcgaggggcgcgcggctgcagcggcggcggcgccgcgcgtgaggggccgcctaaggccgagcgggcgcggcgagcggccgggcgagcgcagccaacatgtcggataccaaggtaaaagttgccgtccgggtccggcccatgaaccgacgagaactggaactgaacaccaagtgcgtggtggagatggaagggaatcaaacggtcctgcaccctcctccttctaacaccaaacagggagaaaggctggtcacagtggctcacatctctaattccagcactttgggaggccaaggcaagaggatcacttgagccgaggatttcaagaccagcctttgcaacatggcaaaaccccatctctacaaaaaatttgtttaaaattagctggacgtggtggcgcatacctgtggtcccagctactcaggagactgaggcaggaggctccagtgagctgtttgagccactgcacgccagcctgggtgacagagccagaccctgtcttcaaaaaaataaaaaattaaagtggcgtgaggtgaattgcatcagaccccacatatgaataaatggatggttggcaaagtgttatatataataagtacaattccttaggtgtccttaggtgtactactaaagtgggtttgtgatagcccatatatttagtcatttatgttcaatagtgttatattcatttgagaaattattttaagaaatttaaaattaagaaagttttaaaagtcctttagtaattagagatttctctgggtgggtggatacggttgtttctaattatcccacacatttaatcatttatgttcaatagtgttgtattttttgagaaattattttaagaaatgcaaaattaagaaagatttaaaagtcctttagtaattagagatttttctagttgggtggataagggttatttctaagtatcttttgagtattttttgtcatatatttcgttttttaggcatgattaaaagtgtatttgaggactcttagacacataaagttgaattcctcagattgagagatagttattgctttttaattttgttaagatgctcagctgttggataaataatgcttttgttaaaatcctgtggggcattcatccaacaaatggggtataagaaaggaatgtgtgtttgtgtacatgttcttctatctgttggtcctaaagagtgtaagaaggtaaatttgaccagtgaaattcataattacagagttttatttggtaatccattaataaatcattttctgaaagca

SEQ ID NO: 146659 - DNA, 4009 bp, Homo sapiens
  Payload ID: 9012
  Gene Symbol: KIF13A
  Gene Name: kinesin family member 13A
  ENST ID: ENST00000502297
  CDS Start-End: 1-2406
gaagtaacgcgaagaatagaaatgtggatctccatattagaattgaatgagttaggagagtatgctgcagtggaacttcatcaggcaaaagatgtcaacacaggaggcatctttcaacttagacagggtcattcccgtagagtacaagtcacggtgaaacctgtgcagcattcagggacactgccacttatggttgaagccatcctgtcagtatccatcggctgtgtaactgccaggtccaccaaactccaaagagggctggacagttaccaggaagaagacttaaactgcgtaagggagaggtggtcagatgcactcattaaacgacgagaatacctggatgaacagataaaaaaagtcagcaataaaacagagaaaacagaggacgatgtggagcgggaagcccagcttgtggagcagtgggtagggctgactgaggaaaggaatgctgtgctggtgccagccccaggcagtgggattcctggggcacctgccgactggatcccacctcctggaatggaaacccacataccagttctcttcctcgatttgaatgcggatgacctcagtgccaatgagcagcttgttggcccccatgcatccggcgtgaactccatcctgcccaaggagcatggcagccagtttttctacctgcccatcataaagcacagtgatgatgaggtttcagccacagcctcttgggattcctcggtgcatgattctgttcacttgaatagggtcacaccacagaatgaaaggatttacctaattgtgaaaaccacagttcaactcagccaccctgctgctatggagttagtattacgaaaacgaattgcagccaatatttacaacaaacagagtttcacgcagagtttgaagaggagaatatccctgaaaaatatattttattcctgtggtgtaacctatgaaatagtatccaatataccaaaggcaactgaggagatagaggaccgggaaacgctggctctcctggcagcaaggagtgaaaacgaaggcacatcagatggggagacgtacattgagaagtacactcgaggcgtgctgcaggtggaaaacattctgagtcttgaacggctccggcaggccgtcacagtcaaagaagcactttccaccaaagcccggcacattcggaggagcctcagtacaccaaatgttcataatgtctcttccagccgaccggacctttctggctttgatgaagatgacaagggttggccagagaaccagttggacatgtctgactatagctccagttaccaagatgtagcatgttatggaactttacccagggattctcctcgaaggaataaagaaggttgtacatcagagactcctcatgccttaaccgtcagcccttttaaagcattctctcctcagccaccaaagtttttcaagcccctaatgcctgtaaaagaggagcataagaaaaggatagccctggaagcaaggcctcttctaagccaggagagcatgcctccacctcaggcacataaccctggctgcattgtaccctcaggaagcaatggcagcagcatgccagtagaacacaatagcaaacgtgagaagaagattgactctgaggaggaagaaaatgagctggaagctattaacaggaagctaataagttcacagccttatgtacctgtggagtttgctgacttcagtgtttacaatgccagcttggagaacagggaatggttttcctctaaagtagatctgtcaaactcacgggtcttggagaaagaagtgtcccgtagccctaccaccagcagtattaccagtggctacttttcccacagtgcctccaatgccaccctgtctgacatggtggtcccttctagtgacagctcagaccagctggccattcagacgaaggatgcagactccaccgagcactccacaccatcgcttgtgcatgatttcaggccgtcctcaaacaaagagttgacagaagtcgaaaaaggcttggtaaaggacaagataattgtggtgccactcaaggaaaacagtgccttagccaaagggagcccatcatcccagagcatccctgagaaaaactccaaatcactgtgcaggactggctcatgttcagaactagatgcctgccccagcaaaattagccagccagccaggggattctgccccagggaggtgacggtagaacacaccaccaacatccttgaagaccattctttcacagaatttatgggagtgtcagagggaaaagattttgatggtttgacagattcttctgctggagagctttccagtaggaggagtctaccaaataaaacaggcggcaagactgtctccgatgggctccaccaccccagccagctgcattccaagttagagaatgaccagggaggcacaacctcacggtgagagcagcaagcacccctcctcaggccacagcttggcgtctttgttcgcctggtcaccttgggcaagcaccagccccatctctaaaacatgctgccgcctggctggacctcagaccagaagctggagaatccacaccgtgcacttcctgggccacctcctttcccctccccagtgggagaagcggcactttgtcacttgggtgaatcaacagcctctgctttttccagaaagcaagagaactgaaaatcctggattaactaagtgacagtatttttttttgcacttactacacacctccactgtatagaaacctctacagattccaacagactttattcttgtacaattttaatcagttcttactgtagaatctggagtcaatgctctaatctgttttttataaataatatatattatgtatatgaaatgtgtatctatagtatgtctggagacagacaaggctgcacactaaaatgcagataaaggtgatttgtagaaaatcataaggtactggacttcgttacaaagcaacttgggcgatctcttatacatgagcagatgaaaaatattttattgcctaagaatgagcttgcaaatccctctttgcagaaaaggttatagaatgctgttctttataaccaaagaacttacataagacaacatttttgctgtccactcttttgtgtgaacatgtatgtttgactgcaagtttggtgccataattcccttggctaccaagccacgtgctgccattctctgtcctttgtttcataagcacactgagaaatctcacagctatattctttggtcttccacctgcccctccacctgctgacttgacattgtattataactgttgacaatgactggggtcctgactccacagttgcctggaccgtggctcagcccagctgggcaggtggaatgaagagagccgtattactgtaagaaaacacaaggacagccaggagtagtggtggggtgggtggggtgggaggtgttgatttttgtgtgtttctgtgtgtgtggttttgttttggattggtaggtttcactgtggcgtggttttgctgttgttattttgcttgattctggaaaatgctgaggagatggactgagctatgaagttcaatggttcaccctttaccatgtttgcaggagatgatcgaatacagatgaccctgctgtcgtgtcttcatttgtaaaattctcctacaaatggagacattgaaggattatgtgtatggaaatttttacaaaattcctttctgtacctattctgtagatgcctgtataatcggtctggatgtacagctataaatgtgttgtgagagcaagagagagagaatgggtagagcctgctgtaccttttttcttttaaattcttcgagttggtaaatgagtaagatattggaaaccttaatgaaaagctgctgttcatgatttgtgtgtatagtgagctgactgtagtattttactattgtctgttaaaaaaagaaaaactgtaatttatatcccctttgaactttattgtgtttaattggtacacatttctgtgtgtgtgtgtgtgtatgtgttttagaatacaaactgtgtaattcag

SEQ ID NO: 146660 - DNA, 8745 bp, Homo sapiens
  Payload ID: 9013
  Gene Symbol: KIF13B
  Gene Name: kinesin family member 13B
  Uniprot ID: Q9NQT8
  ENST ID: ENST00000524189
  CDS Start-End: 40-5520
ggcagacggaagccgaacgagttcctcggcggctgcaggatgggggactccaaagtgaaagtggcggtgcggatacgacccatgaaccggcgagagactgacttgcataccaaatgtgtggtggatgtggatgcaaacaaggttattcttaatcctgtaaatacgaatctttccaaaggagatgcccggggccagccgaaggtgtttgcttatgatcattgtttctggtctatggatgaatctgtcaaagaaaagtatgcaggtcaagatattgttttcaagtgccttggagagaatatcctgcagaatgcttttgatggctacaatgcatgtatctttgcctatggacagactggctctggaaaatcttataccatgatgggcacagctgaccaacctggattaatcccaagactttgcagtggactctttgaacgaactcagaaagaggaaaatgaagaacagagttttaaagtagaagtgtcctacatggaaatttataatgaaaaagttcgagaccttcttgatcccaaaggaagccgtcagacgttgaaagtcagagagcatagtgtgttgggaccttatgtcgacggactttctaaactggctgtcacaagctacaaggatattgagtcgttgatgtctgagggtaacaaatctcgcacagttgctgcaaccaacatgaacgaggagagtagccgatcccatgcagttttcaaaatcaccctcacacatactctctacgatgtgaagtctgggacatctggagagaaagtgggcaaactcagcctggtggatttagctggcagtgaacgagcaacgaagacaggcgctgcaggggacaggctgaaggaagggagcaacattaacaagtccctcacaaccctcggtctggttatctcagctcttgcagatcagagtgctggcaaaaacaagaataaatttgttccatatcgtgactcagttctcacttggctgctcaaagacagcctcgggggtaacagcaagaccgccatggtggctactgtgagtcctgcagctgataactatgatgaaaccctctcaactctgcggtatgcagatcgagccaagcacattgtaaaccacgctgtggtgaatgaggaccctaatgcccgaattatccgggatctccgggaagaagttgagaaactccgggagcagctgaccaaagcagaggcaatgaaatctccagagctaaaggaccggctggaagaatctgagaagctaatccaggaaatgactgtgacctgggaggagaaattaaggaaaacggaggagattgcacaggaacgacagaaacagcttgagagtcttggaatatctcttcagtcttcgggaatcaaagttggggatgataaatgcttccttgtgaatctgaatgctgacccagctctgaatgagcttctggtgtactatttaaaggaacatacattgatagggtcagcaaattcccaagatatccaactgtgcggcatgggaattcttcctgaacactgtattatagacatcacgtcagaaggccaggttatgctgactcctcagaagaacaccagaacatttgtaaatgggtcatctgtctccagtccaatacagctacaccatggggacaggatattatggggaaacaatcatttcttcagactcaatttgcctaaaaagaaaaagaaagcagaacgagaggatgaggaccaggatccctccatgaagaacgagaatagttctgagcagctggatgtagacggagactcctccagcgaggtgtccagtgaagttaactttaattacgaatacgcacagatggaggtcaccatgaaggccctgggcagcaatgatccgatgcagtccatattaaacagcttagaacaacagcatgaagaagaaaaacgatctgcactggagcgccagaggcttatgtatgagcacgaattggagcagctccggagaaggctgtctcctgagaagcagaactgccggagcatggacaggttttctttccactcgcccagcgctcagcaacgcttaagacagtgggctgaggagagagaagcaacgttgaataacagcctgatgaggctgagggaacaaattgttaaggccaatctattggtgagagaagctaattacattgctgaggagctggataaaagaacagaatacaaagttaccctacagattccagcctccagcctggatgccaacaggaagcgaggctctcttcttagtgagcctgcaatccaggtgagaagaaaaggaaaaggaaagcagatttggtctttggaaaaactggacaacaggctgttggatatgagagacctttatcaggagtggaaagagtgtgaagaagataacccagtaatacgatcatacttcaaacgtgctgatccattctatgatgagcaggaaaatcacagtctcattggggtggccaatgtcttcctcgagtcacttttctatgatgtgaagttacaatacgctgttcccatcatcaaccagaaaggagaggtggcaggtcggctgcacgtggaggtgatgcgactcagtggtgatgttggggagaggatcgcaggaggcgatgaggtggcagaggtctcctttgagaaggagacccaggagaacaaactggtgtgcatggttaaaatcctgcaagctactgggttgccacagcatctgtcccactttgtgttctgcaaatacagcttctgggatcaacaggagccggtgattgtcgctcctgaagtggacacctcctcctcttccgtcagcaaggagccgcactgcatggttgtctttgatcattgcaatgagttttctgttaacatcaccgaagactttatcgagcatctttccgaaggagcattggcaattgaagtatatggacataaaataaacgatccccggaaaaaccccgccctgtgggatttgggaatcatccaagcaaagacacgtagtcttcgggacagatggagtgaagtgaccaggaaattggaattctgggttcaaatcttggaacagaatgagaatggtgaatactgccctgtagaagtgatttctgcaaaggatgtcccaacaggaggaatcttccagctccggcaggggcagtcccggagagttcaagtcgaagtgaagtcagtgcaggaatctgggactttaccactgatggaagaatgtatactgtctgttggcattggatgtgtcaaagttagaccgctcagagcccccagaacacatgagaccttccatgaggaagaggaagacatggacagctaccaggatcgagatttagagagacttcgtagaaaatggctaaatgcattaacaaaacgtcaggagtacttggatcaacaattgcaaaagcttgtcagtaaacgtgataaaacagaggatgatgctgaccgtgaagcgcagcttctggagatgcggttgaccctaactgaggagaggaacgcggtgatggtcccctctgctggcagtggtattccaggggccccagcagaatggaccccagtacctgggatggagacacacattcctgttatattcctggacttaaatgctgatgatttcagctctcaggataatcttgatgacccagaagctggtggatgggatgcgaccttgactggggaagaagaagaggagttctttgaattgcagattgtgaagcagcatgatggggaggtgaaagcagaagcctcctgggactccgcggtgcatggctgccctcagctcagcaggggcacgcccgtggacgagcggttgttcctgatcgtgcgcgtgacggtccagctcagccaccctgctgacatgcaactggtgttacgcaagagaatctgtgtcaatgttcacggccgccagggttttgcacagagtctcctaaaaaagatgtctcatcgaagttctattcctggctgtggagtgacttttgaaattgtctccaatattccagaggatgcccagggagtggaagaacgggaagcattagcaagaatggcagccaatgttgaaaacccagcttctgctgactcggaggcttatattgaaaagtacctcaggagcgtgctggctgtagaaaacctcctgactttagatcgtctgcgccaggaagttgcagtgaaggaacagttaacaggaaaaggaaagttgagcaggaggagtatcagttctccaaatgtgaacagattgtctggaagccgacaagatctcattccatcatacagtctaggcagcaacaagggccggtgggaaagtcagcaggatgtatcccaaaccacagtttccagaggaatagctcctgcccccgccctctctgtttctccccaaaataaccattctccagatccaggactcagtaaccttgcagcatcctacttgaatcctgtcaaatccttcgtgccgcaaatgccaaagctcctcaagtctctctttcccgtccgcgatgagaagaggggcaagcggccgtctcccctcgcacaccagcccgtgccccgcatcatggtgcagtcagccagcccggacatcagggtgaccaggatggaggaggctcagccggagatgggccctgacgtgctggtgcagacgatgggggccccggccttgaagatctgcgacaaacctgccaaagtgccttccccaccgcctgtcatagctgtcacagcggtcaccccggctccggaggcacaggacgggccccccagccccctgagtgaagcctctagcgggtacttctcccacagcgtctccaccgcgaccctgtcggacgccctgggccccggcctggacgctgcggccccgccggggtccatgcccaccgcccctgaggccgagcccgaggcgcccatcagccaccccccaccgcccacggccgtccccgccgaggagccccctggcccccagcagctcgtgagccccggtcgggagcgccccgacctcgaggccccggcgcccggctccccgttccgcgtccggagggtgcgggcctcggagttgcgctccttctcgcgcatgctggctggggaccccggctgctccccgggggccgaggggaatgcgccggccccgggcgccgggggacaggccctggcctctgattccgaggaagctgacgaggtcccggagtggctccgagagggcgagttcgtcaccgtgggcgcccacaaaacgggcgtggtgagatacgtggggcctgccgacttccaagagggcacgtgggtcggcgtggagctcgacctgccctcaggtaagaatgacggttccatcggcgggaagcagtacttcaggtgtaaccctggctacgggctgctggtcaggcccagccgggtccgcagggccacgggccctgtgcggcggcgcagcacaggactccggctgggtgcccccgaggcccgccggagcgccaccctctcgggctccgccaccaacctggcctcgctgacagctgccctggccaaggccgacaggagccacaagaaccctgagaaccggaaatcctgggccagctgagccgctgccttagggcgaacttttctgggggtgcccggccccttttgagccctgccagtgacagccctgaggagccaggagcccggtggccccttccccaggggcagggcgatgaatgctttttgcacgacacagggctggtgacctccctgggcctctggaagctttgtttcttctgtacccgggtaaagtgggggcctcaactgtgcctcctcaggtggatggaaggttctgggtgcccgcaggggctgggggatgctaggactgagaccctgggtggtgcagcgcctggtgatcttgctgtgtgcctgtgcctggggccttatgttgctctttctatcatttccattctggtggccccactaatgtcttaacctaaaccataattgtaaccagtgcctttcctccccactggagggcaagcccccccacccacccaggatgtcctggctcactccgcaagccccccagcctcccaccctggtcccagtttcccgcaaagtgcctctgggggaccccccagcctcccaccctggtcccaggttccacaagtgcctctggagggccctgggctctggcagatggtcctggtgccccagacgggggccgagggcctgagcccccccatccctcctctgccagggtttcttagcggtttctctgtggatgttttggcatctttagacacctggaaagtctcttatgtttgccgtttattcccttcacagaaggcttggaatgtatttatttatatttattttttcaaaatccgaaatcatttgcgagccgcaatcgtcgtctgcctgtgtgggggggcccagggcctgccttgcacgttgcagcctctctggccattgcagagctgctggcctcctgcccaggtggagggtcctggggacggcagaggataaagccccctcctcacatccctctattgcggatccacagtggccttactcttaacttggatgagagcaaaaacctgggagaatgatgtgcttctgtagtcggtgacaaaggaagaggcattgctactttatttggtgcacttttggtttctaggaaggtctttgggtcattttaacttctcggcaactcccagactctcagagtgtggggctggggcctggcggctgggctggtgcagggagtgtgctggttagtctccagaccctcacagcagccacgcccccaggcccaccgtgcatggtgtgggcgggacagccggaagcttccggggtggcctccacctcctggctggggcacttatgctcccagagcctttggtgccaggtttgtgggatgggggttagcgtctatgtgtggaaggccaccaatctagggacaggagtcctgggtcaagattcacacagccacccttggagctggtttctagttctcacatttagtcaacatctagaaagcgctgcggaaggctctggttctctagggacttgaaggcgccaacagagtagtctccatggtgggcctgtcccagccctggctgcgaggacaggttgtctttctctccccagttggcgagggacacgaaggctgcggccgggctggcagagggcccggcccctggggggaggcactcctccagggctctccctgtccttagccgattttgagggaaccctgtggcacctgtccctggatgaagagctgtcacctctgccttgccctttaactcaacccgcttcccagcacagcggctttctttttaaaacctgtttcactgagaagtttgtttttgggtccgctggtgtcactatggcctgggtgagaggccagcactgctgctgccctgaggggaaacgcctgggccgtgtagtggggacgctctgggaatggtggcggacgggcagcgtgggtgggacctggcacttcgtggtggctgagccatccacccagcagcggcctcctgtagcaccatcttgggaaagtcctgggggacgtgtgtgtcgtgctttttaccatcggtttgacttacagtggagtagaacgagccagagttcctgacttgagcaggtggatttgggcccaggccctgttcactcttgcttctcggtgcggactaatgtcagcttgtggctgggaaagagggatgtgcagtgacgtggtcaccaaggcagtgagccccgctgaccccgggccagcacttggcaggcaggaggtgcggtctccagagtggtgggccagggcgggctggcctccgtcttctatcttcttttcttgcctccctgaccagcagactcacctcccaagaacgcctgcccgcccacccgccttaggactcccgatgcgctcctggaaggccccaggagtggcaccttagtgtgggtcggcccgcagatggcacccaaggccgggaagggcagtaactgcacacgcggcgctgtcagagatgggggtgggggatgcttctgggggccctgcctccccattgtgtgcccagaacatccctggccccaccccgccacttccctcgggcccttatgaaggactgaggctccagggtgagaaggctcacttctgccccgggcactgcgtccagcagcagaggggacagggggcaggtgtgtgactgggttcctgggtacccaggcctgaccagagggagcgggagggcagaggtgaggagggggaagatgtttctgggcctaccaaggttcaacaagagaacggagctgggaatgtgactgctggagcctgagaggtggaggagttctgatcccccgttacttcctagcattttctcctcttgccttaaaagttccctgtatgtgaaacgggaagtcctgagagtgtgtgttggtggctgtgcgcacgcacacaagacgggagtcaccctgtgcttcctgcccaagatactgacccattgaacccccaaagcatctttctctccacaaagtccgtggtgccttcctggtgggctgcagacactaatggtgttggggggtcttggaacagcttctctatgtgtggattcgtgtaaatgcgaagagttcacatataaagaagtgactttgattctgtgattatattgatttggtacacagtaaatgggagtttaaaaaatccaaagactctaatgacttgtaaagactctaatgatttgtatcatgtaatgaactaaaccacctgtaattttgtaccgtatgtgtctttccatcaaatgaccaacagcttctcaataaaaccagaccatttctcacctgc

SEQ ID NO: 146661 - DNA, 2630 bp, Homo sapiens
  Payload ID: 9013
  Gene Symbol: KIF13B
  Gene Name: kinesin family member 13B
  ENST ID: ENST00000522355
  CDS Start-End: 91-276
gcccccggccccctcccgccgggtcaaccccgaagagtcgccggtggccgcggcagacggaagccgaacgagttcctcggcggctgcaggatgggggactccaaagtgaaagtggcggtgcggatacgacccatgaaccggcgagagactgacttgcataccaaatgtgtggtggatgtggatgcaaacaaggttattcttaatcctgtaaatacgaatctttccaaaggagatgcccggctctggaaaatcttataccatgatgggcacagctgaccaacctggattaatcccaagactttgcagtggactctttgaacgaactcagaaagaggaaaatgaagaacagagttttaaagtagaagtgtcctacatggaaatttataatgaaaaagttcgagaccttcttgatcccaaaggaagccgtcagacgttgaaagtcagagagcatagtgtgttgggaccttatgtcgacggactttctaaactggctgtcacaagctacaaggatattgagtcgttgatgtctgagggtaacaaatctcgcacagttgctgcaaccaacatgaacgaggagagtagccgatcccatgcagttttcaaaatcaccctcacacatactctctacgatgtgaagtctgggacatctggagagaaagtgggcaaactcagcctggtggatttagctggcagtgaacgagcaacgaagacaggcgctgcaggggacaggctgaaggaagggagcaacattaacaagtccctcacaaccctcggtctggttatctcagctcttgcagatcagagtgctggcaaaaacaagaataaatttgttccatatcgtgactcagttctcacttggctgctcaaagacagcctcgggggtaacagcaagaccgccatggtggctactgtgagtcctgcagctgataactatgatgaaaccctctcaactctgcggtatgcagatcgagccaagcacattgtaaaccacgctgtggtgaatgaggaccctaatgcccgaattatccgggatctccgggaagaagttgagaaactccgggagcagctgaccaaagcagaggcaatgaaatctccagagctaaaggaccggctggaagaatctgagaagctaatccaggaaatgactgtgacctgggaggagaaattaaggaaaacggaggagattgcacaggaacgacagaaacagcttgagagtcttggaatatctcttcagtcttcgggaatcaaagttggggatgataaatgcttccttgtgaatctgaatgctgacccagctctgaatgagcttctggtgtactatttaaaggaacatacattgatagggtcagcaaattcccaagatatccaactgtgcggcatgggaattcttcctgaacactgtattatagacatcacgtcagaaggccaggttatgctgactcctcagaagaacaccagaacatttgtaaatgggtcatctgtctccagtccaatacagctacaccatggggacaggatattatggggaaacaatcatttcttcagactcaatttgcctaaaaagaaaaagaaagcagaacgagaggatgaggaccaggatccctccatgaagaacgagaatagttctgagcagctggatgtagacggagactcctccagcgaggtgtccagtgaagttaactttaattacgaatacgcacagatggaggtcaccatgaaggccctgggcagcaatgatccgatgcagtccatattaaacagcttagaacaacagcatgaagaagaaaaacgatctgcactggagcgccagaggcttatgtatgagcacgaattggagcagctccggagaaggctgtctcctgagaagcagaactgccggagcatggacaggttttctttccactcgcccagcgctcagcaacgcttaagacagtgggctgaggagagagaagcaacgttgaataacagcctgatgaggctgagggaacaaattgttaaggccaatctattggtgagagaagctaattacattgctgaggagctggataaaagaacagaatacaaagttaccctacagattccagcctccagcctggatgccaacaggaaggtgaggttgccgttccttgaaaaaaacaaagatctcattggataagatcgcctgatatttcctggtgttatttaagcttcagatccctgtctgtgcctgccccaagtccagatcctttgtcctccatgcttttgggtagaattgacttccttttccattctctacctttgagtgtatgtatattttatctgctaggggaatatactctgcatctcacctggccctgacagttcatttcactcaactttcttccttcaaatctgtttaaattctttcttagaagtcttttctgattaatcttccccgaatgtctttttttccttccttatgctaccactctacaaccccttctccacaagttaggtgttcattttgcttatgttattttctacttggaatagcttgctctgtaaaactgctcattagttgtgtcatggtgtcatgtatatattcaggatcatactttttttggtataataaatttaataaaatgtagggggaaagtcccatcacaatcttc

SEQ ID NO: 146662 - DNA, 1267 bp, Homo sapiens
  Payload ID: 9013
  Gene Symbol: KIF13B
  Gene Name: kinesin family member 13B
  ENST ID: ENST00000523130
  CDS Start-End: 1-1257
ttgtctggaagccgacaagatctcattccatcatacagtctaggcagcaacaagggccggtgggaaagtcagcaggatgtatcccaaaccacagtttccagaggaatagctcctgcccccgccctctctgtttctccccaaaataaccattctccagatccaggactcagtaaccttgcagcatcctacttgaatcctgtcaaatccttcgtgccgcaaatgccaaagctcctcaagtctctctttcccgtccgcgatgagaagaggggcaagcggccgtctcccctcgcacaccaggctcagccggagatgggccctgacgtgctggtgcagacgatgggggccccggccttgaagatctgcgacaaacctgccaaagtgccttccccaccgcctgtcatagctgtcacagcggtcaccccggctccggaggcacaggacgggccccccagccccctgagtgaagcctctagcgggtacttctcccacagcgtctccaccgcgaccctgtcggacgccctgggccccggcctggacgctgcggccccgccggggtccatgcccaccgcccctgaggccgagcccgaggcgcccatcagccaccccccaccgcccacggccgtccccgccgaggagccccctggcccccagcagctcgtgagccccggtcgggagcgccccgacctcgaggccccggcgcccggctccccgttccgcgtccggagggtgcgggcctcggagttgcgctccttctcgcgcatgctggctggggaccccggctgctccccgggggccgaggggaatgcgccggccccgggcgccgggggacaggccctggcctctgattccgaggaagctgacgaggtcccggagtggctccgagagggcgagttcgtcaccgtgggcgcccacaaaacgggcgtggtgagatacgtggggcctgccgacttccaagagggcacgtgggtcggcgtggagctcgacctgccctcaggtaagaatgacggttccatcggcgggaagcagtacttcaggtgtaaccctggctacgggctgctggtcaggcccagccgggtccgcagggccacgggccctgtgcggcggcgcagcacaggactccggctgggtgcccccgaggcccgccggagcgccaccctctcgggctccgccaccaacctggcctcgctgacagctgccctggccaaggccgacaggagccacaagaaccctgagaaccggaaatcctgggccagctgagccgctgcct

SEQ ID NO: 146663 - DNA, 2765 bp, Homo sapiens
  Payload ID: 9013
  Gene Symbol: KIF13B
  Gene Name: kinesin family member 13B
  ENST ID: ENST00000521515
  CDS Start-End: 64-2295
ccccgaagagtcgccggtggccgcggcagacggaagccgaacgagttcctcggcggctgcaggatgggggactccaaagtgaaagtggcggtgcggatacgacccatgaaccggcgagagactgacttgcataccaaatgtgtggtggatgtggatgcaaacaaggttattcttaatcctgtaaatacgaatctttccaaaggagatgcccggggccagccgaaggtgtttgcttatgatcattgtttctggtctatggatgaatctgtcaaagaaaagtatgcaggtcaagatattgttttcaagtgccttggagagaatatcctgcagaatgcttttgatggctacaatgcatgtatctttgcctatggacagactggctctggaaaatcttataccatgatgggcacagctgaccaacctggattaatcccaagactttgcagtggactctttgaacgaactcagaaagaggaaaatgaagaacagagttttaaagtagaagtgtcctacatggaaatttataatgaaaaagttcgagaccttcttgatcccaaaggaagccgtcagacgttgaaagtcagagagcatagtgtgttgggaccttatgtcgacggactttctaaactggctgtcacaagctacaaggatattgagtcgttgatgtctgagggtaacaaatctcgcacagttgctgcaaccaacatgaacgaggagagtagccgatcccatgcagttttcaaaatcaccctcacacatactctctacgatgtgaagtctgggacatctggagagaaagtgggcaaactcagcctggtggatttagctggcagtgaacgagcaacgaagacaggcgctgcaggggacaggctgaaggaagggagcaacattaacaagtccctcacaaccctcggtctggttatctcagctcttgcagatcagagtgctggcaaaaacaagaataaatttgttccatatcgtgactcagttctcacttggctgctcaaagacagcctcgggggtaacagcaagaccgccatggtggctactgtgagtcctgcagctgataactatgatgaaaccctctcaactctgcggtatgcagatcgagccaagcacattgtaaaccacgctgtggtgaatgaggaccctaatgcccgaattatccgggatctccgggaagaagttgagaaactccgggagcagctgaccaaagcagaggcaatgaaatctccagagctaaaggaccggctggaagaatctgagaagctaatccaggaaatgactgtgacctgggaggagaaattaaggaaaacggaggagattgcacaggaacgacagaaacagcttgagagtcttggaatatctcttcagtcttcgggaatcaaagttggggatgataaatgcttccttgtgaatctgaatgctgacccagctctgaatgagcttctggtgtactatttaaaggaacatacattgatagggtcagcaaattcccaagatatccaactgtgcggcatgggaattcttcctgaacactgtattatagacatcacgtcagaaggccaggttatgctgactcctcagaagaacaccagaacatttgtaaatgggtcatctgtctccagtccaatacagctacaccatggggacaggatattatggggaaacaatcatttcttcagactcaatttgcctaaaaagaaaaagaaagcagaacgagaggatgaggaccaggatccctccatgaagaacgagaatagttctgagcagctggatgtagacggagactcctccagcgaggtgtccagtgaagttaactttaattacgaatacgcacagatggaggtcaccatgaaggccctgggcagcaatgatccgatgcagtccatattaaacagcttagaacaacagcatgaagaagaaaaacgatctgcactggagcgccagaggcttatgtatgagcacgaattggagcagctccggagaaggctgtctcctgagaagcagaactgccggagcatggacaggttttctttccactcgcccagcgctcagcaacgcttaagacagtgggctgaggagagagaagcaacgttgaataacagcctgatgaggctgagggaacaaattgttaaggccaatctattggtgagagaagctaattacattgctgaggagctggataaaagaacagaatacaaagttaccctacagattccagcctccagcctggatgccaacaggaaggtgaggttgccgttccttgaaaaaaacaaagatctcattggataagatcgcctgatatttcctggtgttatttaagcttcagatccctgtctgtgcctgccccaagtccagatcctttgtcctccatgcttttgggtagaattgacttccttttccattctctacctttgagtgtatgtatattttatctgctaggggaatatactctgcatctcacctggccctgacagttcatttcactcaactttcttccttcaaatctgtttaaattctttcttagaagtcttttctgattaatcttccccgaatgtctttttttccttccttatgctaccactctacaaccccttctccacaagttaggtgttcattttgcttatgttattttctacttggaatagcttgctctgtaaaactgctcattagttgtgtcatggtgtcatgtatatattcaggatcatactttttttggtataataaatttaataaaatgtagggggaaagtcccatcacaa

SEQ ID NO: 146664 - DNA, 1750 bp, Homo sapiens
  Payload ID: 9013
  Gene Symbol: KIF13B
  Gene Name: kinesin family member 13B
  ENST ID: ENST00000523968
  CDS Start-End: 29-190
gccgaacgagttcctcggcggctgcaggatgggggactccaaagtgaaagtggcggtgcggatacgacccatgaaccggcgagatttgactgtaaggagccagctgatacaatatggtcagattccattaagcagtggttttaagaaactctcatggacctctgggcctgaggaagtgaagagagactgacttgcataccaaatgtgtggtggatgtggatgcaaacaaggttattcttaatcctgtaaatacgaatctttccaaaggagatgcccggggccagccgaaggtgtttgcttatgatcattgtttctggtctatggatgaatctgtcaaagaaaagtatgcaggtcaagatattgttttcaagtgccttggagagaatatcctgcagaatgcttttgatggctacaatgcatgtatctttgcctatggacagactggctctggaaaatcttataccatgatgggcacagctgaccaacctggattaatcccaagactttgcagtggactctttgaacgaactcagaaagaggaaaatgaagaacagagttttaaagtagaagtgtcctacatggaaatttataatgaaaaagttcgagaccttcttgatcccaaaggaagccgtcagacgttgaaagtcagagagcatagtgtgttgggaccttatgtcgacggactttctaaactggctgtcacaagctacaaggatattgagtcgttgatgtctgagggtaacaaatctcgcacagttgctgcaaccaacatgaacgaggagagtagccgatcccatgcagttttcaaaatcaccctcacacatactctctacgatgtgaagtctgggacatctggagagaaagtgggcaaactcagcctggtggatttagctggcagtgaacgagcaacgaagacaggcgctgcaggggacaggctgaaggaagggagcaacattaacaagtccctcacaaccctcggtctggttatctcagctcttgcagatcagagtgctggcaaaaacaagaataaatttgttccatatcgtgactcagttctcacttggctgctcaaagacagcctcgggggtaacagcaagaccgccatggtggctactgtgagtcctgcagctgataactatgatgaaaccctctcaactctgcggtatgcagatcgagccaagcacattgtaaaccacgctgtggtgaatgaggaccctaatgcccgaattatccgggatctccgggaagaagttgagaaactccgggagcagctgaccaaagcagaggcaatgaaatctccagagctaaaggaccggctggaagaatctgagaagctaatccaggaaatgactgtgacctgggaggagaaattaaggaaaacggaggagattgcacaggaacgacagaaacagcttgagagtcttggaatatctcttcagtcttcgggaatcaaagttggggatgataaatgcttccttgtgaatctgaatgctgacccagctctgaatgagcttctggtgtactatttaaaggaacatacattgatagggtcagcaaattcccaagatatccaactgtgcggcatgggaattcttcctgaacactgtattatagacatcacgtcagaaggccaggttatgctgactcctcagaagaacaccagaacatttgtaaatgggtcatctgtctccagtccaatacagctacaccatggggacaggatattatggggaaacaatcatttcttcag

SEQ ID NO: 146665 - DNA, 7274 bp, Homo sapiens
  Payload ID: 9014
  Gene Symbol: KIF14
  Gene Name: kinesin family member 14
  Uniprot ID: Q15058
  ENST ID: ENST00000367350
  CDS Start-End: 440-5386
ctggggagccggcgctggaggtggtgagtggcgtggggactgtgtcgagggggtccccaaggtgccggaccctgcggaggggcgaagtttcggcactggggagggcgtgcggacgctttccctacaggcgaccactgctctgcgggcgggtggtcttagctccagtcccccattcagttcctcagcattccaggtcggcggcgaaggggtccccgaacgaagggcgcaaggcagcgtctctgctgggaccgggaagccggacttcagggcctctcggcccgtgggcttctccccgagtctccccgagtcggttggcattaagagtttagcagatactttcagaaatggatacataagaaatggctggaaatcaaatgaatgtccaaagaagagcttagggtcttagtaacattcttttttaaaataactgtctgccaaaatgtcattacacagtactcataatagaaataacagcggtgatattcttgatattccttcttcccaaaatagttcatcactgaatgccctcacccacagtagccgacttaagctgcatttgaagtcggatatgtcagaatgtgaaaatgatgatccattattgagatctgcaggtaaagtcagagacataaatagaacttatgttatttctgccagtagaaaaacagcagacatgccccttacccctaatcctgtaggtagattggcacttcagaggagaactacaaggaacaaagaatcatctttgcttgttagtgagttggaagacacaactgaaaaaacagcagaaacacgtcttacattacaacgtcgtgctaaaacagattctgcagaaaagtggaaaacagctgaaatagattctgtcaaaatgacactgaatgtgggaggtgaaacagaaaataatggtgtttctaaggaaagtagaacaaatgtaaggattgtaaataatgctaaaaactcttttgttgcctcttctgtacctttagatgaagatccacaggtcattgaaatgatggctgataagaaatacaaagaaacattttctgcccccagtagagcaaatgaaaatgttgcacttaagtactcaagtaatagaccacccattgcttccctgagtcagactgaagttgttagatcaggacacttgacaacgaaacctactcagagcaagttggatatcaaagtgttgggaacaggaaacttgtatcatagaagtattgggaaggaaattgcaaaaacttcaaataaatttgggagcttagaaaaaagaacacctacaaaatgtacaacagaacacaaactgacaacaaagtgcagcctgcctcagcttaagagcccagctccatcaatactgaagaatagaatgtctaaccttcaagttaaacaaagaccaaaaagttcctttcttgcaaataaacaggaaagatccgcagaaaatacaattcttcccgaagaagaaactgtagttcagaacacctctgcaggaaaagaccccttaaaagtagagaatagtcaagtgacagtggcagtacgcgtaagacctttcaccaagagagagaagattgaaaaagcatcccaggtagtcttcatgagtgggaaagaaataactgtggaacaccctgacacgaaacaagtttataattttatttatgatgtttcattctggtcttttgatgaatgtcatcctcactacgctagccagacaactgtctatgagaagctagcagcaccactcctagaaagagccttcgaaggcttcaatacctgtctttttgcttatggtcagactggctctggaaaatcatatacgatgatgggatttagtgaagaaccaggaataattccaagattttgtgaagatcttttttctcaagtagccagaaaacaaacccaagaggtcagctatcacattgaaatgagcttctttgaagtatataatgaaaaaattcacgaccttctggtttgtaaagatgaaaatgggcagagaaagcaaccactgagagtgagggaacatcctgtttatggaccatatgttgaagcactgtcaatgaacattgtcagttcttacgctgatatccagagttggctagaattgggaaataaacaaagagctactgctgctactggtatgaatgataaaagttcccgatctcattcagttttcaccctggtgatgacccagaccaagacagaatttgtggaaggggaagaacacgatcacagaataacaagtcgaattaacctaatagatctggcaggcagtgagcgctgctctacggctcacactaatggagatcgactaaaggaaggtgtgagtattaataagtccttgctaactttgggaaaagttatatctgcactttcggaacaagcaaaccaaaggagtgtttttattccttatcgtgaatctgttcttacatggctgttaaaagaaagtctgggtggaaattcaaaaactgcaatgattgctacgattagtcccgctgccagcaacatagaagaaacattaagcacacttagatatgctaaccaagcccgtttaatagtcaacattgctaaagtaaatgaagatatgaacgctaagttaattagagaattgaaggcagaaattgcaaagctaaaagctgctcagagaaacagtcggaatattgaccctgaacgatacaggctctgtcggcaagaaataacatccttaagaatgaaactgcatcaacaggagagagacatggcagaaatgcaaagagtgtggaaagaaaagtttgaacaagctgaaaaaagaaaacttcaagaaacaaaagagttacagaaagcaggaattatgtttcaaatggacaatcatttaccaaaccttgttaatctgaatgaagatccacaactatctgagatgctgctatatatgataaaagaaggaacaactacagttggaaagtataaaccaaactcaagccatgatattcagttatctggggtgctgattgctgatgatcattgtactatcaaaaattttggtgggacagtgagtattatcccagttggggaagcaaagacatatgtaaatggaaaacatattttggaaatcacagtattacgtcatggtgatcgagtgattcttggtggagatcattattttagatttaatcatccagtagaagtccagaaaggaaaaaggccatctggaagagatactcctataagtgagggtccaaaagactttgaatttgcaaaaaatgagttgctcatggcacagagatcacaacttgaagcagaaataaaagaggctcagttgaaggcaaaggaagaaatgatgcaaggaatccagattgcaaaagaaatggctcagcaagagctttcttctcaaaaagctgcatatgaaagcaaaataaaagcactggaagcagaactgagagaagagtctcaaaggaaaaaaatgcaggaaataaataaccagaaggctaatcacaaaattgaggaattagaaaaggcaaagcagcatcttgaacaggaaatatatgtcaacaaaaagcgattagaaatggaaacattggctacaaaacaggctttagaagaccatagcatccgccatgcaagaattctggaagctttagaaactgaaaagcaaaaaattgctaaagaagtacaaattctacagcagaatcggaataatagggataaaacttttacagtgcagacaacttggagctctatgaaactctcaatgatgattcaggaagccaatgctatcagcagcaaattgaaaacatactatgtttttggcagacatgatatatcagataaaagtagttctgacacttctattcgggttcgtaacctgaaactaggaatctcaacattctggagtctggaaaagtttgaatctaaacttgcagcaatgaaagaactttatgagagtaatggtagtaacaggggtgaagatgccttttgtgatcctgaagatgaatgggaacccgacattacagatgcaccagtttcttcactttctagaaggaggagtaggagtttgatgaagaacagaagaatttctggttgtttacatgacatacaagtccatccaattaagaatttgcattcttcacattcatcaggtttaatggacaaatcaagcactatttactcaaattcagcagagtcctttcttcctggaatttgcaaagaattgattggttcttcgttagatttttttggacagagttatgatgaagaaagaactatagcagacagcctaattaatagttttcttaaaatttataatgggctatttgccatttccaaggctcatgaagaacaagatgaagaaagtcaagataacttgttttcttctgatcgagcaatccagtcacttactattcagactgcatgtgcttttgagcagctagtagtgctaatgaaacactggctgagtgatttactgccttgtaccaacatagcaagacttgaggatgagttgagacaagaagttaaaaaactgggaggctacttacagttatttttgcagggatgctgtttggatatttcatcaatgataaaagaggctcaaaagaatgcaatccaaattgtacaacaagctgtaaagtatgtggggcagttagcagttctgaaagggagcaagctacattttctagaaaacggtaacaataaagctgccagtgtccaggaggaattcatggatgctgtttgtgatggtgtaggcttaggaatgaagattttattagattctggactggaaaaagcaaaagaacttcagcatgaactctttaggcagtgtacaaaaaatgaggttaccaaagaaatgaaaactaatgccatgggattgattagatctcttgaaaacatctttgctgaatcgaaaattaaaagtttcagaaggcaagtacaagaagaaaactttgaataccaagatttcaagaggatggttaatcgtgctccagaattcttaaagttaaaacattgcttagagaaagctattgaaattattatttctgcactgaaaggatgccatagtgatataaatcttctccagacttgtgttgaaagtattcgcaacttggccagtgatttttacagtgacttcagtgtgccttctacttctgttggcagctatgagagtagagtaactcacattgtccaccaggaactagaatctctagctaagtctctcctcttttgttttgaatctgaagaaagccctgatttgttgaaaccctgggaaacttataatcaaaataccaaagaagaacaccaacaatctaaatcaagcgggattgacggcagtaagaataaaggtgtaccaaagcgtgtctatgagctccatggctcatccccagcagtgagctcagaggaatgcacacccagtaggattcagtgggtgtgaatactgatgtgtaggcacttttatgaccacccatgaaagaaaaagaacacttgctcggtaattttctttatgcaggagagtttaagagaaatcagcacagatatttcaaaaaagtccatgtctttttatctttaaaatatctatttatcaaaggccagacacagtggctcacgcctgtaatcccagcactttgggaggcgggcagatcacaaggtcaggagtttgagaccggcctggccaacatggcgaaaccccgtctctactaaaaatacaaaaatttgctgggcatggtggcgcgtgcctgtaatcccagctactaggggggctgaggcaggaggatcgcttgaacctgagaggcagaggttgcagtgagccaagatcatgccactttactccagtctgagcaacagaacgagacttagtcaaaataaataaataaataaataaataaataaataaataaataaataaaatatatttttatctttaaagtgtttaacattggtatactgtctgtagttggttcattagtcgtttataaagggttattttctcatgagtggaaacctgaacaatcagttacctttgtgcctatgccttctctctcctcagacagctgggatgtttatggtgaaatggcctgtacaagtttaactaagacaacttaacttgcattgttaatcaaaaattcttttctcaaagggttaactggttgccattttgaatagtatgttcaagggtgtagcttcctgtttctttccaaattataagtagctacctaaatatagtataattatatattaataatatggcttgctggcacagtagtttaccctgttatctgtgtttcataatgggggctgtatgaatattatttaaaactaataaaatgttgccagaattatactaaactgttggatgagattaggagatcagaggctggaccttctcttgataatgcttgttttgttaaaggtataatgaaataatttgtatatgatttgatgaagattaaagacccttattttccacagctttaaaaaaaaacctttatttatgatcaagtaataaagataatattctacttgtgggatcttacattacggaaatagtttgacgtttttgacctcaagagtatgtataatttgaagagatactttgtaactatgcttgggtgatattgagcagttcctaaagaataattcatttaaaaaaaaagaagaaaaaaaaagaagaattcatttaaataacctgatcctttcatttgcccttttcgaatttacagatactacttgtacatttggcataactagttgaaattggccattcgtaccatgaataaatctgatagtttccttgttaggaagagattgtaagtaaatacagtcattgcagtcagaacagtattagtgaaccttgtgtggtgttttcaagctctttaaaatggtacaatgtagcacatttgctttcatttctttttttatttttggcatttgaccttgtattctttctgaagctctatatgtgtttttattagtcaataatctggcaagtagcactttgcctgtgcagtttgctggagtgtagatgtacatatgaggatttcccgggaggtgcacttctttgaagaacttcctaaagtacctgtatagtagttttcatcttaatattcagtatttaatcttcagtttgtgctttgtaaactcatgacttaattggtcagaaactttttagtgtctttataaaattttgtatacatatttatactaaacacattgtgatactgtatttgaatgaatggtgaaaaaatatttgctattggaattatgtgcactgacaagaaatgttataaagagaatgcctttaataaatcttttcagcattagaa

SEQ ID NO: 146666 - DNA, 6838 bp, Homo sapiens
  Payload ID: 9014
  Gene Symbol: KIF14
  Gene Name: kinesin family member 14
  Uniprot ID: Q15058
  ENST ID: ENST00000614960
  CDS Start-End: 1-4947
atgtcattacacagtactcataatagaaataacagcggtgatattcttgatattccttcttcccaaaatagttcatcactgaatgccctcacccacagtagccgacttaagctgcatttgaagtcggatatgtcagaatgtgaaaatgatgatccattattgagatctgcaggtaaagtcagagacataaatagaacttatgttatttctgccagtagaaaaacagcagacatgccccttacccctaatcctgtaggtagattggcacttcagaggagaactacaaggaacaaagaatcatctttgcttgttagtgagttggaagacacaactgaaaaaacagcagaaacacgtcttacattacaacgtcgtgctaaaacagattctgcagaaaagtggaaaacagctgaaatagattctgtcaaaatgacactgaatgtgggaggtgaaacagaaaataatggtgtttctaaggaaagtagaacaaatgtaaggattgtaaataatgctaaaaactcttttgttgcctcttctgtacctttagatgaagatccacaggtcattgaaatgatggctgataagaaatacaaagaaacattttctgcccccagtagagcaaatgaaaatgttgcacttaagtactcaagtaatagaccacccattgcttccctgagtcagactgaagttgttagatcaggacacttgacaacgaaacctactcagagcaagttggatatcaaagtgttgggaacaggaaacttgtatcatagaagtattgggaaggaaattgcaaaaacttcaaataaatttgggagcttagaaaaaagaacacctacaaaatgtacaacagaacacaaactgacaacaaagtgcagcctgcctcagcttaagagcccagctccatcaatactgaagaatagaatgtctaaccttcaagttaaacaaagaccaaaaagttcctttcttgcaaataaacaggaaagatccgcagaaaatacaattcttcccgaagaagaaactgtagttcagaacacctctgcaggaaaagaccccttaaaagtagagaatagtcaagtgacagtggcagtacgcgtaagacctttcaccaagagagagaagattgaaaaagcatcccaggtagtcttcatgagtgggaaagaaataactgtggaacaccctgacacgaaacaagtttataattttatttatgatgtttcattctggtcttttgatgaatgtcatcctcactacgctagccagacaactgtctatgagaagctagcagcaccactcctagaaagagccttcgaaggcttcaatacctgtctttttgcttatggtcagactggctctggaaaatcatatacgatgatgggatttagtgaagaaccaggaataattccaagattttgtgaagatcttttttctcaagtagccagaaaacaaacccaagaggtcagctatcacattgaaatgagcttctttgaagtatataatgaaaaaattcacgaccttctggtttgtaaagatgaaaatgggcagagaaagcaaccactgagagtgagggaacatcctgtttatggaccatatgttgaagcactgtcaatgaacattgtcagttcttacgctgatatccagagttggctagaattgggaaataaacaaagagctactgctgctactggtatgaatgataaaagttcccgatctcattcagttttcaccctggtgatgacccagaccaagacagaatttgtggaaggggaagaacacgatcacagaataacaagtcgaattaacctaatagatctggcaggcagtgagcgctgctctacggctcacactaatggagatcgactaaaggaaggtgtgagtattaataagtccttgctaactttgggaaaagttatatctgcactttcggaacaagcaaaccaaaggagtgtttttattccttatcgtgaatctgttcttacatggctgttaaaagaaagtctgggtggaaattcaaaaactgcaatgattgctacgattagtcccgctgccagcaacatagaagaaacattaagcacacttagatatgctaaccaagcccgtttaatagtcaacattgctaaagtaaatgaagatatgaacgctaagttaattagagaattgaaggcagaaattgcaaagctaaaagctgctcagagaaacagtcggaatattgaccctgaacgatacaggctctgtcggcaagaaataacatccttaagaatgaaactgcatcaacaggagagagacatggcagaaatgcaaagagtgtggaaagaaaagtttgaacaagctgaaaaaagaaaacttcaagaaacaaaagagttacagaaagcaggaattatgtttcaaatggacaatcatttaccaaaccttgttaatctgaatgaagatccacaactatctgagatgctgctatatatgataaaagaaggaacaactacagttggaaagtataaaccaaactcaagccatgatattcagttatctggggtgctgattgctgatgatcattgtactatcaaaaattttggtgggacagtgagtattatcccagttggggaagcaaagacatatgtaaatggaaaacatattttggaaatcacagtattacgtcatggtgatcgagtgattcttggtggagatcattattttagatttaatcatccagtagaagtccagaaaggaaaaaggccatctggaagagatactcctataagtgagggtccaaaagactttgaatttgcaaaaaatgagttgctcatggcacagagatcacaacttgaagcagaaataaaagaggctcagttgaaggcaaaggaagaaatgatgcaaggaatccagattgcaaaagaaatggctcagcaagagctttcttctcaaaaagctgcatatgaaagcaaaataaaagcactggaagcagaactgagagaagagtctcaaaggaaaaaaatgcaggaaataaataaccagaaggctaatcacaaaattgaggaattagaaaaggcaaagcagcatcttgaacaggaaatatatgtcaacaaaaagcgattagaaatggaaacattggctacaaaacaggctttagaagaccatagcatccgccatgcaagaattctggaagctttagaaactgaaaagcaaaaaattgctaaagaagtacaaattctacagcagaatcggaataatagggataaaacttttacagtgcagacaacttggagctctatgaaactctcaatgatgattcaggaagccaatgctatcagcagcaaattgaaaacatactatgtttttggcagacatgatatatcagataaaagtagttctgacacttctattcgggttcgtaacctgaaactaggaatctcaacattctggagtctggaaaagtttgaatctaaacttgcagcaatgaaagaactttatgagagtaatggtagtaacaggggtgaagatgccttttgtgatcctgaagatgaatgggaacccgacattacagatgcaccagtttcttcactttctagaaggaggagtaggagtttgatgaagaacagaagaatttctggttgtttacatgacatacaagtccatccaattaagaatttgcattcttcacattcatcaggtttaatggacaaatcaagcactatttactcaaattcagcagagtcctttcttcctggaatttgcaaagaattgattggttcttcgttagatttttttggacagagttatgatgaagaaagaactatagcagacagcctaattaatagttttcttaaaatttataatgggctatttgccatttccaaggctcatgaagaacaagatgaagaaagtcaagataacttgttttcttctgatcgagcaatccagtcacttactattcagactgcatgtgcttttgagcagctagtagtgctaatgaaacactggctgagtgatttactgccttgtaccaacatagcaagacttgaggatgagttgagacaagaagttaaaaaactgggaggctacttacagttatttttgcagggatgctgtttggatatttcatcaatgataaaagaggctcaaaagaatgcaatccaaattgtacaacaagctgtaaagtatgtggggcagttagcagttctgaaagggagcaagctacattttctagaaaacggtaacaataaagctgccagtgtccaggaggaattcatggatgctgtttgtgatggtgtaggcttaggaatgaagattttattagattctggactggaaaaagcaaaagaacttcagcatgaactctttaggcagtgtacaaaaaatgaggttaccaaagaaatgaaaactaatgccatgggattgattagatctcttgaaaacatctttgctgaatcgaaaattaaaagtttcagaaggcaagtacaagaagaaaactttgaataccaagatttcaagaggatggttaatcgtgctccagaattcttaaagttaaaacattgcttagagaaagctattgaaattattatttctgcactgaaaggatgccatagtgatataaatcttctccagacttgtgttgaaagtattcgcaacttggccagtgatttttacagtgacttcagtgtgccttctacttctgttggcagctatgagagtagagtaactcacattgtccaccaggaactagaatctctagctaagtctctcctcttttgttttgaatctgaagaaagccctgatttgttgaaaccctgggaaacttataatcaaaataccaaagaagaacaccaacaatctaaatcaagcgggattgacggcagtaagaataaaggtgtaccaaagcgtgtctatgagctccatggctcatccccagcagtgagctcagaggaatgcacacccagtaggattcagtgggtgtgaatactgatgtgtaggcacttttatgaccacccatgaaagaaaaagaacacttgctcggtaattttctttatgcaggagagtttaagagaaatcagcacagatatttcaaaaaagtccatgtctttttatctttaaaatatctatttatcaaaggccagacacagtggctcacgcctgtaatcccagcactttgggaggcgggcagatcacaaggtcaggagtttgagaccggcctggccaacatggcgaaaccccgtctctactaaaaatacaaaaatttgctgggcatggtggcgcgtgcctgtaatcccagctactaggggggctgaggcaggaggatcgcttgaacctgagaggcagaggttgcagtgagccaagatcatgccactttactccagtctgagcaacagaacgagacttagtcaaaataaataaataaataaataaataaataaataaataaataaataaaatatatttttatctttaaagtgtttaacattggtatactgtctgtagttggttcattagtcgtttataaagggttattttctcatgagtggaaacctgaacaatcagttacctttgtgcctatgccttctctctcctcagacagctgggatgtttatggtgaaatggcctgtacaagtttaactaagacaacttaacttgcattgttaatcaaaaattcttttctcaaagggttaactggttgccattttgaatagtatgttcaagggtgtagcttcctgtttctttccaaattataagtagctacctaaatatagtataattatatattaataatatggcttgctggcacagtagtttaccctgttatctgtgtttcataatgggggctgtatgaatattatttaaaactaataaaatgttgccagaattatactaaactgttggatgagattaggagatcagaggctggaccttctcttgataatgcttgttttgttaaaggtataatgaaataatttgtatatgatttgatgaagattaaagacccttattttccacagctttaaaaaaaaacctttatttatgatcaagtaataaagataatattctacttgtgggatcttacattacggaaatagtttgacgtttttgacctcaagagtatgtataatttgaagagatactttgtaactatgcttgggtgatattgagcagttcctaaagaataattcatttaaaaaaaaagaagaaaaaaaaagaagaattcatttaaataacctgatcctttcatttgcccttttcgaatttacagatactacttgtacatttggcataactagttgaaattggccattcgtaccatgaataaatctgatagtttccttgttaggaagagattgtaagtaaatacagtcattgcagtcagaacagtattagtgaaccttgtgtggtgttttcaagctctttaaaatggtacaatgtagcacatttgctttcatttctttttttatttttggcatttgaccttgtattctttctgaagctctatatgtgtttttattagtcaataatctggcaagtagcactttgcctgtgcagtttgctggagtgtagatgtacatatgaggatttcccgggaggtgcacttctttgaagaacttcctaaagtacctgtatagtagttttcatcttaatattcagtatttaatcttcagtttgtgctttgtaaactcatgacttaattggtcagaaactttttagtgtctttataaaattttgtatacatatttatactaaacacattgtgatactgtatttgaatgaatggtgaaaaaatatttgctattggaattatgtgcactgacaagaaatgttataaagagaatgcctttaataaatcttttcagcattagaattg

SEQ ID NO: 146667 - DNA, 4842 bp, Homo sapiens
  Payload ID: 9015
  Gene Symbol: KIF15
  Gene Name: kinesin family member 15
  Uniprot ID: Q9NS87
  ENST ID: ENST00000326047
  CDS Start-End: 150-4316
gcggcctccatgcgggcgtcaacgtccgatccaagcgccaaattcaaatttgcggccatcttgagcgggcggaattcagtcgcgcgcggtgcagtcgggaggtggaggcaccggctgcattgttttcgggatcgaggggtgagggcgctatggcacccggctgcaaaactgagttacgcagcgtgacaaatggtcagtctaaccaaccaagtaatgaaggtgatgccatcaaagtttttgtgcgaattcgtcctcctgcagaaagatctgggtcagctgatggagagcagaacttatgcttatctgtgctgtcctccacgagtctccggctgcactccaaccctgagcccaagaccttcacgtttgatcatgttgcagatgtggataccactcaggaatctgtattcgcaactgtggctaaaagcattgtggagtcttgcatgagcggttataatggtaccatctttgcatatggacagactggctcagggaagacatttactatgatgggaccatctgaatctgataatttttctcataacctgagaggagtaatcccacgaagttttgaatatttgttttccttaattgatcgtgaaaaagaaaaggctggagctggaaagagtttcctttgtaagtgttcctttattgaaatctacaacgagcagatatatgatctactggactctgcatcggctggactgtacttaagggagcatatcaagaagggagtctttgttgttggtgcggtggagcaggtggtaacctcagctgctgaagcctatcaggtgttgtctggaggatggaggaatagacgtgtggcatcaacatcaatgaacagagaatcgtctaggtctcatgccgtctttacaattacaatagagtcaatggagaaaagtaatgagattgtgaatatacggacctccctactcaacctggtggatttagcaggatctgaaaggcaaaaagatacccatgcagaagggatgagattgaaggaagcaggtaacataaatcgatcattgagctgcctgggccaagtgattacagcacttgtcgacgtgggtaatggaaaacagagacatgtttgctacagagactccaaacttaccttcttactacgggattcccttggaggtaatgccaaaacagccataattgcaaatgttcatcctggatccaggtgttttggggaaaccctatcaacacttaactttgctcaaagagccaagctgattaaaaacaaggcagtagtaaatgaagacacccaaggaaatgtgagccagctccaagctgaagtgaagaggctcaaagaacaactggcggagcttgcttcaggacagacaccaccagaaagcttcctgaccagagacaaaaagaagactaactatatggagtatttccaggaagcaatgttattctttaagaaatctgaacaggaaaagaagtctctgatagaaaaagttacccaattagaagacctcaccctcaaaaaggaaaaatttattcaatctaataaaatgattgtgaaattccgagaggatcaaataatacgcttggaaaagctccacaaggaatcccggggaggttttctgcctgaggagcaggatcgtttgctctcagaattaaggaatgagattcaaactctgcgagaacaaatagagcaccaccccagagttgcaaagtatgctatggaaaatcattccctcagggaggagaatagaagactgagattattagagcctgtgaaaagagctcaagaaatggatgcccagaccattgcaaaactagaaaaagctttctctgaaataagtggcatggagaaaagtgacaaaaatcagcaaggattttcacctaaagctcagaaagagccatgtttgtttgcaaacactgagaagttaaaagcacaactcctgcaaattcagacagagctgaataattcaaagcaagaatatgaagaattcaaagaacttactaggaaaaggcagctagaattggaatcagagcttcagtctttgcaaaaagcgaaccttaatcttgaaaaccttttggaagcaacaaaagcctgcaagcggcaagaagtttctcagctgaataaaattcatgctgaaacacttaagattataactacaccaaccaaggcctaccaacttcattcccgaccagtaccaaaattaagccctgaaatgggaagctttggctctctatacactcagaattctagcatattagataatgatatattaaatgagccagttcctcctgagatgaatgaacaagcttttgaggccatttctgaagagcttagaacagtgcaggaacaaatgagtgctcttcaagccaaactggatgaagaagagcataaaaacctaaagcttcagcagcatgttgacaaactggaacatcattctacccaaatgcaggagcttttctcatcagaaagaattgattggaccaaacagcaggaagagcttctctcacagttgaatgtccttgaaaagcagcttcaagagactcaaactaaaaatgactttttgaaaagtgaggtacatgacctgcgagtagtccttcattctgctgacaaggagctttcttcagtgaaattggaatatagttcattcaaaacgaatcaggagaaagaattcaacaaactttccgaaagacacatgcatgtacagcttcaattagataatctcaggttagaaaacgaaaagctgcttgagagcaaagcctgcctacaggattcctatgacaacttacaagaaataatgaaatttgagattgaccaactttcaagaaacctccaaaacttcaaaaaagaaaatgaaactctgaaatctgatctgaataatttgatggagcttcttgaggcagaaaaagaacgcaataacaaattatcattacagtttgaagaagataaagaaaacagttctaaagaaatcttaaaagttcttgaggctgtacgtcaggagaaacagaaagagacggccaagtgtgagcagcagatggcaaaagtacagaaactagaagagagcttgcttgctactgaaaaagtgatcagttccctggaaaagtctagagattctgataagaaagttgtagctgacctcatgaaccagatccaggagctaagaacatcggtctgtgagaaaacagaaactatagacaccctgaaacaagaactgaaggacataaattgcaaatacaactctgctttggttgacagagaagagagcagagtgttgatcaagaagcaggaagtggatattctggatctgaaagaaacccttaggctgagaatactttctgaggacatagagagggatatgctctgtgaggacctggctcatgccactgagcagctgaacatgctcacagaggcctcaaaaaaacactcggggctgctgcagtctgcccaggaagaactgaccaagaaggaagccctgattcaggaacttcagcacaagctaaaccaaaagaaagaggaagtagaacagaagaagaatgaatataacttcaaaatgaggcaactagaacatgtgatggattctgctgctgaggatccccagagtcctaagacaccacctcactttcaaacacatttggcaaaactcctggaaacacaagaacaagagatagaagatggaagagcctctaagacttctttggaacaccttgtaacaaagctaaatgaagacagagaagtcaaaaatgctgaaatcctcagaatgaaggagcagttgcgtgaaatggaaaacctacgcctggaaagtcagcagttaatagagaaaaactggctcctgcaaggtcagctggatgatattaaaagacaaaaggaaaacagtgatcagaatcatccagataatcaacagctgaagaatgaacaagaagaaagtatcaaagaaagacttgcaaaaagtaaaatagttgaagaaatgctgaaaatgaaagcagacctagaagaagtccaaagtgccctttacaacaaagagatggaatgccttagaatgactgatgaagtcgaacgaacccaaactttggagtctaaagcattccaggaaaaagaacaactgagatcaaagctggaagaaatgtatgaagaaagagagagaacatcccaggagatggaaatgttaaggaagcaggtggagtgtcttgctgaggaaaatggaaagttggtaggtcaccaaaatttgcatcagaagattcagtacgtagtgcgactaaagaaggaaaatgtcaggcttgctgaggagacagaaaagttgcgtgccgaaaatgtatttttaaaagaaaagaaaagaagtgaatcttgaggattccggtcagctacctaggcatcaccttgtttgaagatgtttcttctcttttacaagtaagacctactcctggccacttaggagagctgaatttatggaccttaattattaaatgtttataaggtggtggtaaccacctcaagtttctgatgaacattctgcatccatatacaccctgtgacagtcagcagtctgctattaagtggcctacttcaaggctttgaatcaacttaagggaaaaccttttgtctttgtaaaaataaaagcctgtagctaaggtttacagtggacattagccagatcattttcttcttagattatgccataatctcctttgattcttatggaagttctaacaatatatggtggttccaacacctgcagtgagtttaatgactgacttagtagcaggtacaagaagcaaacttgttaatatagattatttttgtattcttactttaggtattttcttgagcattttccatgactgtaaataaagccattttttaagataataattaaa

SEQ ID NO: 146668 - DNA, 3460 bp, Homo sapiens
  Payload ID: 9015
  Gene Symbol: KIF15
  Gene Name: kinesin family member 15
  ENST ID: ENST00000425755
  CDS Start-End: 103-3174
agtaccttgtaatgaggctggccataagaatcagaagcaactggaaatggctgcttaacacacaaaagaacaaaaccaagagccttctactagtcactctcaatggcagtagtaaatgaagacacccaaggaaatgtgagccagctccaagctgaagtgaagaggctcaaagaacaactggcggagcttgcttcaggacagacaccaccagaaagcttcctgaccagagacaaaaagaagactaactatatggagtatttccaggaagcaatgttattctttaagaaatctgaacaggaaaagaagtctctgatagaaaaagttacccaattagaagacctcaccctcaaaaaggaaaaatttattcaatctaataaaatgattgtgaaattccgagaggatcaaataatacgcttggaaaagctccacaaggaatcccggggaggttttctgcctgaggagcaggatcgtttgctctcagaattaaggaatgagattcaaactctgcgagaacaaatagagcaccaccccagagttgcaaagtatgctatggaaaatcattccctcagggaggagaatagaagactgagattattagagcctgtgaaaagagctcaagaaatggatgcccagaccattgcaaaactagaaaaagctttctctgaaataagtggcatggagaaaagtgacaaaaatcagcaaggattttcacctaaagctcagaaagagccatgtttgtttgcaaacactgagaagttaaaagcacaactcctgcaaattcagacagagctgaataattcaaagcaagaatatgaagaattcaaagaacttactaggaaaaggcagctagaattggaatcagagcttcagtctttgcaaaaagcgaaccttaatcttgaaaaccttttggaagcaacaaaagcctgcaagcggcaagaagtttctcagctgaataaaattcatgctgaaacacttaagattataactacaccaaccaaggcctaccaacttcattcccgaccagtaccaaaattaagccctgaaatgggaagctttggctctctatacactcagaattctagcatattagataatgatatattaaatgagccagttcctcctgagatgaatgaacaagcttttgaggccatttctgaagagcttagaacagtgcaggaacaaatgagtgctcttcaagccaaactggatgaagaagagcataaaaacctaaagcttcagcagcatgttgacaaactggaacatcattctacccaaatgcaggagcttttctcatcagaaagaattgattggaccaaacagcaggaagagcttctctcacagttgaatgtccttgaaaagcagcttcaagagactcaaactaaaaatgactttttgaaaagtgaggtacatgacctgcgagtagtccttcattctgctgacaaggagctttcttcagtgaaattggaatatagttcattcaaaacgaatcaggagaaagaattcaacaaactttccgaaagacacatgcatgtacagcttcaattagataatctcaggttagaaaacgaaaagctgcttgagagcaaagcctgcctacaggattcctatgacaacttacaagaaataatgaaatttgagattgaccaactttcaagaaacctccaaaacttcaaaaaagaaaatgaaactctgaaatctgatctgaataatttgatggagcttcttgaggcagaaaaagaacgcaataacaaattatcattacagtttgaagaagataaagaaaacagttctaaagaaatcttaaaagttcttgaggctgtacgtcaggagaaacagaaagagacggccaagtgtgagcagcagatggcaaaagtacagaaactagaagagagcttgcttgctactgaaaaagtgatcagttccctggaaaagtctagagattctgataagaaagttgtagctgacctcatgaaccagatccaggagctaagaacatcggtctgtgagaaaacagaaactatagacaccctgaaacaagaactgaaggacataaattgcaaatacaactctgctttggttgacagagaagagagcagagtgttgatcaagaagcaggaagtggatattctggatctgaaagaaacccttaggctgagaatactttctgaggacatagagagggatatgctctgtgaggacctggctcatgccactgagcagctgaacatgctcacagaggcctcaaaaaaacactcggggctgctgcagtctgcccaggaagaactgaccaagaaggaagccctgattcaggaacttcagcacaagctaaaccaaaagaaagaggaagtagaacagaagaagaatgaatataacttcaaaatgaggcaactagaacatgtgatggattctgctgctgaggatccccagagtcctaagacaccacctcactttcaaacacatttggcaaaactcctggaaacacaagaacaagagatagaagatggaagagcctctaagacttctttggaacaccttgtaacaaagctaaatgaagacagagaagtcaaaaatgctgaaatcctcagaatgaaggagcagttgcgtgaaatggaaaacctacgcctggaaagtcagcagttaatagagaaaaactggctcctgcaaggtcagctggatgatattaaaagacaaaaggaaaacagtgatcagaatcatccagataatcaacagctgaagaatgaacaagaagaaagtatcaaagaaagacttgcaaaaagtaaaatagttgaagaaatgctgaaaatgaaagcagacctagaagaagtccaaagtgccctttacaacaaagagatggaatgccttagaatgactgatgaagtcgaacgaacccaaactttggagtctaaagcattccaggaaaaagaacaactgagatcaaagctggaagaaatgtatgaagaaagagagagaacatcccaggagatggaaatgttaaggaagcaggtggagtgtcttgctgaggaaaatggaaagttggtaggtcaccaaaatttgcatcagaagattcagtacgtagtgcgactaaagaaggaaaatgtcaggcttgctgaggagacagaaaagttgcgtgccgaaaatgtatttttaaaagaaaagaaaagaagtgaatcttgaggattccggtcagctacctaggcatcaccttgtttgaagatgtttcttctcttttacaagtaagacctactcctggccacttaggagagctgaatttatggaccttaattattaaatgtttataaggtggtggtaaccacctcaagtttctgatgaacattctgcatccatatacaccctgtgacagtcagcagtctgctattaagtggcctacttcaaggctttgaatcaacttaagggaaaaccttttgtctttgtaaaaataaaagcctgtagctaaggttta

SEQ ID NO: 146669 - DNA, 691 bp, Homo sapiens
  Payload ID: 9015
  Gene Symbol: KIF15
  Gene Name: kinesin family member 15
  ENST ID: ENST00000422209
  CDS Start-End: 1-584
aggagcagttgcgtgaaatggaaaacctacgcctggaaagtcagcagttaatagagaaaaactggctcctgcaaggtcagctggatgatattaaaagacaaaaggaaaacagtgatcagaatcatccagataatcaacagctgaagaatgaacaagaagaaagtatcaaagaaagacttgcaaaaagtaaaatagttgaagaaatgctgaaaatgaaagcagacctagaagaagtccaaagtgccctttacaacaaagagatggaatgccttagaatgactgatgaagtcgaacgaacccaaactttggagtctaaagcattccaggaaaaagaacaactgagatcaaagctggaagaaatgtatgaagaaagagagagaacatcccaggagatggaaatgttaaggaagcaggtggagtgtcttgctgaggaaaatggaaagttggtaggtcaccaaaatttgcatcagaagattcagtacgtagtgcgactaaagaaggaaaatgtcaggcttgctgaggagacagaaaagttgcgtgccgaaaatgtatttttaaaagaaaagaaaagaagtgaatcttgaggattccggtcagctacctaggcatcaccttgtttgaagatgtttcttctcttttacaaatgccactgccgccaggagccctgtaacatcagccatcgtcaacccca

SEQ ID NO: 146670 - DNA, 2441 bp, Homo sapiens
  Payload ID: 9015
  Gene Symbol: KIF15
  Gene Name: kinesin family member 15
  ENST ID: ENST00000453693
  CDS Start-End: 1-386
cttcagtgaaattggaatatagttcattcaaaacgaatcaggagaaagaattcaacaaactttccgaaagacacatgcatgtacagcttcaattagataatctcaggttagaaaacgaaaagctgcttgagagcaaagcctgcctacaggattcctatgacaacttacaagaaataatgaaatttgagattgaccaactttcaagaaacctccaaaacttcaaaaaagaaaatgaaactctgaaatctgatctgaataatttgatggagcttcttgaggcagaaaaagaacgcaataacaaattatcattacagtttgaagaagataaagaaaacagttctaagccctggtatacagtggtgaacgtagagcttacatccagttgagagacaagcaattgacatttactcatttattcaaacatttattgatatccaacaagccaggcactgatctggtgaattccagaacatttagagttgaaacagtgaacaaaacatccctgtcctcgtggattttaacttctagcacagggagacagagaaatcttaaaagttcttgaggctgtacgtcaggagaaacagaaagagacggccaagtgtgagcagcagatggcaaaagtacagaaactagaagagagcttgcttgctactgaaaaagtgatcagttccctggaaaagtctagagattctgataagaaagttgtagctgacctcatgaaccagatccaggagctaagaacatcggtctgtgagaaaacagaaactatagacaccctgaaacaagaactgaaggacataaattgcaaatacaactctgctttggttgacagagaagagagcagagtgttgatcaagaagcaggaagtggatattctggatctgaaagaaacccttaggctgagaatactttctgaggacatagagagggatatgctctgtgaggacctggctcatgccactgagcagctgaacatgctcacagaggcctcaaaaaaacactcggggctgctgcagtctgcccaggaagaactgaccaagaaggaagccctgattcaggaacttcagcacaagctaaaccaaaagaaagaggaagtagaacagaagaagaatgaatataacttcaaaatgaggcaactagaacatgtgatggattctgctgctgaggatccccagagtcctaagacaccacctcactttcaaacacatttggcaaaactcctggaaacacaagaacaagagatagaagatggaagagcctctaagacttctttggaacaccttgtaacaaagctaaatgaagacagagaagtcaaaaatgctgaaatcctcagaatgaaggagcagttgcgtgaaatggaaaacctacgcctggaaagtcagcagttaatagagaaaaactggctcctgcaaggtcagctggatgatattaaaagacaaaaggaaaacagtgatcagaatcatccagataatcaacagctgaagaatgaacaagaagaaagtatcaaagaaagacttgcaaaaagtaaaatagttgaagaaatgctgaaaatgaaagcagacctagaagaagtccaaagtgccctttacaacaaagagatggaatgccttagaatgactgatgaagtcgaacgaacccaaactttggagtctaaagcattccaggaaaaagaacaactgagatcaaagctggaagaaatgtatgaagaaagagagagaacatcccaggagatggaaatgttaaggaagcaggtggagtgtcttgctgaggaaaatggaaagttggtaggtcaccaaaatttgcatcagaagattcagtacgtagtgcgactaaagaaggaaaatgtcaggcttgctgaggagacagaaaagttgcgtgccgaaaatgtatttttaaaagaaaagaaaagaagtgaatcttgaggattccggtcagctacctaggcatcaccttgtttgaagatgtttcttctcttttacaagtaagacctactcctggccacttaggagagctgaatttatggaccttaattattaaatgtttataaggtggtggtaaccacctcaagtttctgatgaacattctgcatccatatacaccctgtgacagtcagcagtctgctattaagtggcctacttcaaggctttgaatcaacttaagggaaaaccttttgtctttgtaaaaataaaagcctgtagctaaggtttacagtggacattagccagatcattttcttcttagattatgccataatctcctttgattcttatggaagttctaacaatatatggtggttccaacacctgcagtgagtttaatgactgacttagtagcaggtacaagaagcaaacttgttaatatagattatttttgtattcttactttaggtattttcttgagcattttccatgactgtaaataaagccattttttaagataat

SEQ ID NO: 146671 - DNA, 4795 bp, Homo sapiens
  Payload ID: 9015
  Gene Symbol: KIF15
  Gene Name: kinesin family member 15
  ENST ID: ENST00000438321
  CDS Start-End: 146-397
cctccatgcgggcgtcaacgtccgatccaagcgccaaattcaaatttgcggccatcttgagcgggcggaattcagtcgcgcgcggtgcagtcgggaggtggaggcaccggctgcattgttttcgggatcgaggggtgagggcgctatggcacccggctgcaaaataatgaaggtgatgccatcaaagtttttgtgcgaattcgtcctcctgcagaaagatctgggtcagctgatggagagcagaacttatgcttatctgtgctgtcctccacgagtctccggctgcactccaaccctgagcccaagaccttcacgtttgatcatgttgcagatgtggataccactcaggaatctgtattcgcaactgtggctaaaagcattgtggagtcttgcatgagcggttataatggtaccatctttgcatatggacagactggctcagggaagacatttactatgatgggaccatctgaatctgataatttttctcataacctgagaggagtaatcccacgaagttttgaatatttgttttccttaattgatcgtgaaaaagaaaaggctggagctggaaagagtttcctttgtaagtgttcctttattgaaatctacaacgagcagatatatgatctactggactctgcatcggctggactgtacttaagggagcatatcaagaagggagtctttgttgttggtgcggtggagcaggtggtaacctcagctgctgaagcctatcaggtgttgtctggaggatggaggaatagacgtgtggcatcaacatcaatgaacagagaatcgtctaggtctcatgccgtctttacaattacaatagagtcaatggagaaaagtaatgagattgtgaatatacggacctccctactcaacctggtggatttagcaggatctgaaaggcaaaaagatacccatgcagaagggatgagattgaaggaagcaggtaacataaatcgatcattgagctgcctgggccaagtgattacagcacttgtcgacgtgggtaatggaaaacagagacatgtttgctacagagactccaaacttaccttcttactacgggattcccttggaggtaatgccaaaacagccataattgcaaatgttcatcctggatccaggtgttttggggaaaccctatcaacacttaactttgctcaaagagccaagctgattaaaaacaaggcagtagtaaatgaagacacccaaggaaatgtgagccagctccaagctgaagtgaagaggctcaaagaacaactggcggagcttgcttcaggacagacaccaccagaaagcttcctgaccagagacaaaaagaagactaactatatggagtatttccaggaagcaatgttattctttaagaaatctgaacaggaaaagaagtctctgatagaaaaagttacccaattagaagacctcaccctcaaaaaggaaaaatttattcaatctaataaaatgattgtgaaattccgagaggatcaaataatacgcttggaaaagctccacaaggaatcccggggaggttttctgcctgaggagcaggatcgtttgctctcagaattaaggaatgagattcaaactctgcgagaacaaatagagcaccaccccagagttgcaaagtatgctatggaaaatcattccctcagggaggagaatagaagactgagattattagagcctgtgaaaagagctcaagaaatggatgcccagaccattgcaaaactagaaaaagctttctctgaaataagtggcatggagaaaagtgacaaaaatcagcaaggattttcacctaaagctcagaaagagccatgtttgtttgcaaacactgagaagttaaaagcacaactcctgcaaattcagacagagctgaataattcaaagcaagaatatgaagaattcaaagaacttactaggaaaaggcagctagaattggaatcagagcttcagtctttgcaaaaagcgaaccttaatcttgaaaaccttttggaagcaacaaaagcctgcaagcggcaagaagtttctcagctgaataaaattcatgctgaaacacttaagattataactacaccaaccaaggcctaccaacttcattcccgaccagtaccaaaattaagccctgaaatgggaagctttggctctctatacactcagaattctagcatattagataatgatatattaaatgagccagttcctcctgagatgaatgaacaagcttttgaggccatttctgaagagcttagaacagtgcaggaacaaatgagtgctcttcaagccaaactggatgaagaagagcataaaaacctaaagcttcagcagcatgttgacaaactggaacatcattctacccaaatgcaggagcttttctcatcagaaagaattgattggaccaaacagcaggaagagcttctctcacagttgaatgtccttgaaaagcagcttcaagagactcaaactaaaaatgactttttgaaaagtgaggtacatgacctgcgagtagtccttcattctgctgacaaggagctttcttcagtgaaattggaatatagttcattcaaaacgaatcaggagaaagaattcaacaaactttccgaaagacacatgcatgtacagcttcaattagataatctcaggttagaaaacgaaaagctgcttgagagcaaagcctgcctacaggattcctatgacaacttacaagaaataatgaaatttgagattgaccaactttcaagaaacctccaaaacttcaaaaaagaaaatgaaactctgaaatctgatctgaataatttgatggagcttcttgaggcagaaaaagaacgcaataacaaattatcattacagtttgaagaagataaagaaaacagttctaaagaaatcttaaaagttcttgaggctgtacgtcaggagaaacagaaagagacggccaagtgtgagcagcagatggcaaaagtacagaaactagaagagagcttgcttgctactgaaaaagtgatcagttccctggaaaagtctagagattctgataagaaagttgtagctgacctcatgaaccagatccaggagctaagaacatcggtctgtgagaaaacagaaactatagacaccctgaaacaagaactgaaggacataaattgcaaatacaactctgctttggttgacagagaagagagcagagtgttgatcaagaagcaggaagtggatattctggatctgaaagaaacccttaggctgagaatactttctgaggacatagagagggatatgctctgtgaggacctggctcatgccactgagcagctgaacatgctcacagaggcctcaaaaaaacactcggggctgctgcagtctgcccaggaagaactgaccaagaaggaagccctgattcaggaacttcagcacaagctaaaccaaaagaaagaggaagtagaacagaagaagaatgaatataacttcaaaatgaggcaactagaacatgtgatggattctgctgctgaggatccccagagtcctaagacaccacctcactttcaaacacatttggcaaaactcctggaaacacaagaacaagagatagaagatggaagagcctctaagacttctttggaacaccttgtaacaaagctaaatgaagacagagaagtcaaaaatgctgaaatcctcagaatgaaggagcagttgcgtgaaatggaaaacctacgcctggaaagtcagcagttaatagagaaaaactggctcctgcaaggtcagctggatgatattaaaagacaaaaggaaaacagtgatcagaatcatccagataatcaacagctgaagaatgaacaagaagaaagtatcaaagaaagacttgcaaaaagtaaaatagttgaagaaatgctgaaaatgaaagcagacctagaagaagtccaaagtgccctttacaacaaagagatggaatgccttagaatgactgatgaagtcgaacgaacccaaactttggagtctaaagcattccaggaaaaagaacaactgagatcaaagctggaagaaatgtatgaagaaagagagagaacatcccaggagatggaaatgttaaggaagcaggtggagtgtcttgctgaggaaaatggaaagttggtaggtcaccaaaatttgcatcagaagattcagtacgtagtgcgactaaagaaggaaaatgtcaggcttgctgaggagacagaaaagttgcgtgccgaaaatgtatttttaaaagaaaagaaaagaagtgaatcttgaggattccggtcagctacctaggcatcaccttgtttgaagatgtttcttctcttttacaagtaagacctactcctggccacttaggagagctgaatttatggaccttaattattaaatgtttataaggtggtggtaaccacctcaagtttctgatgaacattctgcatccatatacaccctgtgacagtcagcagtctgctattaagtggcctacttcaaggctttgaatcaacttaagggaaaaccttttgtctttgtaaaaataaaagcctgtagctaaggtttacagtggacattagccagatcattttcttcttagattatgccataatctcctttgattcttatggaagttctaacaatatatggtggttccaacacctgcagtgagtttaatgactgacttagtagcaggtacaagaagcaaacttgttaatatagattatttttgtattcttactttaggtattttcttgagcattttccatgactgtaaataaagccattttttaagataataattaaa

SEQ ID NO: 146672 - DNA, 2240 bp, Homo sapiens
  Payload ID: 9015
  Gene Symbol: KIF15
  Gene Name: kinesin family member 15
  ENST ID: ENST00000481166
  CDS Start-End: 107-2240
cgctatggcacccggctgcaaaatggacagactggctcagggaagacatttactatgatgggtgttgtctggaggatggaggaatagacgtgtggcatcaacatcaatgaacagagaatcgtctaggtctcatgccgtctttacaattacaatagagtcaatggagaaaagtaatgagattgtgaatatacggacctccctactcaacctggtggatttagcaggatctgaaaggcaaaaagatacccatgcagaagggatgagattgaaggaagcaggtaacataaatcgatcattgagctgcctgggccaagtgattacagcacttgtcgacgtgggtaatggaaaacagagacatgtttgctacagagactccaaacttaccttcttactacgggattcccttggaggtaatgccaaaacagccataattgcaaatgttcatcctggatccaggtgttttggggaaaccctatcaacacttaactttgctcaaagagccaagctgattaaaaacaaggcagtagtaaatgaagacacccaaggaaatgtgagccagctccaagctgaagtgaagaggctcaaagaacaactggcggagcttgcttcaggacagacaccaccagaaagcttcctgaccagagacaaaaagaagactaactatatggagtatttccaggaagcaatgttattctttaagaaatctgaacaggaaaagaagtctctgatagaaaaagttacccaattagaagacctcaccctcaaaaaggaaaaatttattcaatctaataaaatgattgtgaaattccgagaggatcaaataatacgcttggaaaagctccacaaggaatcccggggaggttttctgcctgaggagcaggatcgtttgctctcagaattaaggaatgagattcaaactctgcgagaacaaatagagcaccaccccagagttgcaaagtatgctatggaaaatcattccctcagggaggagaatagaagactgagattattagagcctgtgaaaagagctcaagaaatggatgcccagaccattgcaaaactagaaaaagctttctctgaaataagtggcatggagaaaagtgacaaaaatcagcaaggattttcacctaaagctcagaaagagccatgtttgtttgcaaacactgagaagttaaaagcacaactcctgcaaattcagacagagctgaataattcaaagcaagaatatgaagaattcaaagaacttactaggaaaaggcagctagaattggaatcagagcttcagtctttgcaaaaagcgaaccttaatcttgaaaaccttttggaagcaacaaaagcctgcaagcggcaagaagtttctcagctgaataaaattcatgctgaaacacttaagattataactacaccaaccaaggcctaccaacttcattcccgaccagtaccaaaattaagccctgaaatgggaagctttggctctctatacactcagaattctagcatattagataatgatatattaaatgagccagttcctcctgagatgaatgaacaagcttttgaggccatttctgaagagcttagaacagtgcaggaacaaatgagtgctcttcaagccaaactggatgaagaagagcataaaaacctaaagcttcagcagcatgttgacaaactggaacatcattctacccaaatgcaggagcttttctcatcagaaagaattgattggaccaaacagcaggaagagcttctctcacagttgaatgtccttgaaaagcagcttcaagagactcaaactaaaaatgactttttgaaaagtgaggtacatgacctgcgagtagtccttcattctgctgacaaggagctttcttcagtgaaattggaatatagttcattcaaaacgaatcaggagaaagaattcaacaaactttccgaaagacacatgcatgtacagcttcaattagataatctcaggttagaaaacgaaaagctgcttgagagcaaagcctgcctacaggattcctatgacaacttacaagaaataatgaaatttgagattgaccaactttcaagaaacctccaaaacttcaaaaaagaaaatgaaactctgaaatctgatctgaataatttgatggagcttcttgaggcagaaaaagaacgcaataacaaattatcattacagtttgaagaagataaagaaaacagttctaaagaaatcttaaaagttcttgaggctgtacgtc

SEQ ID NO: 146673 - DNA, 2441 bp, Homo sapiens; identical to SEQ ID NO: 146670
  Payload ID: 9015
  Gene Symbol: KIF15
  Gene Name: Kinesin family member 15
  ENST ID: ENST00000629073
  CDS Start-End: 1-386

SEQ ID NO: 146674 - DNA, 4842 bp, Homo sapiens; identical to SEQ ID NO: 146667
  Payload ID: 9015
  Gene Symbol: KIF15
  Gene Name: Kinesin family member 15
  ENST ID: ENST00000627272
  CDS Start-End: 150-4316

SEQ ID NO: 146675 - DNA, 4795 bp, Homo sapiens; identical to SEQ ID NO: 146671
  Payload ID: 9015
  Gene Symbol: KIF15
  Gene Name: Kinesin family member 15
  ENST ID: ENST00000631233
  CDS Start-End: 146-397

SEQ ID NO: 146676 - DNA, 691 bp, Homo sapiens; identical to SEQ ID NO: 146669
  Payload ID: 9015
  Gene Symbol: KIF15
  Gene Name: Kinesin family member 15
  ENST ID: ENST00000627473
  CDS Start-End: 1-584

SEQ ID NO: 146677 - DNA, 2240 bp, Homo sapiens; identical to SEQ ID NO: 146672
  Payload ID: 9015
  Gene Symbol: KIF15
  Gene Name: Kinesin family member 15
  ENST ID: ENST00000625939
  CDS Start-End: 107-2240

SEQ ID NO: 146678 - DNA, 3460 bp, Homo sapiens; identical to SEQ ID NO: 146668
  Payload ID: 9015
  Gene Symbol: KIF15
  Gene Name: Kinesin family member 15
  ENST ID: ENST00000627705
  CDS Start-End: 103-3174

SEQ ID NO: 146679 - DNA, 5261 bp, Homo sapiens
  Payload ID: 9016
  Gene Symbol: KIF16B
  Gene Name: kinesin family member 16B
  Uniprot ID: Q96L93
  ENST ID: ENST00000354981
  CDS Start-End: 159-4112
gcaggtggggctgccgcggaactccaggtccggccgggagcagaggggcgggggcgagagggaagtgggcgggagccgcgatctgagtagccagcgtcgccggcgaccgcggagttctgggctagtgggaccccgcgcgggctggttcgggatgagcgatggcatcggtcaaggtggccgtgagggtccggcccatgaatcgcagggaaaaggacttggaggccaagttcattattcagatggagaaaagcaaaacgacaatcacaaacttaaagataccagaaggaggcactggggactcaggaagagaacggaccaagaccttcacctatgacttttctttttattctgctgatacaaaaagcccagattacgtttcacaagaaatggttttcaaaaccctcggcacagatgtcgtgaagtctgcatttgaaggttataatgcttgtgtctttgcatatgggcaaactggatctggaaagtcatacactatgatgggaaattctggagattctggcttaatacctcggatctgtgaaggactcttcagtcggataaatgaaaccaccagatgggatgaagcttcttttcgaactgaagtcagctacttagaaatttataacgaacgtgtgagagatctacttcggcggaagtcatctaaaaccttcaatttgagagtccgtgagcatcccaaagaaggcccttatgttgaggatttatccaaacatttagtacagaattatggtgacgtagaagaacttatggatgcgggcaatatcaaccggaccaccgcagcgactgggatgaacgacgtcagtagcaggtctcatgccatcttcaccatcaagttcactcaggctaaatttgattctgaaatgccatgtgaaaccgtcagtaagatccacttggttgatcttgccggaagtgagcgtgcagatgccaccggagccaccggggttaggctaaaggaagggggaaatattaacaagtccctcgtgactctggggaacgtcatttctgccttagctgatttatctcaggatgctgcaaatactcttgcaaagaagaagcaagttttcgtgccttacagggattctgtgttgacttggttgttaaaagatagccttggaggaaactctaaaactatcatgattgccaccatttcacctgctgatgtcaattatggagaaaccctaagtactcttcgctatgcaaatagagccaaaaacatcatcaacaagcctaccattaatgaggatgccaacgtcaaacttatccgtgagctgcgagctgaaatagccagactgaaaacgctgcttgctcaagggaatcagattgccctcttagactcccccacagctttaagtatggaggaaaaacttcagcagaatgaagcaagagttcaagaattgaccaaggaatggacaaataagtggaatgaaacccaaaatattttgaaagaacaaactctagccctcaggaaagaagggattggagttgttttggattctgaactgcctcatttgattggcatcgatgatgaccttttgagtactggaatcatcttatatcatttaaaggaaggtcagacatacgttggtagagacgatgcttccacggagcaagatattgttcttcatggccttgacttggagagtgagcattgcatctttgaaaatatcggggggacagtgactctgatacccctgagtgggtcccagtgctctgtgaatggtgttcagatcgtggaggccacacatctaaatcaaggtgctgtgattctcttgggaagaaccaatatgtttcgctttaaccatccaaaggaagccgccaagctcagggagaagaggaagagtggccttctgtcctccttcagcttgtccatgaccgacctctcgaagtcccgtgagaacctgtctgcagtcatgttgtataaccccggacttgaatttgagaggcaacagcgtgaagaacttgaaaaattagaaagtaaaaggaaactcatagaagaaatggaggaaaagcagaaatcagacaaggctgaactggagcggatgcagcaggaggtggagacccagcgcaaggagacagaaatcgtgcagctccagattcgcaagcaggaggagagcctcaaacgccgcagcttccacatcgagaacaagctaaaggatttacttgcggagaaggaaaaatttgaagaggagaggctgagggaacagcaggaaatcgagctgcagaagaagagacaagaagaagagacctttctccgcgtccaagaagaactccaacgactcaaagaactcaacaacaacgagaaggctgagaagtttcagatatttcaagaactggaccagctccaaaaggaaaaagatgaacagtatgccaagcttgaactggaaaaaaagagactagaggagcaggagaaggagcaggtcatgctcgtggcccatctggaagagcagctccgagagaagcaggagatgatccagctcctgcggcgtggggaggtacagtgggtggaagaggagaagagggacctggaaggcattcgggaatccctcctgcgggtgaaggaggctcgtgccggaggggatgaagatggcgaggagttagaaaaggctcaactgcgtttcttcgaattcaagagaaggcagcttgtcaagctagtgaacttggagaaggacctggttcagcagaaagacatcctgaaaaaagaagtccaagaagaacaggagatcctagagtgtttaaaatgtgaacatgacaaagaatctagattgttggaaaaacatgatgagagtgtcacagatgtcacggaagtgcctcaagatttcgagaaaataaagccagtggagtacaggctgcaatataaagaacgccagctacagtacctcctgcagaatcacttgccaactctgttggaagaaaagcagagagcatttgaaattcttgacagaggccctctcagcttagacaacactctttatcaagtagaaaaggaaatggaagaaaaagaagaacagcttgcacagtaccaggccaatgcaaaccagctgcaaaagctccaagccacctttgaattcactgccaacattgcacgtcaggaggaaaaagtgaggaaaaaggaaaaggagattttggagtccagagagaagcagcagagagaggcgctggagcgggccctggccaggctggagaggagacattctgcgctgcagaggcactccaccctgggcatggagattgaagagcagaggcagaaacttgccagtctgaacagtggcagcagagagcagtcagggctccaggctagcctggaggctgagcaggaagccctggagaaggaccaggagaggttagaatatgaaatccagcagctgaaacagaagatttatgaggtcgatggtgttcaaaaagatcatcatgggaccctggaagggaaggtggcttcttccagcttgccagtcagtgctgaaaaatcacacctggttcccctcatggatgccaggatcaatgcttacattgaagaagaagtccaaagacgccttcaggatttgcatcgtgtgattagtgaaggctgcagtacatctgcagacacgatgaaggataatgagaaacttcacaatggcaccattcaacgtaaactaaaatatgagcggatggtttctcgctctttgggcgcaaatccagatgacctgaaggacccaattaaaattagtatcccacgctacgtcctctgcgggcaaggaaaggatgcacacttcgagtttgaggtcaagattactgtcctagatgagacatggactgtattcaggcgttacagtcgttttcgagaaatgcataaaacattgaagttaaagtatgcagagcttgctgcccttgaatttcctccaaagaaactatttggaaataaggatgaacgtgtgattgctgagagacgaagtcacttagagaaatacctcagggactttttcagcgtgatgctccagtccgcaacatctcccctccacatcaacaaagtgggactgactctctcgaaacataccatttgtgagttttcaccattcttcaagaaaggagtctttgactacagcagccacgggacggggtagagccaggggtgatggaggaaccaccacagcagtgccttctcgtcgaagcgggctccgatgcagggcagctcccccatgcgaggatccgggtctgcctcctcctgctgaagacagacatgcagcagcgggcccgggccacctcacgtttccatacctagtgcctgagtttggggatgggatgctctgcctgctgatgtggccctgacaggcagccgttaccgttccattgcggttgaacgtggccttttcccacagtgcttccttctcactgcgcagcaaagttcgtcccctgtggcaagatagatgtggttgggccatcgtgggttccctgagcccagccagcctgggacctcccaaagtgggtggcttaccagaccacccttaaatgactttcatctggtttcctctttcaccaaaatatactcgtattttttatatttcttccatgtggctggctatattccaagaaaagcattttaaattatttcattgtatttttttctttttttccctcatttgaatcagaacttttatataaaacccaaacactgatgtttacacagaatttcatattctgcaaaagggattttttgatccaatcatgactgtagtcttccatgcttgacaaattggatgtagacaacattacttaaaacttctataaatccctacaattaggatatttatttaaccttgaatattcaagaacattctcccaaatctaaatggctactgtgcattcttgagctttttctgctaagcacaaaatgaacgcaaagctaaatgcatatttttaagtattattcacattttttgttacagaatctattggatctttggctggaaaactagaatttatagcagtttattaatgataccttaaattactcaggacttaatgtagcattgcacttctgtgtacagtaaaactgctttgttttactaaagagaaaaatgtgagtggaaaaaatatgtatgtggtatatactcaaatgtatataattctatctatagatttatatatgtatacattctgtacagtagttccatcaaaatatgtaataattcacaccaattttattaaatgtatttgctttttcaaaatttaaattgagctgctatcaatattaaatgaagttatggcatcta

SEQ ID NO: 146680 - DNA, 606 bp, Homo sapiens
  Payload ID: 9016
  Gene Symbol: KIF16B
  Gene Name: kinesin family member 16B
  ENST ID: ENST00000355755
  CDS Start-End: 1-606
aggatcaatgcttacattgaagaagaagtccaaagacgccttcaggatttgcatcgtgtgattagtgaaggctgcagtacatctgcagacacgatgaaggataatgagaaacttcacaatggcaccattcaacgtaaactaaaatatgagcggatggtttctcgctctttgggcgcaaatccagatgacctgaaggacccaattaaaattagtatcccacgctacgtcctctgcgggcaaggaaaggatgcacacttcgagtttgaggtcaagattactgtcctagatgagacatggactgtattcaggcgttacagtcgttttcgagaaatgcataaaacattgaagttaaagtatgcagagcttgctgcccttgaatttcctccaaagaaactatttggaaataaggatgaacgtgtgattgctgagagacgaagtcacttagagaaatacctcagggactttttcagcgtgatgctccagtccgcaacatctcccctccacatcaacaaagtgggactgactctctcgaaacataccatttgtgagttttcaccattcttcaagaaaggagtctttgactacagcagccacgggacggggtag

SEQ ID NO: 146681 - DNA, 4640 bp, Homo sapiens
  Payload ID: 9016
  Gene Symbol: KIF16B
  Gene Name: kinesin family member 16B
  Uniprot ID: Q96L93
  ENST ID: ENST00000408042
  CDS Start-End: 159-4337
gcaggtggggctgccgcggaactccaggtccggccgggagcagaggggcgggggcgagagggaagtgggcgggagccgcgatctgagtagccagcgtcgccggcgaccgcggagttctgggctagtgggaccccgcgcgggctggttcgggatgagcgatggcatcggtcaaggtggccgtgagggtccggcccatgaatcgcagggaaaaggacttggaggccaagttcattattcagatggagaaaagcaaaacgacaatcacaaacttaaagataccagaaggaggcactggggactcaggaagagaacggaccaagaccttcacctatgacttttctttttattctgctgatacaaaaagcccagattacgtttcacaagaaatggttttcaaaaccctcggcacagatgtcgtgaagtctgcatttgaaggttataatgcttgtgtctttgcatatgggcaaactggatctggaaagtcatacactatgatgggaaattctggagattctggcttaatacctcggatctgtgaaggactcttcagtcggataaatgaaaccaccagatgggatgaagcttcttttcgaactgaagtcagctacttagaaatttataacgaacgtgtgagagatctacttcggcggaagtcatctaaaaccttcaatttgagagtccgtgagcatcccaaagaaggcccttatgttgaggatttatccaaacatttagtacagaattatggtgacgtagaagaacttatggatgcgggcaatatcaaccggaccaccgcagcgactgggatgaacgacgtcagtagcaggtctcatgccatcttcaccatcaagttcactcaggctaaatttgattctgaaatgccatgtgaaaccgtcagtaagatccacttggttgatcttgccggaagtgagcgtgcagatgccaccggagccaccggggttaggctaaaggaagggggaaatattaacaagtccctcgtgactctggggaacgtcatttctgccttagctgatttatctcaggatgctgcaaatactcttgcaaagaagaagcaagttttcgtgccttacagggattctgtgttgacttggttgttaaaagatagccttggaggaaactctaaaactatcatgattgccaccatttcacctgctgatgtcaattatggagaaaccctaagtactcttcgctatgcaaatagagccaaaaacatcatcaacaagcctaccattaatgaggatgccaacgtcaaacttatccgtgagctgcgagctgaaatagccagactgaaaacgctgcttgctcaagggaatcagattgccctcttagactcccccacagctttaagtatggaggaaaaacttcagcagaatgaagcaagagttcaagaattgaccaaggaatggacaaataagtggaatgaaacccaaaatattttgaaagaacaaactctagccctcaggaaagaagggattggagttgttttggattctgaactgcctcatttgattggcatcgatgatgaccttttgagtactggaatcatcttatatcatttaaaggaaggtcagacatacgttggtagagacgatgcttccacggagcaagatattgttcttcatggccttgacttggagagtgagcattgcatctttgaaaatatcggggggacagtgactctgatacccctgagtgggtcccagtgctctgtgaatggtgttcagatcgtggaggccacacatctaaatcaaggtgctgtgattctcttgggaagaaccaatatgtttcgctttaaccatccaaaggaagccgccaagctcagggagaagaggaagagtggccttctgtcctccttcagcttgtccatgaccgacctctcgaagtcccgtgagaacctgtctgcagtcatgttgtataaccccggacttgaatttgagaggcaacagcgtgaagaacttgaaaaattagaaagtaaaaggaaactcatagaagaaatggaggaaaagcagaaatcagacaaggctgaactggagcggatgcagcaggaggtggagacccagcgcaaggagacagaaatcgtgcagctccagattcgcaagcaggaggagagcctcaaacgccgcagcttccacatcgagaacaagctaaaggatttacttgcggagaaggaaaaatttgaagaggagaggctgagggaacagcaggaaatcgagctgcagaagaagagacaagaagaagagacctttctccgcgtccaagaagaactccaacgactcaaagaactcaacaacaacgagaaggctgagaagtttcagatatttcaagaactggaccagctccaaaaggaaaaagatgaacagtatgccaagcttgaactggaaaaaaagagactagaggagcaggagaaggagcaggtcatgctcgtggcccatctggaagagcagctccgagagaagcaggagatgatccagctcctgcggcgtggggaggtacagtgggtggaagaggagaagagggacctggaaggcattcgggaatccctcctgcgggtgaaggaggctcgtgccggaggggatgaagatggcgaggagttagaaaaggctcaactgcgtttcttcgaattcaagagaaggcagcttgtcaagctagtgaacttggagaaggacctggttcagcagaaagacatcctgaaaaaagaagtccaagaagaacaggagatcctagagtgtttaaaatgtgaacatgacaaagaatctagattgttggaaaaacatgatgagagtgtcacagatgtcacggaagtgcctcaagatttcgagaaaataaagccagtggagtacaggctgcaatataaagaacgccagctacagtacctcctgcagaatcacttgccaactctgttggaagaaaagcagagagcatttgaaattcttgacagaggccctctcagcttagacaacactctttatcaagtagaaaaggaaatggaagaaaaagaagaacagcttgcacagtaccaggccaatgcaaaccagctgcaaaagctccaagccacctttgaattcactgccaacattgcacgtcaggaggaaaaagtgaggaaaaaggaaaaggagattttggagtccagagagaagcagcagagagaggcgctggagcgggccctggccaggctggagaggagacattctgcgctgcagaggcactccaccctgggcatggagattgaagagcagaggcagaaacttgccagtctgaacagtggcagcagagagcagtcagggctccaggctagcctggaggctgagcaggaagccctggagaaggaccaggagaggttagaatatgaaatccagcagctgaaacagaagatttatgaggtcgatggtgttcaaaaagatcatcatgggaccctggaagggaaggtggcttcttccagcttgccagtcagtgctgaaaaatcacacctggttcccctcatggatgccaggatcaatgcttacattgaagaagaagtccaaagacgccttcaggatttgcatcgtgtgattagtgaaggctgcagtacatctgcagacacgatgaaggataatgagaaacttcacaatggcaccattcaacgtaaactaaaatatgagctgtgtcgtgacctcctgtgtgtcctgatgccagagcctgatgccgctgcctgcgctaatcatcccttgctccagcaagatctggttcagctttctcttgattggaaaacagaaatccctgatttagttttgccaaatggagttcaggtgtcatccaaattccagactaccttggttgacatgatttactttcttcatggaaatatggaagtcaatgtcccttccctggcagaagttcagttactgctctacacaacagtgaaagtcatgggtgactctggccatgaccagtgccagtcgctagtccttctgaacacccacattgcactggtgaaggaagactgtgttttttatccacgcattcgatctcgaaacatacctcctccgggtgcacaatttgatgtgatcaaatgccatgctttaagtgaattcaggtgtgttgttgttccagaaaagaaaaatgtgtcaacagtagaactagtcttcttacagaaactcaaaccttcagtgggttccagaaatagtccacctgagcaccttcaggaagccccaaatgtccagttgttcaccaccccattgtatcttcaaggcagtcagaatgtcgcacctgaggtctggaaacttactttcaattctcaagatgaggctctttggctaatctcacatttgacaagactctaaggaggagacttttaaagatgcactacatgttttttgagatcattaataaaataagcattgtgaaaacagtcaaggcaatatgaatatctccgtgtagctaattgaattggaactggaaaaatgcagacctctaaaattgaaaatgtaaatattttaaatatctacaataaaataaaaacagctaatagcagagccccaataaaatatctttatcatcaccttgcttcattttcttgaaactcaggcttgtaaatttgtgcctgcttcattatttgtgaggtgattaaagcatttctgattgtt

SEQ ID NO: 146682 - DNA, 556 bp, Homo sapiens
  Payload ID: 9016
  Gene Symbol: KIF16B
  Gene Name: kinesin family member 16B
  ENST ID: ENST00000450176
  CDS Start-End: 1-556
ccgacctctcgaagtcccgtgagaacctgtctgcagtcatgttgtataaccccggtcttttccctataaaaggacccatctgtctaagacttgaatttgagaggcaacagcgtgaagaacttgaaaaattagaaagtaaaaggaaactcatagaagaaatggaggaaaagcagaaatcagacaaggctgaactggagcggatgcagcaggaggtggagacccagcgcaaggagacagaaatcgtgcagctccagattcgcaagcaggaggagagcctcaaacgccgcagcttccacatcgagaacaagctaaaggatttacttgcggagaaggaaaaatttgaagaggagaggctgagggaacagcaggaaatcgagctgcagaagaagagacaagaagaagagacctttctccgcgtccaagaagaactccaacgactcaaagaactcaacaacaacgagaaggctgagaagtttcagatatttcaagaactggaccagctccaaaaggaaaaagatgaacagtatgccaagcttgaactggaaaaaaagagact

SEQ ID NO: 146683 - DNA, 3969 bp, Homo sapiens
  Payload ID: 9017
  Gene Symbol: KIF17
  Gene Name: kinesin family member 17
  Uniprot ID: Q9P2E2
  ENST ID: ENST00000247986
  CDS Start-End: 312-3401
gggcggctccgggctcgggttctgcggcggcgcctgcagcgcggatcccccacgtccccgctcgggccgggcctcagaaacgggcgagcccgggcgcgggaggaagcggcggccccggctcgggtcctgcgacgcccagctcccctccggggcgccccccgaggggtccccgccccccgccgcggccccgcccctgcctcaaggccccgccccccgtggccggcgctggccccgccccttggcccgggctgctgggagtccccggcggggcgggggtcagctctggtcccgttggtcctgggcgcggcgccatggcctccgaggcggtgaaggttgtcgtgcgctgccgtcccatgaaccagcgggagcgagagctgcgctgccagcccgtggtgactgtggactgcgcgcgcgcccagtgctgcatccagaacccgggcgccgccgacgagccgcccaagcagttcaccttcgacggcgcctaccacgtggaccacgtcaccgagcagatctacaacgagatcgcctatccgctggtggagggcgtcactgagggctacaatggcaccatctttgcctacggccagacaggcagcgggaagtccttcaccatgcagggcctgccggatccgccctcccagagaggcatcatccccagggccttcgagcacgtgttcgagagcgtccagtgtgcagagaacactaagttcctggtccgggcctcctacctggagatctacaatgaagatgtccgggacctccttggggctgacaccaagcagaagctggagctgaaggagcacccagagaagggcgtgtacgtgaaggggctgtccatgcacacggtgcacagcgtggcccagtgtgagcacatcatggagactggctggaagaaccgttcggtcggctacacgctgatgaacaaggattcctcacgctcgcactccatcttcaccatcagcatcgagatgtctgccgtggatgagcggggcaaggaccacctccgggcgggcaagctgaacctggtggacctggcgggcagcgagcggcagtccaagaccggggccacgggcgagcggctcaaggaggccaccaagatcaacctgtcgctctcggcactgggcaatgtcatctcggcgctggtggacgggcgctgtaagcacgtcccctaccgtgactcgaagctgacgcggctgctgcaggactcactgggcggcaacaccaagacgctcatggtggcctgcctgtcgcctgcggacaacaactacgatgagacactcagcacgctgcgctacgccaaccgggccaagaacatcaggaacaagccgcgcatcaatgaggaccccaaggatgcgctgcttcgcgagtaccaggaggagatcaagaagctcaaggccatcctgacacagcagatgagccccagcagcctgtcagccctgctgtccaggcaggtgcccccagaccctgtgcaggtggaggagaagctgttgccccaacctgtgatccagcatgacgtggaggccgagaagcagctgatccgggaggagtatgaagagcgcctggcccggctgaaagccgactataaggccgagcaggagtctcgggccaggctggaggaagacatcactgccatgcgcaactcatatgacgtcaggctgtccacgctggaggagaacctgcggaaggagacagaggctgtcctgcaggtgggagtcctctacaaggctgaggtcatgtccagggctgagtttgccagcagcgctgagtacccgcctgcttttcagtatgagacagtggtgaaacccaaggtcttctccacgactgacactctgcccagtgacgatgtctccaagactcaggtttcctccaggtttgcggagctgcccaaggtggaaccctccaaatctgagatttctctgggctccagtgagtcatcctcgctcgaagaaacctctgtgtccgaggctttccctgggcctgaggagccctccaacgtggaggtctccatgcccactgaggagtccaggagcagatacttcctggatgagtgcctcgggcaggaggccgctgggcacctgctgggggaacagaactacctcccgcaagaggagccgcaggaggtgcccctgcaggggttactaggcctgcaggacccgtttgccgaggtggaagccaagctggccagactctcctccaccgtggccaggacagatgcaccccaggcagacgtccccaaggtccctgtgcaggtccctgcgccgacagacctgctggagcccagtgatgccaggcccgaagccgaggcggctgatgacttcccgcccaggcctgaggtagatctggcctcggaagtggccttagaggtggtgcggacagcagagcctggcgtgtggttggaggctcaggccccggtggccctggtggctcagcctgagcccctgccggccacagctggtgtgaagagggagagcgtgggcatggaggtggcagtgctgactgatgacccgctgcccgttgtggaccagcagcaggtgctggcccgtctgcagctgttggagcagcaggttgtgggtggagagcaggccaagaacaaggacctgaaggagaagcacaagcggcgcaagcgctacgcagacgagcgcaggaagcagctggtggctgccctgcagaactcggatgaggacagcggggactgggtgctgcttaacgtctacgactccatccaggaggaagtgcgggccaagagcaagctgctggagaagatgcagaggaagcttcgggcagcagaggtggagatcaaagatctgcagtccgagtttcagctggagaagatcgattacttggccaccatccgccggcaggagcgtgactccatgctcttgcagcagctcctggagcaggtgcagcccctgattcgcagggactgtaactacagcaacctggagaagattctgcgtgagtcctgctgggacgaagataacggcttctggaagatcccacatcccgtcatcacaaaaaccagcctcccagtagcagtttcaactgggccacagaacaaaccagcccgcaaaacctctgcagcagacaatggcgagccgaacatggaggacgaccgctacaggctcatgctcagtcggagcaacagtgaaaacattgccagcaactacttccgatctaagcgggccagccagatcctcagcacagacgccaggaagagcctcacacatcacaactcgccaccaggcctcagctgcccactcagcaacaactctgccatcccacccacccaggcccctgaaatgccccagccccggcccttccgcctcgagtccctcgacatccctttcaccaaggccaagcgtaagaaaagcaaaagcaactttggcagtgagcctctgtgagcacagctgcttgccattgcctgccttataggcatgtagagactgccaggccctcccagggcagccccaaccaggtctcctcccacctgccacacagcgctccggggcctgagggctccctcagccctgggaagacacattcccttccctgttccccagagagcccacctccgccctgggcaggagcccctcggaggctgtatagtcctccttagagaggcctgctccagctgttcataccacatcagtgtttccgtctgctcacctgccacagagcccacacccatgcccaccagtgttggtctttgcctcaaagcctgagacctgcttcacggccttcaccagccctgatggagagggcagcagctgccacgtggaggaagctcaatatcagctgggaaggaactgtgcctctgtctgactggccccacttcctaagcactgccctgccccatggggtggcacaggggtcccacagcaggtcttcctgcactgcccacccctggctggtctgtggcccaaggaaggccactccacattaagctgcccaataaactgcttttaagat

SEQ ID NO: 146684 - DNA, 3572 bp, Homo sapiens
  Payload ID: 9017
  Gene Symbol: KIF17
  Gene Name: kinesin family member 17
  ENST ID: ENST00000375044
  CDS Start-End: 213-3002
ctatccgctggtggaggtgagggcgcccggcaggccgccctgcaggcggcagggcatgaggccgccccgagagtccccagggggctgcgctgccccccagccaggaggaaaggccctcgaggggcgcaggcggacgggaacagggcgtcactgagggctacaatggcaccatctttgcctacggccagacaggcagcgggaagtccttcaccatgcagggcctgccggatccgccctcccagagaggcatcatccccagggccttcgagcacgtgttcgagagcgtccagtgtgcagagaacactaagttcctggtccgggcctcctacctggagatctacaatgaagatgtccgggacctccttggggctgacaccaagcagaagctggagctgaaggagcacccagagaagggcgtgtacgtgaaggggctgtccatgcacacggtgcacagcgtggcccagtgtgagcacatcatggagactggctggaagaaccgttcggtcggctacacgctgatgaacaaggattcctcacgctcgcactccatcttcaccatcagcatcgagatgtctgccgtggatgagcggggcaaggaccacctccgggcgggcaagctgaacctggtggacctggcgggcagcgagcggcagtccaagaccggggccacgggcgagcggctcaaggaggccaccaagatcaacctgtcgctctcggcactgggcaatgtcatctcggcgctggtggacgggcgctgtaagcacgtcccctaccgtgactcgaagctgacgcggctgctgcaggactcactgggcggcaacaccaagacgctcatggtggcctgcctgtcgcctgcggacaacaactacgatgagacactcagcacgctgcgctacgccaaccgggccaagaacatcaggaacaagccgcgcatcaatgaggaccccaaggatgcgctgcttcgcgagtaccaggaggagatcaagaagctcaaggccatcctgacacagcagatgagccccagcagcctgtcagccctgctgtccaggcaggtgcccccagaccctgtgcaggtggaggagaagctgttgccccaacctgtgatccagcatgacgtggaggccgagaagcagctgatccgggaggagtatgaagagcgcctggcccggctgaaagccgactataaggccgagcaggagtctcgggccaggctggaggaagacatcactgccatgcgcaactcatatgacgtcaggctgtccacgctggaggagaacctgcggaaggagacagaggctgtcctgcaggtgggagtcctctacaaggctgaggtcatgtccagggctgagtttgccagcagcgctgagtacccgcctgcttttcagtatgagacagtggtgaaacccaaggtcttctccacgactgacactctgcccagtgacgatgtctccaagactcaggtttcctccaggtttgcggagctgcccaaggtggaaccctccaaatctgagatttctctgggctccagtgagtcatcctcgctcgaagaaacctctgtgtccgaggctttccctgggcctgaggagccctccaacgtggaggtctccatgcccactgaggagtccaggagcagatacttcctggatgagtgcctcgggcaggaggccgctgggcacctgctgggggaacagaactacctcccgcaagaggagccgcaggaggtgcccctgcaggggttactaggcctgcaggacccgtttgccgaggtggaagccaagctggccagactctcctccaccgtggccaggacagatgcaccccaggcagacgtccccaaggtccctgtgcaggtccctgcgccgacagacctgctggagcccagtgatgccaggcccgaagccgaggcggctgatgacttcccgcccaggcctgaggtagatctggcctcggaagtggccttagaggtggtgcggacagcagagcctggcgtgtggttggaggctcaggccccggtggccctggtggctcagcctgagcccctgccggccacagctggtgtgaagagggagagcgtgggcatggaggtggcagtgctgactgatgacccgctgcccgttgtggaccagcagcaggtgctggcccgtctgcagctgttggagcagcaggttgtgggtggagagcaggccaagaacaaggacctgaaggagaagcacaagcggcgcaagcgctacgcagacgagcgcaggaagcagctggtggctgccctgcagaactcggatgaggacagcggggactgggtgctgcttaacgtctacgactccatccaggaggaagtgcgggccaagagcaagctgctggagaagatgcagaggaagcttcgggcagcagaggtggagatcaaagatctgcagtccgagtttcagctggagaagatcgattacttggccaccatccgccggcaggagcgtgactccatgctcttgcagcagctcctggagcaggtgcagcccctgattcgcagggactgtaactacagcaacctggagaagattctgcgtgagtcctgctgggacgaagataacggcttctggaagatcccacatcccgtcatcacaaaaaccagcctcccagtagcagtttcaactgggccacagaacaaaccagcccgcaaaacctctgcagcagacaatggcgagccgaacatggaggacgaccgctacaggctcatgctcagtcggagcaacagtgaaaacattgccagcaactacttccgatctaagcgggccagccagatcctcagcacagacgccaggaagagcctcacacatcacaactcgccaccaggcctcagctgcccactcagcaacaactctgccatcccacccacccaggcccctgaaatgccccagccccggcccttccgcctcgagtccctcgacatccctttcaccaaggccaagcgtaagaaaagcaaaagcaactttggcagtgagcctctgtgagcacagctgcttgccattgcctgccttataggcatgtagagactgccaggccctcccagggcagccccaaccaggtctcctcccacctgccacacagcgctccggggcctgagggctccctcagccctgggaagacacattcccttccctgttccccagagagcccacctccgccctgggcaggagcccctcggaggctgtatagtcctccttagagaggcctgctccagctgttcataccacatcagtgtttccgtctgctcacctgccacagagcccacacccatgcccaccagtgttggtctttgcctcaaagcctgagacctgcttcacggccttcaccagccctgatggagagggcagcagctgccacgtggaggaagctcaatatcagctgggaaggaactgtgcctctgtctgactggccccacttcctaagcactgccctgccccatggggtggcacaggggtcccacagcaggtcttcctgcactgcccacccctggctggtctgtggcccaaggaaggccactccacattaagctgcccaataaactgcttttaagataa

SEQ ID NO: 146685 - DNA, 3731 bp, Homo sapiens
  Payload ID: 9017
  Gene Symbol: KIF17
  Gene Name: kinesin family member 17
  Uniprot ID: Q9P2E2
  ENST ID: ENST00000400463
  CDS Start-End: 75-3161
cttggcccgggctgctgggagtccccggcggggcgggggtcagctctggtcccgttggtcctgggcgcggcgccatggcctccgaggcggtgaaggttgtcgtgcgctgccgtcccatgaaccagcgggagcgagagctgcgctgccagcccgtggtgactgtggactgcgcgcgcgcccagtgctgcatccagaacccgggcgccgccgacgagccgcccaagcagttcaccttcgacggcgcctaccacgtggaccacgtcaccgagcagatctacaacgagatcgcctatccgctggtggagggcgtcactgagggctacaatggcaccatctttgcctacggccagacaggcagcgggaagtccttcaccatgcagggcctgccggatccgccctcccagagaggcatcatccccagggccttcgagcacgtgttcgagagcgtccagtgtgcagagaacactaagttcctggtccgggcctcctacctggagatctacaatgaagatgtccgggacctccttggggctgacaccaagcagaagctggagctgaaggagcacccagagaagggcgtgtacgtgaaggggctgtccatgcacacggtgcacagcgtggcccagtgtgagcacatcatggagactggctggaagaaccgttcggtcggctacacgctgatgaacaaggattcctcacgctcgcactccatcttcaccatcagcatcgagatgtctgccgtggatgagcggggcaaggaccacctccgggcgggcaagctgaacctggtggacctggcgggcagcgagcggcagtccaagaccggggccacgggcgagcggctcaaggaggccaccaagatcaacctgtcgctctcggcactgggcaatgtcatctcggcgctggtggacgggcgctgtaagcacgtcccctaccgtgactcgaagctgacgcggctgctgcaggactcactgggcggcaacaccaagacgctcatggtggcctgcctgtcgcctgcggacaacaactacgatgagacactcagcacgctgcgctacgccaaccgggccaagaacatcaggaacaagccgcgcatcaatgaggaccccaaggatgcgctgcttcgcgagtaccaggaggagatcaagaagctcaaggccatcctgacacagcagatgagccccagcagcctgtcagccctgctgtccaggcaggtgcccccagaccctgtgcaggtggaggagaagctgttgccccaacctgtgatccagcatgacgtggaggccgagaagcagctgatccgggaggagtatgaagagcgcctggcccggctgaaagccgactataaggccgagcaggagtctcgggccaggctggaggaagacatcactgccatgcgcaactcatatgacgtcaggctgtccacgctggaggagaacctgcggaaggagacagaggctgtcctgcaggtgggagtcctctacaaggctgaggtcatgtccagggctgagtttgccagcagcgctgagtacccgcctgcttttcagtatgagacagtggtgaaacccaaggtcttctccacgactgacactctgcccagtgacgatgtctccaagactcaggtttcctccaggtttgcggagctgcccaaggtggaaccctccaaatctgagatttctctgggctccagtgagtcatcctcgctcgaagaaacctctgtgtccgaggctttccctgggcctgaggagccctccaacgtggaggtctccatgcccactgaggagtccaggagcagatacttcctggatgagtgcctcgggcaggaggccgctgggcacctgctgggggaacagaactacctcccgcaagaggagccgcaggaggtgcccctgcaggggttactaggcctgcaggacccgtttgccgaggtggaagccaagctggccagactctcctccaccgtggccaggacagatgcaccccaggcagacgtccccaaggtccctgtgcaggtccctgcgccgacagacctgctggagcccagtgatgccaggcccgaagccgaggcggctgatgacttcccgcccaggcctgaggtagatctggcctcggaagtggccttagaggtggtgcggacagcagagcctggcgtgtggttggaggctcaggccccggtggccctggtggctcagcctgagcccctgccggccacagctggtgtgaagagggagagcgtgggcatggaggtggcagtgctgactgatgacccgctgcccgttgtggaccagcagcaggtgctggcccgtctgcagctgttggagcagcaggttgtgggtggagagcaggccaagaacaaggacctgaaggagaagcacaagcggcgcaagcgctacgcagacgagcgcaggaagcagctggtggctgccctgcagaactcggatgaggacagcggggactgggtgctgcttaacgtctacgactccatccaggaggaagtgcgggccaagagcaagctgctggagaagatgcagaggaagcttcgggcagcagaggtggagatcaaagatctgcagtccgagtttcagctggagaagatcgattacttggccaccatccgccggcaggagcgtgactccatgctcttgcagcagctcctggagcaggtgcagcccctgattcgcagggactgtaactacagcaacctggagaagattctgcgtgagtcctgctgggacgaagataacggcttctggaagatcccacatcccgtcatcacaaaaaccagcctcccagtagtttcaactgggccacagaacaaaccagcccgcaaaacctctgcagcagacaatggcgagccgaacatggaggacgaccgctacaggctcatgctcagtcggagcaacagtgaaaacattgccagcaactacttccgatctaagcgggccagccagatcctcagcacagacgccaggaagagcctcacacatcacaactcgccaccaggcctcagctgcccactcagcaacaactctgccatcccacccacccaggcccctgaaatgccccagccccggcccttccgcctcgagtccctcgacatccctttcaccaaggccaagcgtaagaaaagcaaaagcaactttggcagtgagcctctgtgagcacagctgcttgccattgcctgccttataggcatgtagagactgccaggccctcccagggcagccccaaccaggtctcctcccacctgccacacagcgctccggggcctgagggctccctcagccctgggaagacacattcccttccctgttccccagagagcccacctccgccctgggcaggagcccctcggaggctgtatagtcctccttagagaggcctgctccagctgttcataccacatcagtgtttccgtctgctcacctgccacagagcccacacccatgcccaccagtgttggtctttgcctcaaagcctgagacctgcttcacggccttcaccagccctgatggagagggcagcagctgccacgtggaggaagctcaatatcagctgggaaggaactgtgcctctgtctgactggccccacttcctaagcactgccctgccccatggggtggcacaggggtcccacagcaggtcttcctgcactgcccacccctggctggtctgtggcccaaggaaggccactccacattaagctgcccaataaactgcttttaagataa

SEQ ID NO: 146686 - DNA, 3568 bp, Homo sapiens
  Payload ID: 9018
  Gene Symbol: KIF18A
  Gene Name: kinesin family member 18A
  Uniprot ID: Q8NI77
  ENST ID: ENST00000263181
  CDS Start-End: 292-2988
gacgagcaagcaaagagcttcccctgcgcagccaggctgagcttcttggcgccaagctgccgcgagccgtgacagcgtccgacgtgatgacatcacgcgagcggcagccaatgaaacgaagcgctgaggaaagtggcttgggtttgaatattgtggttgagtctgaagcgctgggaggcggacattaaagtgaagtggttgcggtaacctggcctgggcctgaagtgagtgagaggcacatgaagagaagtattcaagtatttatacagataggaatcaagataatcaacaatgtctgtcactgaggaagacctgtgccaccatatgaaagtagtagttcgtgtacgtccggaaaacactaaagaaaaagcagctggatttcataaagtggttcatgttgtggataaacatatcctagtttttgatcccaaacaagaagaagtcagttttttccatggaaagaaaactacaaatcaaaatgttataaagaaacaaaataaggatcttaaatttgtatttgatgctgtttttgatgaaacgtcaactcagtcagaagtttttgaacacactactaagccaattcttcgtagttttttgaatggatataattgcacagtacttgcctatggtgccactggtgctgggaagacccacactatgctaggatcagctgatgaacctggagtgatgtatctaacaatgttacacctttacaaatgcatggatgagattaaagaagagaaaatatgtagtactgcagtttcatatctggaggtatataatgaacagattcgtgatctcttagtaaattcagggccacttgctgtccgggaagatacccaaaaaggggtggtcgttcatggacttactttacaccagcccaaatcctcagaagaaattttacatttattggataatggaaacaaaaacaggacacaacatcccactgatatgaatgccacatcttctcgttctcatgctgttttccaaatttacttgcgacaacaagacaaaacagcaagtatcaatcaaaatgtccgtattgccaagatgtcactcattgacctggcaggatctgagcgagcaagtacttccggtgctaaggggacccgatttgtagaaggcacaaatattaatagatcacttttagctcttgggaatgtcatcaatgccttagcagattcaaagagaaagaatcagcatatcccttacagaaatagtaagcttactcgcttgttaaaggattctcttggaggaaactgtcaaactataatgatagctgctgttagtccttcctctgtattctacgatgacacatataacactcttaagtatgctaaccgggcaaaggacattaaatcttctttgaagagcaatgttcttaatgtcaataatcatataactcaatatgtaaagatctgtaatgagcagaaggcagagattttattgttaaaagaaaaactaaaagcctatgaagaacagaaagccttcactaatgaaaatgaccaagcaaagttaatgatttcaaaccctcaggaaaaagaaatcgaaaggtttcaagaaatcctgaactgcttgttccagaatcgagaagaaattagacaagaatatctgaagttggaaatgttacttaaagaaaatgaacttaaatcattctaccaacaacagtgccataaacaaatagaaatgatgtgttctgaagacaaagtagaaaaggccactggaaaacgagatcatagacttgcaatgttgaaaactcgtcgctcctacctggagaaaaggagggaggaggaattgaagcaatttgatgagaatactaattggctccatcgtgtcgaaaaagaaatgggactcttaagtcaaaacggtcatattccaaaggaactcaagaaagatcttcattgtcaccatttgcacctccagaacaaagatttgaaagcacaaattagacatatgatggatctagcttgtcttcaggaacagcaacacaggcagactgaagcagtattgaatgctttacttccaaccctaagaaaacaatattgcacattaaaagaagccggcctgtcaaatgctgcttttgaatctgacttcaaagagatcgaacatttggtagagaggaaaaaagtggtagtttgggctgaccaaactgccgaacaaccaaagcaaaacgatctaccagggatttctgttcttatgacctttccacaacttggaccagttcagcctattccttgttgctcatcttcaggtggaactaatctggttaagattcctacagaaaaaagaactcggagaaaactaatgccatctcccttgaaaggacagcatactctaaagtctccaccatctcaaagtgtgcagctcaatgattctcttagcaaagaacttcagcctattgtatatacaccagaagactgtagaaaagcttttcaaaatccgtctacagtaaccttaatgaaaccatcatcatttactacaagttttcaggctatcagctcaaacataaacagtgataattgtctgaaaatgttgtgtgaagtagctatccctcataatagaagaaaagaatgtggacaggaggacttggactctacatttactatatgtgaagacatcaagagctcgaagtgtaaattacccgaacaagaatcactaccaaatgataacaaagacattttacaacggcttgatccttcttcattctcaactaagcattctatgcctgtaccaagcatggtgccatcctacatggcaatgactactgctgccaaaaggaaacggaaattaacaagttctacatcaaacagttcgttaactgcagacgtaaattctggatttgccaaacgtgttcgacaagataattcaagtgagaagcacttacaagaaaacaaaccaacaatggaacataaaagaaacatctgtaaaataaatccaagcatggttagaaaatttggaagaaatatttcaaaaggaaatctaagataaatcacttcaaaaccaagcaaaatgaagttgatcaaatctgcttttcaaagtttatcaataccctttcaaaaatatatttaaaatctttgaaagaagacccatcttaaagctaagtttacccaagtactttcagcaagcagaaaaatgaaactctttgttttcttcttttgtgttctaaaaaaataaaatttcaaaagaaaaggttgtcttttaagttttttaaatatttgttgccttttaaaatccctgagtgtaagttaccatggtggcagcttagttttactatgccacaacaagttgactaggacattttagtaaatggtagtgagttaaattatctttattattttttaaaaataagaatttagaagtggtaaaattatggcccaagatgtatttggttctctattatgttttgatacattattttaatcatatatatgactttccttttcaaaaatactttaatgtacaagtgtaaatatatgtgcccataaaatcattgtaaatattatttagtcatcacaaataaaatattgtcccttgctacttgatatattaaagatgtagattttaaagt

SEQ ID NO: 146687 - DNA, 4217 bp, Homo sapiens
  Payload ID: 9019
  Gene Symbol: KIF18B
  Gene Name: kinesin family member 18B
  ENST ID: ENST00000587309
  CDS Start-End: 25-2526
ccgacgaaaggtgtcaccacagtgatggcagtggaggacagcacgctgcaagtagtggtacgggtgcggccccccacccctcgggagctggacagtcagcggcggccagtggttcaggtggtggacgagcgggtgctggtgtttaaccctgaggagcccgatggagggttccctggcctgaaatggggtggcacccatgatggccccaagaagaagggcaaagacctgacgtttgtctttgaccgggtctttggcgaggcggccacccaacaggacgtgttccagcacaccacgcacagcgtcctggacagcttcctccagggctacaactgctcagtgtttgcctacggggccaccggggctgggaagacacacaccatgctgggaagggagggggaccccggcatcatgtacctgaccaccgtggaactgtacaggcgcctggaggcccgccagcaggagaagcacttcgaggtgctcatcagctaccaggaggtgtataatgaacagatccatgacctcctggagcccaaggggccccttgccatccgcgaggaccccgacaagggggtggtggtgcaaggactttctttccaccagccagcctcagccgagcagctgctggagatactgaccagggggaaccgtaaccgcacgcagcaccccactgatgccaacgcgacttcctcccgctcccatgccatcttccagatctttgtgaagcagcaggaccgggttccaggactgacccaggctgtccaggtggccaagatgagcctgattgacctggctggctcagagcgggcatccagcacccatgcgaagggggagcggctgcgggagggggccaacatcaaccgctctctgctggcgctcatcaacgtcctcaatgccttggccgatgcaaagggccgcaagacccatgtgccctaccgggacagcaaactgacccgcctgctcaaagactccctcgggggcaactgccgcacagtgatgatcgctgccatcagcccctccagcctgacctacgaggacacgtacaacaccctcaaatatgccgaccgggccaaggagatcaggctctcgctgaagagcaatgtgaccagcctggactgtcacatcagccagtatgctaccatctgccaacagctccaggctgaggtagccgctctgaggaagaagctccaagtgtatgaggggggaggccagcccccaccacaggacctcccaggatctcccaagtcgggaccaccaccagaacaccttcccagctcccccttgccaccccaccctcccagccagccctgcaccccagagctccctgcagggcctagagcccttcaagaggagagtctggggatggaggcccaggtggagagggccatggaagggaactcttcagaccaggagcagtccccagaggatgaggatgaaggcccagctgaggaggttccaacccagatgccagagcagaaccccacacatgcactgccagagtcccctcgcctgaccctgcagcccaagccagtcgtgggccacttctcagcacgggaactggatggggaccgttctaagcagttggccctaaaggtgctgtgcgttgcccagcggcagtactccctgctccaagcagccaacctcctgacgcccgacatgatcacagagtttgagaccctacagcagctggtgcaagaggaaaaaattgagcctggggcagaggccttgaggacttcaggcctggccaggggggcacctctggctcaggagctgtgttcagagtcaatccctgtgccgtctcctctctgcccagagcctccaggatacactggccctgtgacccggactatggcgaggcgactgagtggccccctgcacaccctgggaatcccgcctggacccaactgcaccccagcccaggggtcccgatggcccatggagaagaagaggaggagaccaagcgccttggaggcagacagtcccatggccccaaagcggggcaccaagcgccagcgccagtccttcctgccctgcctaaggagagggtctctgcctgacacccaaccttcacaggggcccagcacccccaaaggagaaagggcctcctccccctgccattcccctcgcgtttgcccagccacagtcatcaaaagccgggtgcccctgggcccttccgccatgcagaactgctccaccccgctggctctgcccactcgagacctcaatgccacctttgatctctctgaggagcctccctcaaagcccagtttccatgaatgcattggctgggacaaaataccccaggagctgagcaggctggaccagcccttcatccccagggcacctgtgcccctgttcaccatgaagggccccaagccaacatcttccctccctgggacctctgcctgcaagaagaagcgcgttgcgagttcctcagtctcccatggccgcagccgcatcgcccgcctccccagcagcactttgaagaggccagctgggccccttgtactcccaggtgactggcactagggacagggatagcctgggccatggaggccgatgaagacaagaaggaggaggggacggggagctgagacccagaagaaaggagggcctagggtattgccaagcatctcagggatgctgctgatgagacaggtgggaggtgggctggaggacggggacagagcgtcactttccttcctcgctgcactccccgccacccatccaactggcctgcagagctgcccttgagtcccctgtgccctagcaaccggaggaatggaaaggacctcatcagggtggggagagcactctcagcagggaacggcgtcaccaaggtgtcctgaccgccagaatgtcctgaccaccaaggtgtcctaacctaccggcccctctgctggatacccctcttggacctgtagccacctgcaccaggagctggacctgccttccttacctgggagcaattagtgccaacacacctttgctgtattaacatccctccccagacatccatcctgctactcaccctctgttaatctcctgttacactcagcttcttggcatgtacatattcatttgtgagtgttaatgtgctgctgttttttgttttttggtggtttttgttttttgttttttttgttttgagatggagtcttactctgtcgcccaggctggagtgcagtggtacgatcttggctcactgcaacctccgcctcctgggttcaagtaattctcctgcctcagctttccaagtagctgggattacaggcacccatcaccacacccagctaattttcgtctttttaatagagagggggtttttccatgttggccaggctggtcttgaactcctgacctcaggtgatccgcctgcctcagcttcccaaagtgctgagattacaggcatgagctaccacgcctggcccgtgttgctgttttaaaggtgctgccatgttcccccatcttttttttttttgagatggagtctcgctctgtcgcccaggctggagtgcagtggtggcgatcttggctcactgcaagctccgcctcccaggttcacaccattctcctgcctcagcctcccaagtagctgggactacaggcgcccaccaccacgcctggctaattttttgtatttttagtagagatggggtttcaccgtgttagccaggctggtctcgatctgacctcatgatccacccgcctcggcctcccaaagtgctgggattacaggcgtgagccactgcgcccggcctcccctctcatttatgatgccctctgtgcaggcagacggctcttgggctcttttccccacctgtctctaacacaggccccacggtgatggccacaggcagtagaggaggaatgaggatgggttggggagcggggagtcgcggcttggctcttcctggtttctgagagggacatcttcatccctactccccttggtccccaaccacagtcctggtgaagatgtggatgataatggtgccttgatttccaaatgaagacagctttattgcttaactctattgtacataggatacacgttcagtgtaaaataaagtgtaaaggggaattcaggcttaatgctgcacctagatataaatgctaatgatacttgggtttatagccttctgatcctttatttctgcatatatatatagatatatacatatatttttggtataacaataaaccgtctccatccttgg

SEQ ID NO: 146688 - DNA, 2569 bp, Homo sapiens
  Payload ID: 9019
  Gene Symbol: KIF18B
  Gene Name: kinesin family member 18B
  Uniprot ID: Q86Y91
  ENST ID: ENST00000590129
  CDS Start-End: 1-2529
atgtctcacccaggtgtcaccacagtgatggcagtggaggacagcacgctgcaagtagtggtacgggtgcggccccccacccctcgggagctggacagtcagcggcggccagtggttcaggtggtggacgagcgggtgctggtgtttaaccctgaggagcccgatggagggttccctggcctgaaatggggtggcacccatgatggccccaagaagaagggcaaagacctgacgtttgtctttgaccgggtctttggcgaggcggccacccaacaggacgtgttccagcacaccacgcacagcgtcctggacagcttcctccagggctacaactgctcagtgtttgcctacggggccaccggggctgggaagacacacaccatgctgggaagggagggggaccccggcatcatgtacctgaccaccgtggaactgtacaggcgcctggaggcccgccagcaggagaagcacttcgaggtgctcatcagctaccaggaggtgtataatgaacagatccatgacctcctggagcccaaggggccccttgccatccgcgaggaccccgacaagggggtggtggtgcaaggactttctttccaccagccagcctcagccgagcagctgctggagatactgaccagggggaaccgtaaccgcacgcagcaccccactgatgccaacgcgacttcctcccgctcccatgccatcttccagatctttgtgaagcagcaggaccgggttccaggactgacccaggctgtccaggtggccaagatgagcctgattgacctggctggctcagagcgggcatccagcacccatgcgaagggggagcggctgcgggagggggccaacatcaaccgctctctgctggcgctcatcaacgtcctcaatgccttggccgatgcaaagggccgcaagacccatgtgccctaccgggacagcaaactgacccgcctgctcaaagactccctcgggggcaactgccgcacagtgatgatcgctgccatcagcccctccagcctgacctacgaggacacgtacaacaccctcaaatatgccgaccgggccaaggagatcaggctctcgctgaagagcaatgtgaccagcctggactgtcacatcagccagtatgctaccatctgccaacagctccaggctgaggtagccgctctgaggaagaagctccaagtgtatgaggggggaggccagcccccaccacaggacctcccaggatctcccaagtcgggaccaccaccagaacaccttcccagctcccccttgccaccccaccctcccagccagccctgcaccccagagctccctgcagggcctagagcccttcaagaggagagtctggggatggaggcccaggtggagagggccatggaagggaactcttcagaccaggagcagtccccagaggatgaggatgaaggcccagctgaggaggttccaacccagatgccagagcagaaccccacacatgcactgccagagtcccctcgcctgaccctgcagcccaagccagtcgtgggccacttctcagcacgggaactggatggggaccgttctaagcagttggccctaaaggtgctgtgcgttgcccagcggcagtactccctgctccaagcagccaacctcctgacgcccgacatgatcacagagtttgagaccctacagcagctggtgcaagaggaaaaaattgagcctggggcagaggccttgaggacttcaggcctggccaggggggcacctctggctcaggagctgtgttcagagtcaatccctgtgccgtctcctctctgcccagagcctccaggatacactggccctgtgacccggactatggcgaggcgactgagtggccccctgcacaccctgggaatcccgcctggacccaactgcaccccagcccaggggtcccgatggcccatggagaagaagaggaggagaccaagcgccttggaggcagacagtcccatggccccaaagcggggcaccaagcgccagcgccagtccttcctgccctgcctaaggagagggtctctgcctgacacccaaccttcacaggggcccagcacccccaaaggagaaagggcctcctccccctgccattcccctcgcgtttgcccagccacagtcatcaaaagccgggtgcccctgggcccttccgccatgcagaactgctccaccccgctggctctgcccactcgagacctcaatgccacctttgatctctctgaggagcctccctcaaagcccagtttccatgaatgcattggctgggacaaaataccccaggagctgagcaggctggaccagcccttcatccccagggcacctgtgcccctgttcaccatgaagggccccaagccaacatcttccctccctgggacctctgcctgcaagaagaagcgcgttgcgagttcctcagtctcccatggccgcagccgcatcgcccgcctccccagcagcactttgaagaggccagctgggccccttgtactcccaggtgactggcactagggacagggatagcctgggccatggaggccgatgaagacaa

SEQ ID NO: 146689 - DNA, 2745 bp, Homo sapiens
  Payload ID: 9019
  Gene Symbol: KIF18B
  Gene Name: kinesin family member 18B
  ENST ID: ENST00000593135
  CDS Start-End: 99-2657
tcccggtgtgggtactgctgtctgtggtgtggctgtgggacccgtgagcaagcagcgacgccagcggcggagaaccgacgaaaggtgtcaccacagtgatggcagtggaggacagcacgctgcaagtagtggtacgggtgcggccccccacccctcgggagctggacagtcagcggcggccagtggttcaggtggtggacgagcgggtgctggtgtttaaccctgaggagcccgatggagggttccctggcctgaaatggggtggcacccatgatggccccaagaagaagggcaaagacctgacgtttgtctttgaccgggtctttggcgaggcggccacccaacaggacgtgttccagcacaccacgcacagcgtcctggacagcttcctccagggctacaactgctcagtgtttgcctacggggccaccggggctgggaagacacacaccatgctgggaagggagggggaccccggcatcatgtacctgaccaccgtggaactgtacaggcgcctggaggcccgccagcaggagaagcacttcgaggtgctcatcagctaccaggaggtgtataatgaacagatccatgacctcctggagcccaaggggccccttgccatccgcgaggaccccgacaagggggtggtggtgcaaggactttctttccaccagccagcctcagccgagcagctgctggagatactgaccagggggaaccgtaaccgcacgcagcaccccactgatgccaacgcgacttcctcccgctcccatgccatcttccagatctttgtgaagcagcaggaccgggttccaggactgacccaggctgtccaggtggccaagatgagcctgattgacctggctggctcagagcgggcatccagcacccatgcgaagggggagcggctgcgggagggggccaacatcaaccgctctctgctggcgctcatcaacgtcctcaatgccttggccgatgcaaagggccgcaagacccatgtgccctaccgggacagcaaactgacccgcctgctcaaagactccctcgggggcaactgccgcacagtgatgatcgctgccatcagcccctccagcctgacctacgaggacacgtacaacaccctcaaatatgccgaccgggccaaggagatcaggctctcgctgaagagcaatgtgaccagcctggactgtcacatcagccagtatgctaccatctgccaacagctccaggctgaggtagccgctctgaggaagaagctccaagtgtatgaggggggaggccagcccccaccacaggacctcccaggatctcccaagtcgggaccaccaccagaacaccagccctgcaccccagagctccctgcagggcctagagcccttcaagaggagagtctggggatggaggcccaggtggagagggccatggaagggaactcttcagaccaggagcagtccccagaggatgaggatgaaggcccagctgaggaggttccaacccagatgccagagcagaaccccacacatgcactgccagagtcccctcgcctgaccctgcagcccaagccagtcgtgggccacttctcagcacgggaactggatggggaccgttctaagcagttggccctaaaggtgctgtgcgttgcccagcggcagtactccctgctccaagcagccaacctcctgacgcccgacatgatcacagagtttgagaccctacagcagctggtgcaagaggaaaaaattgagcctggggcagaggccttgaggacttcaggcctggccaggggggcacctctggctcaggagctgtgttcagagtcaatccctgtgccgtctcctctctgcccagagcctccaggatacactggccctgtgacccggactatggcgaggcgactgagtggccccctgcacaccctgggaatcccgcctggacccaactgcaccccagcccaggggtcccgatggcccatggagaagaagaggaggagaccaagcgccttggaggcagacagtcccatggccccaaagcggggcaccaagcgccagcgccagtccttcctgccctgcctaaggagagggtctctgcctgacacccaaccttcacaggggcccagcacccccaaaggagaaagggcctcctccccctgccattcccctcgcgtttgcccagccacagtcatcaaaagccgggtgcccctgggcccttccgccatgcagaactgctccaccccgctggctctgcccactcgagacctcaatgccacctttgatctctctgaggagcctccctcaaagcccagtttccatgaatgcattggctgggacaaaataccccaggagctgagcaggctggaccagcccttcatccccagggcacctgtgcccctgttcaccatgaagggccccaagccaacatcttccctccctgggacctctgcctgcaagaagaagcgcgttgcgagttcctcagtctcccatggccgcagccgcatcgcccgcctccccagcagcactttgaagaggccagctgggccccttgtactcccagagctgcccttgagtcccctgtgccctagcaaccggaggaatggaaaggacctcatcagggtggggagagcactctcagcagggaacggcgtcaccaaggtgtcctgaccgccagaatgtcctgaccaccaaggtgtcctaacctaccggcccctctgctggatacccctcttggacctgtagccacctgcaccag

SEQ ID NO: 146690 - DNA, 3643 bp, Homo sapiens
  Payload ID: 9020
  Gene Symbol: KIF19
  Gene Name: kinesin family member 19
  Uniprot ID: Q2TAC6
  ENST ID: ENST00000389916
  CDS Start-End: 139-3135
gcgttgttggtttcgggttgtcaggcagcgcgcgaggcggcgggcagctagcagctggcggacgcgacccggaggcggtgggggtgcggctgagccatgcccggtggcgcggcctgagcccctccacctgctgcaatcatgaaggacagcggggactccaaggaccagcaactcatggtggcgcttcgggtccggcccatcagcgtggcagagctggaggaaggagctaccctcatcgcccataaagtggatgagcagatggtggttctcatggacccaatggaggatcccgacgacatcctgcgggcgcatcgctcccgggagaagtcctacctgttcgacgtggcctttgacttcaccgccacccaggagatggtgtatcaggccaccaccaagagcctcatcgagggcgtcatctcaggctacaatgccactgtctttgcctatggccccacaggctgtgggaaaacctacaccatgctgggcacagaccaggagcctggcatctatgttcagaccctcaacgacctcttccgtgccatcgaggagaccagcaatgacatggagtatgaggtctccatgtcctacctggagatctacaatgagatgatccgggacctgctgaacccctccctgggctacctggagctgcgggaggactctaagggggtgatccaggtggccggcatcaccgaagtctccaccatcaatgccaaggagatcatgcagctgctgatgaaggggaaccggcagaggacccaggagcccacggccgccaaccagacgtcctcccgctcccacgcggtactgcaggtgaccgtgcgccagcgcagccgggtcaagaacatcttgcaggaggtgcggcagggccgcctgttcatgatcgacctggctggctcagagcgcgcctcgcagacacagaatcgtgggcagcgtatgaaggagggggcccacatcaaccgctcactgctggcactgggcaactgcatcaacgccctgagcgacaagggtagcaacaagtacatcaactatcgcgacagcaagctcacccggctcctgaaggactctctgggaggaaacagccgcacagtgatgatcgctcacatcagtcctgcgagcagtgccttcgaggagtcccggaacaccctgacctacgccggccgggccaagaacattaagactagggtgaagcagaacctcctgaacgtctcctaccacatcgcccagtacaccagcatcatcgctgacctgcggggcgagatccagcgactcaagcgcaagattgatgagcagactgggcggggccaggcccggggccggcaggatcggggtgacatccgccacatccaagctgaggtccagctgcacagcgggcagggtgagaaggctggcatgggacagcttcgggagcagctcgccagcgccttccaggagcagatggatgtgcggaggcgcctgctggagctggagaaccgcgccatggaggtccagattgacacctcccgacacctgctcaccatcgccggctggaagcatgagaagtcccgccgggccctcaaatggcgggaggagcagcgaaaggagtgctacgctaaggacgacagcgagaaggactcagacacaggtgatgaccaaccagacatcctggagccacccgaggtggccgcagcccgggagagcattgcagccctggtggacgagcagaagcaactgcgcaagcagaagctggcgctggagcagcgctgccgggagctgcgcgcgcggggccggcgcctggaggagacgctgccgcggcgcatcggctccgaggagcagcgcgaggtgctcagcctgctgtgccgcgtgcacgagctcgaggtggagaacaccgagatgcagtcgcacgcgctgctccgcgacggtgcgctccgccaccgccacgaggccgtgcgccgcctggagcagcaccgcagtctctgcgacgagattatccagggccagcggcagatcatcgacgactacaacctggccgtcccgcagcgcctggaagagctctacgaagtgtacctgcgggagctggaggagggcagcctggagcaggccaccatcatggaccaagtggcctccagggccctgcaggacagctccttgcccaaaattaccccagcaggaacctcactgaccccagattctgacctggagagtgtgaagacattgagctctgatgcccagcacctgcagaacagcgccctccctcccctcagcacagagagtgaaggccaccacgtgttcaaggctggtactggggcctggcaggcaaaaagctcctctgtgcccaccccacctcccatccagctcggcagcctggtgacgcaggaggccccggctcaggacagcctgggcagctggatcaactcttcccctgacagcagtgagaacctgtcggagatccccttgtcccacaaagagaggaaggagatcctgactggcaccaagtgcatctgggtgaaggccgcccggcggcgctcgcgggccctgggaaccgaggggcgacacctgctggcacccgcgacagagcgcagcagcctgtccctgcactcactgagcgagggcgacgatgcgcggccaccaggcccactggcctgcaagcggccgcccagccccacactacagcatgctgccagtgaggacaacctgtccagcagcacgggcgaggccccgtcccgggcagtcggacatcatggggacggccccaggccctggctgcgtggccagaagaaaagcctgggcaagaaaagggaggagtcgctggaggcaaagagaaggaagcggaggtcccgatccttcgaggtcaccgggcaagggctctcccaccccaagacacacctcctggggccccatcaggcggagcgcatctcggaccacaggatgccagtgtgcaggcacccagcccctggtatccggcatctgggaaaggtcacgctacctttggccaaagtcaaactccctccaagccagaacacgggcccgggggactcctcacccctggctgttccccccaacccaggtggtggttctcgacgggctacccgtgggccccgcctgccccacggcacaagcacccatggcaaagatggatgctcccggcataactgaggggccctgcctggaactggctctctcacctcccaagactgaatggggtctagcagggcatgggaggtggaggctgggcagatggagatgaccaggaagtaagctcaggatctcagcaggccagggctcctgagacccaggaactggggtctctgcccaaccctcccatgctttcagtgccactggggaaaagaggtgaggccaggggacatggccaggacggctgggctccctggcttcccagccctggacagaatgctgttgccaaaacctgcacagccctgaggccagcctcggccttggtaacggaggaaagcagctgacagtgagacggggctcctggcccacgtgtggggcacgggcatcctggatggttggggaggcgccgacaggcacttcacgtattacaattggggatgtgggtgagggagggaatctggttttgttacttggcagtggttttttctcacccttcctttttaacaataaaatcccatttgggtcttga

SEQ ID NO: 146691 - DNA, 1980 bp, Homo sapiens
  Payload ID: 9020
  Gene Symbol: KIF19
  Gene Name: kinesin family member 19
  ENST ID: ENST00000551294
  CDS Start-End: 141-1980
gcgcgttgttggtttcgggttgtcaggcagcgcgcgaggcggcgggcagctagcagctggcggacgcgacccggaggcggtgggggtgcggctgagccatgcccggtggcgcggcctgagcccctccacctgctgcaatcatgaaggacagcggggactccaaggaccagcaactcatggtggcgcttcgggtccggcccatcagcgtggcagagctggaggaaggagctaccctcatcgcccataaagtggatgagcagatggtggttctcatggacccaatggaggatcccgacgacatcctgcgggcgcatcgctcccgggagaagtcctacctgttcgacgtggcctttgacttcaccgccacccaggagatggtgtatcaggccaccaccaagagcctcatcgagggcgtcatctcaggctacaatgccactgtctttgcctatggccccacaggctgtgggaaaacctacaccatgctgggcacagaccaggagcctggcatctatgttcagaccctcaacgacctcttccgtgccatcgaggagaccagcaatgacatggagtatgaggtctccatgtcctacctggagatcatgcagctgctgatgaaggggaaccggcagaggacccaggagcccacggccgccaaccagacgtcctcccgctcccacgcggtactgcaggtgaccgtgcgccagcgcagccgggtcaagaacatcttgcaggaggtgcggcagggccgcctgttcatgatcgacctggctggctcagagcgcgcctcgcagacacagaatcgtgggcagcgtatgaaggagggggcccacatcaaccgctcactgctggcactgggcaactgcatcaacgccctgagcgacaagggtagcaacaagtacatcaactatcgcgacagcaagctcacccggctcctgaaggactctctgggaggaaacagccgcacagtgatgatcgctcacatcagtcctgcgagcagtgccttcgaggagtcccggaacaccctgacctacgccggccgggccaagaacattaagactagggtgaagcagaacctcctgaacgtctcctaccacatcgcccagtacaccagcatcatcgctgacctgcggggcgagatccagcgactcaagcgcaagattgatgagcagactgggcggggccaggcccggggccggcaggatcggggtgacatccgccacatccaagctgaggtccagctgcacagcgggcagggtgagaaggctggcatgggacagcttcgggagcagctcgccagcgccttccaggagcagatggatgtgcggaggcgcctgctggagctggagaaccgcgccatggaggtccagattgacacctcccgacacctgctcaccatcgccggctggaagcatgagaagtcccgccgggccctcaaatggcgggaggagcagcgaaaggagtgctacgctaaggacgacagcgagaaggactcagacacaggtgatgaccaaccagacatcctggagccacccgaggtggccgcagcccgggagagcattgcagccctggtggacgagcagaagcaactgcgcaagcagaagctggcgctggagcagcgctgccgggagctgcgcgcgcggggccggcgcctggaggagacgctgccgcggcgcatcggctccgaggagcagcgcgaggtgctcagcctgctgtgccgcgtgcacgagctcgaggtggagaacaccgagatgcagtcgcacgcgctgctccgcgacggtgcgctccgccaccgccacgaggccgtgcgccgcctggagcagcaccgcagtctctgcgacgagattatccagggccagcggcagatcatcgacgactacaacctggccgtcccgcagcgcctggaagagctctacgaagtgtacctgcgggagctggaggagggcagcctggagcaggccaccatcatggaccaagtggcct

SEQ ID NO: 146692 - DNA, 8832 bp, Homo sapiens
  Payload ID: 9021
  Gene Symbol: KIF1A
  Gene Name: kinesin family member 1A
  Uniprot ID: Q12756
  ENST ID: ENST00000320389
  CDS Start-End: 160-5232
cacagcgcagagcagccggcgagcggcagcagctccgggctcgagagcccgcgcccatgccagtgcccatgcggggccgccgccagtgacgccggagaggtgttccccccacactggggctcccactactgcgaggagtgacccacgaaggccacagagatggccggggcttcggtgaaggtggcggtgcgggtccgccccttcaattcccgggaaatgagccgtgactccaagtgcatcattcagatgtctggaagcaccaccaccattgttaaccccaaacagcccaaggagacgcccaaaagcttcagctttgactactcctactggtcgcacacctcacctgaggacatcaactacgcgtcgcagaagcaggtgtaccgggacatcggcgaggagatgctgcagcatgcctttgagggatacaacgtgtgcatcttcgcctatgggcagacgggtgccggcaagtcctacaccatgatgggcaagcaggagaaggaccagcagggcatcatcccacagctctgcgaggacctcttctctcggatcaacgacacgaccaacgacaacatgtcctactccgtggaggtcagctacatggagatttactgtgagcgcgtccgtgacctcctgaaccccaagaacaagggcaaccttcgcgtgagggagcacccactgctggggccctacgtggaggacctctccaagctggctgtcacctcctacaatgacatccaggacctcatggactcagggaacaaggccaggaccgtggcggccaccaacatgaatgagaccagcagtcgctcccacgccgtcttcaacatcatcttcacccagaagcgccatgacgcagagaccaatatcaccacggagaaggtgagcaaaatcagcctggtggacctggctgggagcgagcgggctgactccacgggagccaagggcacgcgcctcaaggagggggccaacatcaacaagtcgctgaccaccctgggcaaggtcatctccgccctggctgaaatggactccggacccaacaagaacaagaaaaagaagaagacagatttcattccgtaccgagattccgtgttgacctggctcctccgggaaaacctgggcggtaactcaaggacagctatggtggcagccttgagtcctgcagacatcaactacgatgagacccttagcacgctgaggtatgctgaccgggccaagcagatccgctgcaatgctgtcatcaatgaggaccccaacaacaagctgatccgcgagctgaaggatgaggtgacccggctgcgggaccttctgtacgcccagggtcttggcgacatcactgacatgaccaatgccctggtgggtatgagcccctcatcctcgctctcagccctgtccagccgcgcggcctccgtgtccagcctccacgagcgcatcttgtttgccccgggcagcgaggaggccattgaaagactgaaggaaacagagaagatcatagctgagctcaatgagacctgggaggagaagctgcggcggacagaagccatccggatggagagggaagccctgctggccgagatgggtgtggccatgagggaggatggcggcaccttgggcgtattctctcccaaaaagacaccacacctcgtcaacctgaacgaggacccgctgatgtctgagtgcctgctctactacatcaaggatgggatcaccagagtgggcagggaggatggcgagaggcggcaggacattgttctgagtgggcacttcatcaaggaggagcactgcgtcttccggagcgactccaggggaggcagcgaagctgtggtgaccttggagccctgtgagggggcagacacctacgtcaatggcaagaaagtcacagagcccagcatcctgcgttcaggaaaccgcatcatcatgggtaagagccatgtgttccggttcaaccaccccgagcaggcccggcaggagcgtgagcgcacgccttgtgcggagacgccagctgagcctgtggactgggccttcgcccagcgtgagctgctggagaagcagggcatcgacatgaagcaggagatggagcagaggctccaggaactggaggaccagtaccgccgcgagcgggaggaggccacctacctgctggagcagcagcggctggactatgagagcaagctggaggctctgcagaagcagatggactccaggtactacccggaggtgaacgaggaggaggaggagcccgaggatgaagtccagtggacagagcgggagtgtgagctggcgctctgggccttccggaagtggaagtggtaccagttcacgtctctgcgggacctgctgtggggcaacgccatcttcctcaaggaggccaatgccatcagcgtggagctgaaaaagaaggtacaattccagtttgtcctcctgacggacacactctactcccctctgccacccgacctgctgcccccagaggccgccaaagaccgagagacgcggcccttcccccgcaccattgtggccgtggaggtccaggaccagaagaacggggccacccactactggacgctggagaagctcaggcagcgtctggacctgatgcgggagatgtacgaccgcgctgcagaggtgccctccagtgtcatcgaggactgtgacaacgtggtgaccggcggagaccccttctatgaccgcttcccctggttccggctggtgggcagggccttcgtgtacctgagcaacctgctgtaccccgttcccctggtacaccgtgtggcaatcgtcagcgagaagggcgaggtgaagggcttcctccgcgtggccgtccaggccatctcagccgatgaagaggcccctgattatggctctggcgtccgccagtcgggaactgctaaaatctcctttgatgaccagcattttgaaaagttccagtccgagtcttgccccgtggtggggatgtcccgctcgggaacctcccaggaagagcttcgcatcgtggagggccagggccagggtgcagacgtggggccctcagccgatgaagtcaacaacaacacctgttcagcagtgcccccagaaggcctcctcctagacagctctgagaaagccgccctggatgggcccctggatgctgccctggaccacctccgcctgggcaacaccttcaccttccgtgtgacagtcctgcaggcgtccagcatctctgccgaatatgccgacatcttctgccagttcaacttcatccaccgccacgacgaggccttctccacagagcccctgaagaacacaggcagaggccccccacttggcttctaccacgtccagaacatcgcagtggaggtgaccaagtccttcattgagtacatcaagagccagcccattgttttcgaggtctttggccactaccagcagcacccgttcccgcccctctgcaaggacgtgctcagccccctgaggccctcgcgccgccacttccctcgggtcatgccactgtccaagccagtgcccgccaccaagctcagcacactgacgcggccctgtccgggaccctgccactgcaagtacgacctgctggtctacttcgagatctgtgagctggaggccaacggcgattacatcccggccgtggtggaccaccgtgggggcatgccatgcatggggaccttcctcctccaccagggcatccagcgacggattacggtgacactactgcatgagacaggcagccatatccgctggaaggaagtgcgcgagctggtcgtgggccgcatccgaaacactccagagaccgacgagtccctgatcgaccccaacatcttgtctctcaacatcctctcttccggatacatccacccagcccaagatgaccggaccttttaccaatttgaggctgcgtgggacagctccatgcacaactctctcctgctgaaccgggtcaccccttatcgagagaaaatctacatgacactctccgcttatatcgagatggagaactgcacccagccggctgttgtcaccaaggacttctgcatggtcttctattcccgtgatgccaagctgccagcctcgcgctccatccgcaacctctttggcagtgggagccttcgggcctcagagagtaaccgtgtgactggtgtgtacgagctcagcctgtgccacgtggctgacgcgggcagcccagggatgcagcgccggcgccgacgagtcctggacacatctgtggcctatgtccggggcgaggagaacctggcaggctggaggccccggagtgacagtctcattctggaccaccagtgggagctggagaagctgagcctcctgcaggaggtggagaagactaggcactacctgctcctgcgggagaagctggagaccgcccagcggcctgtcccggaggcactgtccccggccttcagcgaggactctgagtcccatggctcctccagcgcctcctccccgctctcggctgagggccgcccatcacccctggaggctcccaacgagaggcagcgggagctggccgtcaagtgcttgcgcctgctcacgcacacattcaacagagagtacacacacagccacgtctgcgtcagtgccagcgagagcaagctctccgagatgtctgtcaccctgctccgggacccgtcgatgtcccctctaggggtggccactctcaccccctcctccacttgcccctctctggttgaagggcggtacggtgccactgacctgaggaccccgcagccctgctcccggccagccagcccagagcccgagctgctgccagaggccgactccaagaagctcccttcccctgcccgggcaacagagacagacaaggagccccagcgcctgctggtccctgacatccaggagatccgagtcagcccgatcgtttccaagaaggggtacctgcacttcctggagccgcacacgtcaggctgggccaggcgcttcgtggtggtgcggcgcccctatgcctacatgtacaacagcgacaaggacaccgtggagcggttcgtgctcaacctggccactgcccaggtggagtacagtgaggaccagcaggctatgctcaagacacccaacacattcgcggtgtgcacggaacaccgcggcatcctgctgcaggccgccagcgacaaggacatgcatgactggctgtacgccttcaaccccctcctggccgggaccatacggtccaagctctccagaaggaggtctgcccagatgcgggtctgaacctgagccctcccgtgacagccggcaggcccagcccatcccctccctcatcctcgtctgtcctgtcacctgccgcccagcccctctcctgccagacagcccacgaccgggtcgaccccccaggggacgcccatgccaggcccggggacctgtgccacacgaccagctgtgctcccagcagaggctgtgcgtgtcagttcttcttgcagaatgtgctctggtggaacaagttgggagaggctgggggggccaagggcacaggttacgggggttcttgctgccgttctaatatttttttaagcatagacagacttataattaatatacgttagttagtgacattgaaacagtcaactcggaaattaactataagacttgttctatttataagtatttatttctaatgcctccacatagccctgtaatattcagatggaacccccaaccacctccaccctgtttgttcccacatgtgtctcccaagcctgctagggacaggcagggcagggacagccaccttggaaggccgcagtgaggagctgtctggaccagtggggcaccttggggctagcacacgggtgtatcgcctgggccccaggcttctccatggccacatgggtcctgggtgtatgtgtgggagagtgggggggtgtctttggtgcctgaagtctgcgcggcatggagggtggtgtgagttcctctggtgggagggagaacgcacatctcttctgggcggccacctgaggagtgactccaagaagagttccggcagctttccccaggaaagggtgaggggtgacactcggctctggctctgagatgaggcagacggcacccaggctgtgatctgtcctgggcggggaccaggagggagcggggtcgggatcacctgccagtgtgcagactctgggactgcgtgctgtctccggaccatcagggtagggtggtgggttgagaccaggaagtcagggaagatcggaattcagggcgacggtctaggtgtcgagggctgtggcgcagcctcttcagctgcggcgagaaatggagtgagtcaaggtagcttctgggaagaaatgctgccattagcaggtttcttgcaaagactttcctctctttgttcccagggcagagagtttctgtgagtcccactgagaaaatcccatggggtgggggtatcctggtcggtcggcaatggagggtggctggcttggtggttattgtcttcaaggagctcttcgctgctgcatctgcggtgtccctttgttcttgtcccatttcaccccctctgcagacaccaatgtccgagggccacccaggacaggacgggggtcagccccaagctgagagtctggtcataggagtcatgtccagaggcctagggaggttttagggccctccccacccacacccacaggtcgatttggtctctttttagctcaaggaaagacagtagccaagcaacagagcccctctcccgccgtggcccgtgggagcagttacatcgggtctggtgctccagacctagggcccagcactttcatcagatcctgcctcctggagtgggggaaacgcagcaccccactggttctgaggcccctaccctcccaggctgtcccacgtgatgctgacatgagcctcagagaccccaatcccatgcctgggggagagacagcggctcaggagtgggggagcacgggccttctacaccacatgggaaggctctggcatgaggttttcctttgggaaggttgtttgggcccctgaagttccatctccgagagtggtgtgcagggcaggccagggcccatgctggctgcagtctctgtggctgcctgcctgggccagcctgtttgggagctgggactgtgggctcgccttttcgtacctgggctcaggtgcggtgtggccaccgccaccctcatcccctgcctgggaggctctcccaggggctgatgggggggttctgtgagggagaatcagggctcgggaagccacgcctgggaaggcaggacacaggacacagcagctttctttggaaatctcccaggtgaggattcacatcccaaaataaaattcagaagccaggtggcctgtgctccccatgggtgacctctggaggcagtggaccaagatgcagcaaggagaggatgcagaacagcttcttgcagaagcacctgctccggcatccagcgctgcctggaggcaggaaggagaggcagggcaggacacgctggtctgagatgagggggagccccacgggccccaggcaggctagaggaggcacaggccctgccacggccaactcaggtcagccagcctgaggctgtggcctccaaagggtctgggcgcaccccccaggtcgcaggtgtctgaggccagccaacctgcagagcactcgcggcgtgggtgggctgagtggaggtgcctgggagctgcctaaattcagaagcctccactgccatggagactgcctggctgtgtcctctcagccaggtgccgtgttggccttggctaggacccagagccacactgcagcctccgccgactccctccttccgggcctgctctagtgaggagtgcctaagccaggacccagaaactcagagttgatggtgagaggaggccgcctgagtcaggacacctggcttcttgaaaagttcgctctgccagaaaccacctagggaccacgttagctgccttccttgagctccccaggagtcggtttccacatctgtgaggtggagggctggtgtggaggtgctcatggggtgcggtgcttgggagacagccaggcccagggtggctgctgcttcctgctaagtgggggaggtgagacagatctggaaagccgtctccctcagatggtttcatttaatgctttatactgccgagtctgggggcttgttttggtttgggggcagccatcctccaccagaaagggggagctccttccgctgcggctccagatagatggggatgccgggctccaggccgaccagcacttgggatctgatgggacacggccagtgcctaggggtgccaagtccaaggcctcccactgggagtcatcgctgagaagatgccaatgtttcatccaccggctgcacaggcacaaactcccccacccaggacggctgtgatgaggtggccctccctgtcaaccctggtccctggagtccccagcacctggggccctggtggggctgatgtcacaggtgtttactgtgctgctgcactggtcctatgccagcctcacccatgtggggaccacggaaggcacactcccttacccccggtgccgggccgtgcggtcccccagacggacagcagctgtggcgacctgcgtttctccctgggcctgtgcttcctgtagttagtccgtcccctggttcccctgtggctcagaggccgcgtccctggcttgtacatatgtgattgctgtgggcacaccccagaccccatgtcatagctgccgtcccgacgtcacgacgcctgtcccgatgtcttacacccgagtgttagccctaggctcctgtactgtgcgtgcacttgaggctctgtccaattaagaaataaatgtggctcttactcaacacagtc

SEQ ID NO: 146693 - DNA, 4414 bp, Homo sapiens
  Payload ID: 9021
  Gene Symbol: KIF1A
  Gene Name: kinesin family member 1A
  ENST ID: ENST00000404283
  CDS Start-End: 1-4414
atggccggggcttcggtgaaggtggcggtgcgggtccgccccttcaattcccgggaaatgagccgtgactccaagtgcatcattcagatgtctggaagcaccaccaccattgttaaccccaaacagcccaaggagacgcccaaaagcttcagctttgactactcctactggtcgcacacctcacctgaggacatcaactacgcgtcgcagaagcaggtgtaccgggacatcggcgaggagatgctgcagcatgcctttgagggatacaacgtgtgcatcttcgcctatgggcagacgggtgccggcaagtcctacaccatgatgggcaagcaggagaaggaccagcagggcatcatcccacagctctgcgaggacctcttctctcggatcaacgacacgaccaacgacaacatgtcctactccgtggaggtcagctacatggagatttactgtgagcgcgtccgtgacctcctgaaccccaagaacaagggcaaccttcgcgtgagggagcacccactgctggggccctacgtggaggacctctccaagctggctgtcacctcctacaatgacatccaggacctcatggactcagggaacaaggccaggaccgtggcggccaccaacatgaatgagaccagcagtcgctcccacgccgtcttcaacatcatcttcacccagaagcgccatgacgcagagaccaatatcaccacggagaaggtgagcaaaatcagcctggtggacctggctgggagcgagcgggctgactccacgggagccaagggcacgcgcctcaaggagggggccaacatcaacaagtcgctgaccaccctgggcaaggtcatctccgccctggctgaaatggactccggacccaacaagaacaagaaaaagaagaagacagatttcattccgtaccgagattccgtgttgacctggctcctccgggaaaacctgggcggtaactcaaggacagctatggtggcagccttgagtcctgcagacatcaactacgatgagacccttagcacgctgaggtatgctgaccgggccaagcagatccgctgcaatgctgtcatcaatgaggaccccaacaacaagctgatccgcgagctgaaggatgaggtgacccggctgcgggaccttctgtacgcccagggtcttggcgacatcactgacaccaacactgtgcctggaggacccaaattgaccaatgccctggtgggtatgagcccctcatcctcgctctcagccctgtccagccgcgcggcctccgtgtccagcctccacgagcgcatcttgtttgccccgggcagcgaggaggccattgaaagactgaaggaaacagagaagatcatagctgagctcaatgagacctgggaggagaagctgcggcggacagaagccatccggatggagagggaagccctgctggccgagatgggtgtggccatgagggaggatggcggcaccttgggcgtattctctcccaaaaagacaccacacctcgtcaacctgaacgaggacccgctgatgtctgagtgcctgctctactacatcaaggatgggatcaccagagtgggcagggaggatggcgagaggcggcaggacattgttctgagtgggcacttcatcaaggaggagcactgcgtcttccggagcgactccaggggaggcagcgaagctgtggtgaccttggagccctgtgagggggcagacacctacgtcaatggcaagaaagtcacagagcccagcatcctgcgttcaggaaaccgcatcatcatgggtaagagccatgtgttccggttcaaccaccccgagcaggcccggcaggagcgtgagcgcacgccttgtgcggagacgccagctgagcctgtggactgggccttcgcccagcgtgagctgctggagaagcagggcatcgacatgaagcaggagatggagcagaggctccaggaactggaggaccagtaccgccgcgagcgggaggaggccacctacctgctggagcagcagcggctggactatgagagcaagctggaggctctgcagaagcagatggactccaggtactacccggaggtgaacgaggaggaggaggagcccgaggatgaagtccagtggacagagcgggagtgtgagctggcgctctgggccttccggaagtggaagtggtaccagttcacgtctctgcgggacctgctgtggggcaacgccatcttcctcaaggaggccaatgccatcagcgtggagctgaaaaagaaggtacaattccagtttgtcctcctgacggacacactctactcccctctgccacccgacctgctgcccccagaggccgccaaagaccgagagacgcggcccttcccccgcaccattgtggccgtggaggtccaggaccagaagaacggggccacccactactggacgctggagaagctcaggcagcgtctggacctgatgcgggagatgtacgaccgcgctgcagaggtgccctccagtgtcatcgaggactgtgacaacgtggtgaccggcggagaccccttctatgaccgcttcccctggttccggctggtgggcagttcagccatctctggctgcaacagctaccctcttctcaacacatgcatgagcgagcgcatggctgctctcaccccctcccccaccttctcgagccccgactccgacgccaccgagcctgccgaggagcagagcgtgggggaggaggaggaggaggaggaggaggaggaggatgaggaggaggaggacctggaggacgacgtctttccggagcacgcgctgtgcgacggccgggacccgttttacgaccggccccccctgttcagtttagtaggaagggccttcgtgtacctgagcaacctgctgtaccccgttcccctggtacaccgtgtggcaatcgtcagcgagaagggcgaggtgaagggcttcctccgcgtggccgtccaggccatctcagccgatgaagaggcccctgattatggctctggcgtccgccagtcgggaactgctaaaatctcctttgatgaccagcattttgaaaagttccagtccgagtcttgccccgtggtggggatgtcccgctcgggaacctcccaggaagagcttcgcatcgtggagggccagggccagggtgcagacgtggggccctcagccgatgaagtcaacaacaacacctgttcagcagtgcccccagaaggcctcctcctagacagctctgagaaagccgccctggatgggcccctggatgctgccctggaccacctccgcctgggcaacaccttcaccttccgtgtgacagtcctgcaggcgtccagcatctctgccgaatatgccgacatcttctgccagttcaacttcatccaccgccacgacgaggccttctccacagagcccctgaagaacacaggcagaggccccccacttggcttctaccacgtccagaacatcgcagtggaggtgaccaagtccttcattgagtacatcaagagccagcccattgttttcgaggtctttggccactaccagcagcacccgttcccgcccctctgcaaggacgtgctcagccccctgaggccctcgcgccgccacttccctcgggtcatgccactgtccaagccagtgcccgccaccaagctcagcacactgacgcggccctgtccgggaccctgccactgcaagtacgacctgctggtctacttcgagatctgtgagctggaggccaacggcgattacatcccggccgtggtggaccaccgtgggggcatgccatgcatggggaccttcctcctccaccagggcatccagcgacggattacggtgacactactgcatgagacaggcagccatatccgctggaaggaagtgcgcgagctggtcgtgggccgcatccgaaacactccagagaccgacgagtccctgatcgaccccaacatcttgtctctcaacatcctctcttccggatacatccacccagcccaagatgaccgcgtttcattgggaaatgacactaggaccttttaccaatttgaggctgcgtgggacagctccatgcacaactctctcctgctgaaccgggtcaccccttatcgagagaaaatctacatgacactctccgcttatatcgagatggagaactgcacccagccggctgttgtcaccaaggacttctgcatggtcttctattcccgtgatgccaagctgccagcctcgcgctccatccgcaacctctttggcagtgggagccttcgggcctcagagagtaaccgtgtgactggtgtgtacgagctcagcctgtgccacgtggctgacgcgggcagcccagggatgcagcgccggcgccgacgagtcctggacacatctgtggcctatgtccggggcgaggagaacctggcag

SEQ ID NO: 146694 - DNA, 680 bp, Homo sapiens
  Payload ID: 9021
  Gene Symbol: KIF1A
  Gene Name: kinesin family member 1A
  ENST ID: ENST00000428768
  CDS Start-End: 1-680
ggacctcatggactcagggaacaaggccaggaccgtggcggccaccaacatgaatgagaccagcagtcgctcccacgccgtcttcaacatcatcttcacccagaagcgccatgacgcagagaccaatatcaccacggagaaggtgagcaaaatcagcctggtggacctggctgggagcgagcgggctgactccacgggagccaagggcacgcgcctcaaggagggggccaacatcaacaagtcgctgaccaccctgggcaaggtcatctccgccctggctgaaatggactccggacccaacaagaacaagaaaaagaagaagacagatttcattccgtaccgagattccgtgttgacctggctcctccgggaaaacctgggcggtaactcaaggacagctatggtggcagccttgagtcctgcagacatcaactacgatgagacccttagcacgctgaggtatgctgaccgggccaagcagatccgctgcaatgctgtcatcaatgaggaccccaacaacaagctgatccgcgagctgaaggatgaggtgacccggctgcgggaccttctgtacgcccagggtcttggcgacatcactgacaccaacactgtgcctggaggacccaaatacgtgtccgaccttgagaacaataaccttaaccgtggcgggacggtgaatg

SEQ ID NO: 146695 - DNA, 585 bp, Homo sapiens
  Payload ID: 9021
  Gene Symbol: KIF1A
  Gene Name: kinesin family member 1A
  ENST ID: ENST00000448728
  CDS Start-End: 471-585
acgtccccgggaatagggactttcccccagagactggaggaccccttccccaagcgtcagccctttccaaggggtgcctgcattgctggaattaaaggcctgccagggcaagcggattggatcttgcggctgcggagaggaggcggtgcggagaggcccctgcctcgcagggctggcactggcctcaccctggggacgcacagcgcgacaccgtgctcggctctgcgggacaccaggtcgcactcaggctggcggggcctttgccagggaagccatgccagcaccctcgtggtgtgagaaggcagcagaggcttcctcaggcttgcgaagctgggttccactggtcccgctgggctcctgctttctagaattatctgcgctgcctcctctccttgtggattccaccccatgtgttccccccacactggggctcccactactgcgaggagtgacccacgaaggccacagagatggccggggcttcggtgaaggtggcggtgcgggtccgccccttcaattcccgggaaatgagccgtgactccaagtgcatcattcagatgtctggaagcaccaccaccattgtta

SEQ ID NO: 146696 - DNA, 1072 bp, Homo sapiens
  Payload ID: 9021
  Gene Symbol: KIF1A
  Gene Name: kinesin family member 1A
  ENST ID: ENST00000431776
  CDS Start-End: 1-1072
ttggccactaccagcagcacccgttcccgcccctctgcaaggacgtgctcagccccctgaggccctcgcgccgccacttccctcgggtcatgccactgtccaagccagtgcccgccaccaagctcagcacactgacgcggccctgtccgggaccctgccactgcaagtacgacctgctggtctacttcgagatctgtgagctggaggccaacggcgattacatcccggccgtggtggaccaccgtgggggcatgccatgcatggggaccttcctcctccaccagggcatccagcgacggattacggtgacactactgcatgagacaggcagccatatccgctggaaggaagtgcgcgagctggtcgtgggccgcatccgaaacactccagagaccgacgagtccctgatcgaccccaacatcttgtctctcaacatcctctcttccggatacatccacccagcccaagatgaccggcagtttcttgattcggacatacctaggaccttttaccaatttgaggctgcgtgggacagctccatgcacaactctctcctgctgaaccgggtcaccccttatcgagagaaaatctacatgacactctccgcttatatcgagatggagaactgcacccagccggctgttgtcaccaaggacttctgcatggtcttctattcccgtgatgccaagctgccagcctcgcgctccatccgcaacctctttggcagtgggagccttcgggcctcagagagtaaccgtgtgactggtgtgtacgagctcagcctgtgccacgtggctgacgcgggcagcccagggatgcagcgccggcgccgacgagtcctggacacatctgtggcctatgtccggggcgaggagaacctggcaggctggaggccccggagtgacagtctcattctggaccaccagtgggagctggagaagctgagcctcctgcaggaggtggagaagactaggcactacctgctcctgcgggagaagctggagaccgcccagcggcctgtcccggaggcactgtccccggccttcagcgaggactctgagtcccatggctc

SEQ ID NO: 146697 - DNA, 550 bp, Homo sapiens
  Payload ID: 9021
  Gene Symbol: KIF1A
  Gene Name: kinesin family member 1A
  ENST ID: ENST00000415042
  CDS Start-End: 1-550
agctggggagtgagggtgaacaccagggaagggccccagccctgctgctggaagccgatgaagaggcccctgattatggctctggcgtccgccagtcgggaactgctaaaatctcctttgatgaccagcattttgaaaagttccagtccgagtcttgccccgtggtggggatgtcccgctcgggaacctcccaggaagagcttcgcatcgtggagggccagggccagggtgcagacgtggggccctcagccgatgaagtcaacaacaacacctgttcagcagtgcccccagaaggcctcctcctagacagctctgagaaagccgccctggatgggcccctggatgctgccctggaccacctccgcctgggcaacaccttcaccttccgtgtgacagtcctgcaggcgtccagcatctctgccgaatatgccgacatcttctgccagttcaacttcatccaccgccacgacgaggccttctccacagagcccctgaagaacacaggcagaggccccccacttggcttctaccacgtccagaacatcgcagt

SEQ ID NO: 146698 - DNA, 9223 bp, Homo sapiens
  Payload ID: 9021
  Gene Symbol: KIF1A
  Gene Name: kinesin family member 1A
  Uniprot ID: Q12756
  ENST ID: ENST00000498729
  CDS Start-End: 248-5623
ggacgccgcgcgcagccaaccagcgcctcgggaggggcgcggggcggtccgggccgggggcgcgcagcccgtcacgcggcggcgccgtcacagcgcagagcagccggcgagcggcagcagctccgggctcgagagcccgcgcccatgccagtgcccatgcggggccgccgccagtgacgccggagaggtgttccccccacactggggctcccactactgcgaggagtgacccacgaaggccacagagatggccggggcttcggtgaaggtggcggtgcgggtccgccccttcaattcccgggaaatgagccgtgactccaagtgcatcattcagatgtctggaagcaccaccaccattgttaaccccaaacagcccaaggagacgcccaaaagcttcagctttgactactcctactggtcgcacacctcacctgaggacatcaactacgcgtcgcagaagcaggtgtaccgggacatcggcgaggagatgctgcagcatgcctttgagggatacaacgtgtgcatcttcgcctatgggcagacgggtgccggcaagtcctacaccatgatgggcaagcaggagaaggaccagcagggcatcatcccacagctctgcgaggacctcttctctcggatcaacgacacgaccaacgacaacatgtcctactccgtggaggtcagctacatggagatttactgtgagcgcgtccgtgacctcctgaaccccaagaacaagggcaaccttcgcgtgagggagcacccactgctggggccctacgtggaggacctctccaagctggctgtcacctcctacaatgacatccaggacctcatggactcagggaacaaggccaggaccgtggcggccaccaacatgaatgagaccagcagtcgctcccacgccgtcttcaacatcatcttcacccagaagcgccatgacgcagagaccaatatcaccacggagaaggtgagcaaaatcagcctggtggacctggctgggagcgagcgggctgactccacgggagccaagggcacgcgcctcaaggagggggccaacatcaacaagtcgctgaccaccctgggcaaggtcatctccgccctggctgaaatggactccggacccaacaagaacaagaaaaagaagaagacagatttcattccgtaccgagattccgtgttgacctggctcctccgggaaaacctgggcggtaactcaaggacagctatggtggcagccttgagtcctgcagacatcaactacgatgagacccttagcacgctgaggtatgctgaccgggccaagcagatccgctgcaatgctgtcatcaatgaggaccccaacaacaagctgatccgcgagctgaaggatgaggtgacccggctgcgggaccttctgtacgcccagggtcttggcgacatcactgacaccaacactgtgcctggaggacccaaattgaccaatgccctggtgggtatgagcccctcatcctcgctctcagccctgtccagccgcgcggcctccgtgtccagcctccacgagcgcatcttgtttgccccgggcagcgaggaggccattgaaagactgaaggaaacagagaagatcatagctgagctcaatgagacctgggaggagaagctgcggcggacagaagccatccggatggagagggaagccctgctggccgagatgggtgtggccatgagggaggatggcggcaccttgggcgtattctctcccaaaaagacaccacacctcgtcaacctgaacgaggacccgctgatgtctgagtgcctgctctactacatcaaggatgggatcaccagagtgggcagggaggatggcgagaggcggcaggacattgttctgagtgggcacttcatcaaggaggagcactgcgtcttccggagcgactccaggggaggcagcgaagctgtggtgaccttggagccctgtgagggggcagacacctacgtcaatggcaagaaagtcacagagcccagcatcctgcgttcaggaaaccgcatcatcatgggtaagagccatgtgttccggttcaaccaccccgagcaggcccggcaggagcgtgagcgcacgccttgtgcggagacgccagctgagcctgtggactgggccttcgcccagcgtgagctgctggagaagcagggcatcgacatgaagcaggagatggagcagaggctccaggaactggaggaccagtaccgccgcgagcgggaggaggccacctacctgctggagcagcagcggctggactatgagagcaagctggaggctctgcagaagcagatggactccaggtactacccggaggtgaacgaggaggaggaggagcccgaggatgaagtccagtggacagagcgggagtgtgagctggcgctctgggccttccggaagtggaagtggtaccagttcacgtctctgcgggacctgctgtggggcaacgccatcttcctcaaggaggccaatgccatcagcgtggagctgaaaaagaaggtacaattccagtttgtcctcctgacggacacactctactcccctctgccacccgacctgctgcccccagaggccgccaaagaccgagagacgcggcccttcccccgcaccattgtggccgtggaggtccaggaccagaagaacggggccacccactactggacgctggagaagctcaggcagcgtctggacctgatgcgggagatgtacgaccgcgctgcagaggtgccctccagtgtcatcgaggactgtgacaacgtggtgaccggcggagaccccttctatgaccgcttcccctggttccggctggtgggcagttcagccatctctggctgcaacagctaccctcttctcaacacatgcatgagcgagcgcatggctgctctcaccccctcccccaccttctcgagccccgactccgacgccaccgagcctgccgaggagcagagcgtgggggaggaggaggaggaggaggaggaggaggaggatgaggaggaggaggacctggaggacgacgtctttccggagcacgcgctgtgcgacggccgggacccgttttacgaccggccccccctgttcagtttagtaggaagggccttcgtgtacctgagcaacctgctgtaccccgttcccctggtacaccgtgtggcaatcgtcagcgagaagggcgaggtgaagggcttcctccgcgtggccgtccaggccatctcagccgatgaagaggcccctgattatggctctggcgtccgccagtcgggaactgctaaaatctcctttgatgaccagcattttgaaaagttccagtccgagtcttgccccgtggtggggatgtcccgctcgggaacctcccaggaagagcttcgcatcgtggagggccagggccagggtgcagacgtggggccctcagccgatgaagtcaacaacaacacctgttcagcagtgcccccagaaggcctcctcctagacagctctgagaaagccgccctggatgggcccctggatgctgccctggaccacctccgcctgggcaacaccttcaccttccgtgtgacagtcctgcaggcgtccagcatctctgccgaatatgccgacatcttctgccagttcaacttcatccaccgccacgacgaggccttctccacagagcccctgaagaacacaggcagaggccccccacttggcttctaccacgtccagaacatcgcagtggaggtgaccaagtccttcattgagtacatcaagagccagcccattgttttcgaggtctttggccactaccagcagcacccgttcccgcccctctgcaaggacgtgctcagccccctgaggccctcgcgccgccacttccctcgggtcatgccactgtccaagccagtgcccgccaccaagctcagcacactgacgcggccctgtccgggaccctgccactgcaagtacgacctgctggtctacttcgagatctgtgagctggaggccaacggcgattacatcccggccgtggtggaccaccgtgggggcatgccatgcatggggaccttcctcctccaccagggcatccagcgacggattacggtgacactactgcatgagacaggcagccatatccgctggaaggaagtgcgcgagctggtcgtgggccgcatccgaaacactccagagaccgacgagtccctgatcgaccccaacatcttgtctctcaacatcctctcttccggatacatccacccagcccaagatgaccggaccttttaccaatttgaggctgcgtgggacagctccatgcacaactctctcctgctgaaccgggtcaccccttatcgagagaaaatctacatgacactctccgcttatatcgagatggagaactgcacccagccggctgttgtcaccaaggacttctgcatggtcttctattcccgtgatgccaagctgccagcctcgcgctccatccgcaacctctttggcagtgggagccttcgggcctcagagagtaaccgtgtgactggtgtgtacgagctcagcctgtgccacgtggctgacgcgggcagcccagggatgcagcgccggcgccgacgagtcctggacacatctgtggcctatgtccggggcgaggagaacctggcaggctggaggccccggagtgacagtctcattctggaccaccagtgggagctggagaagctgagcctcctgcaggaggtggagaagactaggcactacctgctcctgcgggagaagctggagaccgcccagcggcctgtcccggaggcactgtccccggccttcagcgaggactctgagtcccatggctcctccagcgcctcctccccgctctcggctgagggccgcccatcacccctggaggctcccaacgagaggcagcgggagctggccgtcaagtgcttgcgcctgctcacgcacacattcaacagagagtacacacacagccacgtctgcgtcagtgccagcgagagcaagctctccgagatgtctgtcaccctgctccgggacccgtcgatgtcccctctaggggtggccactctcaccccctcctccacttgcccctctctggttgaagggcggtacggtgccactgacctgaggaccccgcagccctgctcccggccagccagcccagagcccgagctgctgccagaggccgactccaagaagctcccttcccctgcccgggcaacagagacagacaaggagccccagcgcctgctggtccctgacatccaggagatccgagtcagcccgatcgtttccaagaaggggtacctgcacttcctggagccgcacacgtcaggctgggccaggcgcttcgtggtggtgcggcgcccctatgcctacatgtacaacagcgacaaggacaccgtggagcggttcgtgctcaacctggccactgcccaggtggagtacagtgaggaccagcaggctatgctcaagacacccaacacattcgcggtgtgcacggaacaccgcggcatcctgctgcaggccgccagcgacaaggacatgcatgactggctgtacgccttcaaccccctcctggccgggaccatacggtccaagctctccagaaggaggtctgcccagatgcgggtctgaacctgagccctcccgtgacagccggcaggcccagcccatcccctccctcatcctcgtctgtcctgtcacctgccgcccagcccctctcctgccagacagcccacgaccgggtcgaccccccaggggacgcccatgccaggcccggggacctgtgccacacgaccagctgtgctcccagcagaggctgtgcgtgtcagttcttcttgcagaatgtgctctggtggaacaagttgggagaggctgggggggccaagggcacaggttacgggggttcttgctgccgttctaatatttttttaagcatagacagacttataattaatatacgttagttagtgacattgaaacagtcaactcggaaattaactataagacttgttctatttataagtatttatttctaatgcctccacatagccctgtaatattcagatggaacccccaaccacctccaccctgtttgttcccacatgtgtctcccaagcctgctagggacaggcagggcagggacagccaccttggaaggccgcagtgaggagctgtctggaccagtggggcaccttggggctagcacacgggtgtatcgcctgggccccaggcttctccatggccacatgggtcctgggtgtatgtgtgggagagtgggggggtgtctttggtgcctgaagtctgcgcggcatggagggtggtgtgagttcctctggtgggagggagaacgcacatctcttctgggcggccacctgaggagtgactccaagaagagttccggcagctttccccaggaaagggtgaggggtgacactcggctctggctctgagatgaggcagacggcacccaggctgtgatctgtcctgggcggggaccaggagggagcggggtcgggatcacctgccagtgtgcagactctgggactgcgtgctgtctccggaccatcagggtagggtggtgggttgagaccaggaagtcagggaagatcggaattcagggcgacggtctaggtgtcgagggctgtggcgcagcctcttcagctgcggcgagaaatggagtgagtcaaggtagcttctgggaagaaatgctgccattagcaggtttcttgcaaagactttcctctctttgttcccagggcagagagtttctgtgagtcccactgagaaaatcccatggggtgggggtatcctggtcggtcggcaatggagggtggctggcttggtggttattgtcttcaaggagctcttcgctgctgcatctgcggtgtccctttgttcttgtcccatttcaccccctctgcagacaccaatgtccgagggccacccaggacaggacgggggtcagccccaagctgagagtctggtcataggagtcatgtccagaggcctagggaggttttagggccctccccacccacacccacaggtcgatttggtctctttttagctcaaggaaagacagtagccaagcaacagagcccctctcccgccgtggcccgtgggagcagttacatcgggtctggtgctccagacctagggcccagcactttcatcagatcctgcctcctggagtgggggaaacgcagcaccccactggttctgaggcccctaccctcccaggctgtcccacgtgatgctgacatgagcctcagagaccccaatcccatgcctgggggagagacagcggctcaggagtgggggagcacgggccttctacaccacatgggaaggctctggcatgaggttttcctttgggaaggttgtttgggcccctgaagttccatctccgagagtggtgtgcagggcaggccagggcccatgctggctgcagtctctgtggctgcctgcctgggccagcctgtttgggagctgggactgtgggctcgccttttcgtacctgggctcaggtgcggtgtggccaccgccaccctcatcccctgcctgggaggctctcccaggggctgatgggggggttctgtgagggagaatcagggctcgggaagccacgcctgggaaggcaggacacaggacacagcagctttctttggaaatctcccaggtgaggattcacatcccaaaataaaattcagaagccaggtggcctgtgctccccatgggtgacctctggaggcagtggaccaagatgcagcaaggagaggatgcagaacagcttcttgcagaagcacctgctccggcatccagcgctgcctggaggcaggaaggagaggcagggcaggacacgctggtctgagatgagggggagccccacgggccccaggcaggctagaggaggcacaggccctgccacggccaactcaggtcagccagcctgaggctgtggcctccaaagggtctgggcgcaccccccaggtcgcaggtgtctgaggccagccaacctgcagagcactcgcggcgtgggtgggctgagtggaggtgcctgggagctgcctaaattcagaagcctccactgccatggagactgcctggctgtgtcctctcagccaggtgccgtgttggccttggctaggacccagagccacactgcagcctccgccgactccctccttccgggcctgctctagtgaggagtgcctaagccaggacccagaaactcagagttgatggtgagaggaggccgcctgagtcaggacacctggcttcttgaaaagttcgctctgccagaaaccacctagggaccacgttagctgccttccttgagctccccaggagtcggtttccacatctgtgaggtggagggctggtgtggaggtgctcatggggtgcggtgcttgggagacagccaggcccagggtggctgctgcttcctgctaagtgggggaggtgagacagatctggaaagccgtctccctcagatggtttcatttaatgctttatactgccgagtctgggggcttgttttggtttgggggcagccatcctccaccagaaagggggagctccttccgctgcggctccagatagatggggatgccgggctccaggccgaccagcacttgggatctgatgggacacggccagtgcctaggggtgccaagtccaaggcctcccactgggagtcatcgctgagaagatgccaatgtttcatccaccggctgcacaggcacaaactcccccacccaggacggctgtgatgaggtggccctccctgtcaaccctggtccctggagtccccagcacctggggccctggtggggctgatgtcacaggtgtttactgtgctgctgcactggtcctatgccagcctcacccatgtggggaccacggaaggcacactcccttacccccggtgccgggccgtgcggtcccccagacggacagcagctgtggcgacctgcgtttctccctgggcctgtgcttcctgtagttagtccgtcccctggttcccctgtggctcagaggccgcgtccctggcttgtacatatgtgattgctgtgggcacaccccagaccccatgtcatagctgccgtcccgacgtcacgacgcctgtcccgatgtcttacacccgagtgttagccctaggctcctgtactgtgcgtgcacttgaggctctgtccaattaagaaataaatgtggctcttactcaacacagtc

SEQ ID NO: 146699 - DNA, 6816 bp, Homo sapiens
  Payload ID: 9022
  Gene Symbol: KIF1B
  Gene Name: kinesin family member 1B
  Uniprot ID: O60333
  ENST ID: ENST00000263934
  CDS Start-End: 154-5466
cccggccccccgcgcccccgcgcgccgcggctcctgttgacccggtccgcccgtcggtctgcagcgcggctgaggaaacttggctgtaacttcaaaagaagatttgattctttatttctggactgcatatatatatataacaaggccattaaaatgtcgggagcctcagtgaaggtggctgtccgggtaaggcccttcaattctcgagagaccagcaaggaatccaaatgcatcattcagatgcaaggcaactcgaccagtattattaacccaaagaatccaaaggaagctccaaagtccttcagcttcgactattcctactggtctcatacctcacccgaagatccctgttttgcatctcaaaaccgtgtgtacaatgacattggcaaggaaatgctcttacacgcctttgagggatataatgtctgtatttttgcctatgggcagactggtgctggaaaatcttatacaatgatgggtaaacaagaagaaagccaggctggcatcattccacagttatgtgaagaactttttgagaaaatcaatgacaactgtaatgaagaaatgtcttactctgtagaggtgagctacatggaaatttactgtgaaagagtacgagatttgctgaatccaaaaaacaagggtaatttgcgtgtgcgtgaacacccacttcttggaccctatgtggaggatctgtccaagttggcagttacttcctacacagacattgctgacctcatggatgctgggaacaaagccaggacagtggcagctacaaacatgaatgaaacaagtagccgttcccacgctgtgtttacgattgttttcacccagaagaaacacgataatgagaccaacctttccactgagaaggtcagtaaaatcagcttggtggatctagcaggaagtgaacgagctgattcaactggtgccaaagggactcgattaaaggaaggagcaaatattaataagtctcttacaactttgggcaaagtcatttcagccttggccgaggtgagtaaaaagaagaagaaaacagattttattccctacagggattctgtacttacttggctccttcgagaaaatttaggtggcaattctcggactgcaatggttgctgctctgagccccgcggatatcaactacgatgagactttgagcactctgagatatgcagatcgtgcaaaacaaattaaatgcaatgctgttatcaatgaggaccccaatgccaaactggttcgtgaattaaaggaggaggtgacacggctgaaggaccttcttcgtgctcagggcctgggagatattattgatacatccatggggtccctcacttcatccccatcttcctgctcactcagtagtcaggtgggcttgacgtctgtgaccagtattcaagagaggatcatgtctacacctggaggagaggaagctattgaacgtttaaaggaatcagagaagatcattgctgagttgaatgaaacttgggaagagaagcttcgtaaaacagaggccatcagaatggagagagaggctttgttggctgagatgggagttgccattcgggaagatggaggaaccctaggggttttctcacctaaaaagaccccacatcttgttaacctcaatgaagacccactaatgtctgagtgcctactttattacatcaaagatggaattacaagggttggccaagcagatgctgagcggcgccaggacatagtgctgagcggggctcacattaaagaagagcattgtatcttccggagtgagagaagcaacagcggggaagttatcgtgaccttagagccctgtgagcgctcagaaacctacgtaaatggcaagagggtgtcccagcctgttcagctgcgctcaggaaaccgtatcatcatgggtaaaaaccatgttttccgctttaaccacccggaacaagcacgagctgagcgagagaagactccttctgctgagaccccctctgagcctgtggactggacatttgcccagagggagcttctggaaaaacaaggaattgatatgaaacaagagatggagaaaaggctacaggaaatggagatcttatacaaaaaggagaaggaagaagcagatcttcttttggagcagcagagactggactatgagagtaaattgcaggccttgcagaagcaggttgaaacccgatctctggctgcagaaacaactgaagaggaggaagaagaggaagaagttccttggacacagcatgaatttgagttggcccaatgggccttccggaaatggaagtctcatcagtttacttcattacgggacttactctggggcaatgccgtgtacctaaaggaggccaatgccatcagtgtggaactgaaaaagaaggtgcagtttcagtttgttctgctgactgacacactgtactcccctttgcctcctgaattacttcccactgagatggaaaaaactcatgaggacaggcctttccctcgcacagtggtagcagtagaagtccaggatttgaagaatggagcaacacactattggtctttggagaaactcaagcagaggctggatttgatgcgagagatgtatgatagggcaggggagatggcctccagtgcccaagacgaaagcgaaaccactgtgactggcagcgatcccttctatgatcggttccactggttcaaacttgtggggagctcccccattttccacggctgtgtgaacgagcgccttgccgaccgcacaccctcccccactttttccacggccgattccgacatcactgagctggctgacgagcagcaagatgagatggaggattttgatgatgaggcattcgtggatgacgccggctctgacgcagggacggaggagggatcagatctcttcagtgacgggcatgacccgttttacgaccgatccccttggttcattttagtgggaagggcatttgtttacctgagcaatctgctgtatcccgtgcccctgatccacagggtggccatcgtcagtgagaaaggtgaagtgcggggatttctgcgtgtggctgtacaggccatcgcagcggatgaagaagctcctgattatggctctggaattcgacagtcaggaacagctaaaatatcttttgataatgaatactttaatcagagtgacttttcgtctgttgcaatgactcgttctggtctgtccttggaggagttgaggattgtggaaggacagggtcagagttctgaggtcatcactcctccagaagaaatcagtcgaattaatgacttggatttgaagtcaagcactttgctggatggtaagatggtaatggaagggttttctgaagagattggcaaccacctgaaactgggcagtgccttcactttccgagtaacagtgttgcaggccagtggaatcctcccagagtatgcagatatcttctgtcagttcaactttttgcatcgccatgatgaagcattctccacggagcccctcaaaaacaatggcagaggaagtcccctggccttttatcatgtgcagaatattgcagtggagatcactgaatcatttgtggattacatcaaaaccaagcctattgtatttgaagtctttgggcattatcagcagcacccacttcatctgcaaggacaggagcttaacagtccgcctcagccgtgccgccgattcttccctccacccatgccactgtccaagccagttccagccaccaagttaaacacgatgagcaaaaccagccttggccagagcatgagcaagtatgacctcctggtttggtttgagatcagtgaactggagcctacaggagagtatatcccagctgtggttgaccacacagcaggcttgccttgccaggggacatttttgcttcatcagggcatccagcgaaggatcacagtgaccattatccatgagaaggggagcgagctccattggaaagatgttcgtgaactggtggtaggtcgtattcggaataagcctgaggtggatgaagctgcagttgatgccatcctctccctaaatattatttctgccaagtacctgaagtcttcccacaactctagcaggaccttctaccgctttgaggctgtgtgggatagctctctgcataactcccttcttctgaaccgagtgacaccctatggagaaaagatctacatgaccttgtcggcctacctagagctggatcattgcatccagccggctgtcatcaccaaggatgtgtgcatggtcttctactcccgagatgccaagatctcaccaccacgctctctgcgtagcctctttggcagcggctactcaaagtcaccagattcgaatcgagtcactggcatttacgaactcagcttatgcaaaatgtcagacacaggtagtccaggtatgcagagaaggagaagaaaaatcttagatacgtcagtggcatatgtgcggggagaagagaacttagcaggctggcggccccgtggagacagcctcatccttgagcaccagtgggagctggagaagctggagctcctacatgaggtggaaaaaacccgccactttttgctgctgcgtgagagacttggtgacagcatccccaaatccctgagcgactcgttatcccccagcctcagcagtgggaccctcagcacctccaccagtatctcctctcagatctcaaccactacctttgaaagcgccatcacacctagcgagagcagtggctatgattcaggagacatcgaaagcctggtggaccgagagaaagagctggctaccaagtgcctgcaacttctcacccacactttcaacagagaattcagccaggtgcacggcagcgtcagtgactgtaagttgtctgatatctctccaattggacgggatccctctgagtccagtttcagcagtgccaccctcactccctcctccacctgtccctctctggtagactctaggagcaactctctggatcagaagaccccagaagccaattcccgggcctctagtccctgcccagaatttgaacagtttcagattgtcccagctgtggaaacaccatatttggcccgagcaggaaaaaacgaatttctcaatcttgttccagatattgaagaaattagaccaagctcagtggtctctaagaaaggataccttcatttcaaggagcctctttacagtaactgggctaaacattttgttgtcgtccgtcggccttatgtcttcatctataacagtgacaaagaccctgtggagcgtggaatcattaacctgtccacagcacaggtggagtacagtgaggaccagcaggccatggtgaagacaccaaacacctttgctgtctgcacaaagcaccgtggggtccttttgcaggccctcaatgacaaagacatgaacgactggttgtatgccttcaacccacttctagctggcacaatacggtcaaagctttcccgcagatgcccgagccagtcgaaatactaagtgactctgccgagtgccctcactcgccttcgagagataaagaaagcgttacctctcatttctctttgtgattcttgacggtgactcttgtatgtaatcctgtggcttaactacttctccctccttgtccagcacttttctagctctcccgttccccatctccattgctctgtactcttttcttttttcttgtgctgagaatctcgttagtagcatgtggcctaacaaaaggaaaaaatgtttttaaacacacacacacacacacacacacacacacacatacacagacaaaaacacaaaaactctgaggggatctggtgaatctccaaattattgtgggtgtactttggcttccttttgtatgataggtccccatcatgaccacctctgatgtctgtgctgctgtcaccaggcacctttgtttttcaagacaacatactttttttttcttttctctgtttgtgatatcactttaatttttcttgggtggcttagagactaagggaggagacatctggcctttttagaacctgagaggaaaaaaagagtctttttttcccctctgtctctttttgccatggctaatccctgcatttccattcagggaaaaggtggtagtgagcatagaactgcaacagttatattctgagtcaaagttggggctttttacggcataattatggaatttttatttactggtagagaggagacgagaggctttttcagtgggcctgggacagtggctgctcttgactttgtgtgaagggaaatgccaaggatgcttctggtggacttcaggggaccccagggtttggccgtgggccgtgatggcagcaggcggtgggatgcttgtagctcctcacagcaggattcctgcccactgttttttctctgttgggagggaagctcttttctaggagtgtctcagttctgcttttggcattagtgatggtggtggtacagttggaattagtgccatgtcatacacaaatgttccacaaggcgggagtgtttcactttctggtgataaacttgatggtcattgttatgattaagataatgccgggcaggccgggcacagtggctcacgcctgtaatccaagcacttggggaggccgaggcgggcagatcacgagatcaggagttcaagaccagcctggccaatatgatgaaaccccgtctctactaaaaatacaaaattagtcgggtatggtggcacatgcctgtaattccagctgcttgggagcctgaggcaggagaactgcttgaacccaggaggcagaggttgcagtgagccaagatcgcgctattgcactccagcctgggtgacagagcaagactctgcctcag

SEQ ID NO: 146700 - DNA, 8746 bp, Homo sapiens
  Payload ID: 9022
  Gene Symbol: KIF1B
  Gene Name: kinesin family member 1B
  Uniprot ID: O60333
  ENST ID: ENST00000377081
  CDS Start-End: 80-5551
gaaacttggctgtaacttcaaaagaagatttgattctttatttctggactgcatatatatatataacaaggccattaaaatgtcgggagcctcagtgaaggtggctgtccgggtaaggcccttcaattctcgagagaccagcaaggaatccaaatgcatcattcagatgcaaggcaactcgaccagtattattaacccaaagaatccaaaggaagctccaaagtccttcagcttcgactattcctactggtctcatacctcacccgaagatccctgttttgcatctcaaaaccgtgtgtacaatgacattggcaaggaaatgctcttacacgcctttgagggatataatgtctgtatttttgcctatgggcagactggtgctggaaaatcttatacaatgatgggtaaacaagaagaaagccaggctggcatcattccacagttatgtgaagaactttttgagaaaatcaatgacaactgtaatgaagaaatgtcttactctgtagaggtgagctacatggaaatttactgtgaaagagtacgagatttgctgaatccaaaaaacaagggtaatttgcgtgtgcgtgaacacccacttcttggaccctatgtggaggatctgtccaagttggcagttacttcctacacagacattgctgacctcatggatgctgggaacaaagccaggacagtggcagctacaaacatgaatgaaacaagtagccgttcccacgctgtgtttacgattgttttcacccagaagaaacacgataatgagaccaacctttccactgagaaggtcagtaaaatcagcttggtggatctagcaggaagtgaacgagctgattcaactggtgccaaagggactcgattaaaggaaggagcaaatattaataagtctcttacaactttgggcaaagtcatttcagccttggccgaggtggataactgcactagcaagagtaaaaagaagaagaaaacagattttattccctacagggattctgtacttacttggctccttcgagaaaatttaggtggcaattctcggactgcaatggttgctgctctgagccccgcggatatcaactacgatgagactttgagcactctgagatatgcagatcgtgcaaaacaaattaaatgcaatgctgttatcaatgaggaccccaatgccaaactggttcgtgaattaaaggaggaggtgacacggctgaaggaccttcttcgtgctcagggcctgggagatattattgatattgatccattgatcgatgattactctggaagtggaagcaaatatctgaaagattttcagaacaataagcatagatacttgctagcctctgagaatcaacgccctggccatttttccacagcatccatggggtccctcacttcatccccatcttcctgctcactcagtagtcaggtgggcttgacgtctgtgaccagtattcaagagaggatcatgtctacacctggaggagaggaagctattgaacgtttaaaggaatcagagaagatcattgctgagttgaatgaaacttgggaagagaagcttcgtaaaacagaggccatcagaatggagagagaggctttgttggctgagatgggagttgccattcgggaagatggaggaaccctaggggttttctcacctaaaaagaccccacatcttgttaacctcaatgaagacccactaatgtctgagtgcctactttattacatcaaagatggaattacaagggttggccaagcagatgctgagcggcgccaggacatagtgctgagcggggctcacattaaagaagagcattgtatcttccggagtgagagaagcaacagcggggaagttatcgtgaccttagagccctgtgagcgctcagaaacctacgtaaatggcaagagggtgtcccagcctgttcagctgcgctcaggaaaccgtatcatcatgggtaaaaaccatgttttccgctttaaccacccggaacaagcacgagctgagcgagagaagactccttctgctgagaccccctctgagcctgtggactggacatttgcccagagggagcttctggaaaaacaaggaattgatatgaaacaagagatggagaaaaggctacaggaaatggagatcttatacaaaaaggagaaggaagaagcagatcttcttttggagcagcagagactggactatgagagtaaattgcaggccttgcagaagcaggttgaaacccgatctctggctgcagaaacaactgaagaggaggaagaagaggaagaagttccttggacacagcatgaatttgagttggcccaatgggccttccggaaatggaagtctcatcagtttacttcattacgggacttactctggggcaatgccgtgtacctaaaggaggccaatgccatcagtgtggaactgaaaaagaaggtgcagtttcagtttgttctgctgactgacacactgtactcccctttgcctcctgaattacttcccactgagatggaaaaaactcatgaggacaggcctttccctcgcacagtggtagcagtagaagtccaggatttgaagaatggagcaacacactattggtctttggagaaactcaagcagaggctggatttgatgcgagagatgtatgatagggcaggggagatggcctccagtgcccaagacgaaagcgaaaccactgtgactggcagcgatcccttctatgatcggttccactggttcaaacttgtggggagctcccccattttccacggctgtgtgaacgagcgccttgccgaccgcacaccctcccccactttttccacggccgattccgacatcactgagctggctgacgagcagcaagatgagatggaggattttgatgatgaggcattcgtggatgacgccggctctgacgcagggacggaggagggatcagatctcttcagtgacgggcatgacccgttttacgaccgatccccttggttcattttagtgggaagggcatttgtttacctgagcaatctgctgtatcccgtgcccctgatccacagggtggccatcgtcagtgagaaaggtgaagtgcggggatttctgcgtgtggctgtacaggccatcgcagcggatgaagaagctcctgattatggctctggaattcgacagtcaggaacagctaaaatatcttttgataatgaatactttaatcagagtgacttttcgtctgttgcaatgactcgttctggtctgtccttggaggagttgaggattgtggaaggacagggtcagagttctgaggtcatcactcctccagaagaaatcagtcgaattaatgacttggatttgaagtcaagcactttgctggatggtaagatggtaatggaagggttttctgaagagattggcaaccacctgaaactgggcagtgccttcactttccgagtaacagtgttgcaggccagtggaatcctcccagagtatgcagatatcttctgtcagttcaactttttgcatcgccatgatgaagcattctccacggagcccctcaaaaacaatggcagaggaagtcccctggccttttatcatgtgcagaatattgcagtggagatcactgaatcatttgtggattacatcaaaaccaagcctattgtatttgaagtctttgggcattatcagcagcacccacttcatctgcaaggacaggagcttaacagtccgcctcagccgtgccgccgattcttccctccacccatgccactgtccaagccagttccagccaccaagttaaacacgatgagcaaaaccagccttggccagagcatgagcaagtatgacctcctggtttggtttgagatcagtgaactggagcctacaggagagtatatcccagctgtggttgaccacacagcaggcttgccttgccaggggacatttttgcttcatcagggcatccagcgaaggatcacagtgaccattatccatgagaaggggagcgagctccattggaaagatgttcgtgaactggtggtaggtcgtattcggaataagcctgaggtggatgaagctgcagttgatgccatcctctccctaaatattatttctgccaagtacctgaagtcttcccacaactctagcaggaccttctaccgctttgaggctgtgtgggatagctctctgcataactcccttcttctgaaccgagtgacaccctatggagaaaagatctacatgaccttgtcggcctacctagagctggatcattgcatccagccggctgtcatcaccaaggatgtgtgcatggtcttctactcccgagatgccaagatctcaccaccacgctctctgcgtagcctctttggcagcggctactcaaagtcaccagattcgaatcgagtcactggcatttacgaactcagcttatgcaaaatgtcagacacaggtagtccaggtatgcagagaaggagaagaaaaatcttagatacgtcagtggcatatgtgcggggagaagagaacttagcaggctggcggccccgtggagacagcctcatccttgagcaccagtgggagctggagaagctggagctcctacatgaggtggaaaaaacccgccactttttgctgctgcgtgagagacttggtgacagcatccccaaatccctgagcgactcgttatcccccagcctcagcagtgggaccctcagcacctccaccagtatctcctctcagatctcaaccactacctttgaaagcgccatcacacctagcgagagcagtggctatgattcaggagacatcgaaagcctggtggaccgagagaaagagctggctaccaagtgcctgcaacttctcacccacactttcaacagagaattcagccaggtgcacggcagcgtcagtgactgtaagttgtctgatatctctccaattggacgggatccctctgagtccagtttcagcagtgccaccctcactccctcctccacctgtccctctctggtagactctaggagcaactctctggatcagaagaccccagaagccaattcccgggcctctagtccctgcccagaatttgaacagtttcagattgtcccagctgtggaaacaccatatttggcccgagcaggaaaaaacgaatttctcaatcttgttccagatattgaagaaattagaccaagctcagtggtctctaagaaaggataccttcatttcaaggagcctctttacagtaactgggctaaacattttgttgtcgtccgtcggccttatgtcttcatctataacagtgacaaagaccctgtggagcgtggaatcattaacctgtccacagcacaggtggagtacagtgaggaccagcaggccatggtgaagacaccaaacacctttgctgtctgcacaaagcaccgtggggtccttttgcaggccctcaatgacaaagacatgaacgactggttgtatgccttcaacccacttctagctggcacaatacgaccaggtcatctggcttccgagatcatcagagaagataagtctgtctctttcagctgccagtaagttttccaggatgagaggggaaaaagaaagcctccagtgacttcagttgctttgccagttgtcttgggattgttttacaccatcctttacttcccttgctcagacctctctgtttcaccattgctcaggcattcaggaaagtatctgctcactcccacttggtgagtcctcggccttgaggttgctgactctcaggcgttaggcagctggatgacttcccgcttcacgcagcaaaggccaggggcttgcgcgcctctgcagagttgttgctagggagacttgtgtcatcatccacaaccttgtttctcacttcctggttgggctcatctctgaagaacaggtctcccagcttcgctccttatcactgcattgtgaagaggaggaaaagtgaatcacggagagagaaaggaaaggatagaatcacaggctgcgtctgcacctgaaaagtgacccgcggaaactctatggcggattttttttttaactttcttcttcctgttaaaacataggtcactaactgtgatgttatttgttttctaagtggtatgtgagattttctaatgtagttagaagtttcattgtctgatggacacaatatgcccttccggttctattcaaaccagcaggatctgtcggtgcttagagatggctgcctggactggaatcaaatctaatttcagggaaatgaagatggaatttgaaggtcacttttaaaattaagtcattgatgctgctgttacagagtgtgacagaggatccatgtctgtgacacaggacggtgggaagcctgagagagagtgaaattatgtgatacactgaaatgacttttgtttttcttctaactcatacaaaactggtttggaaagtctttgctttggaagcgtcagacattagaacaggccaaactggactgtctgttcatagcgtgcctgaataagaaggcctcttagggagccagagggagcagagtggtcgtgtcctgcgtgctcttcaccctctggggcgcccctgctgcggctggcaggtgcagacagcctttgctggtccccagcacgtccagggtgggtgctcccttgcccgacagaaccatccccactgtgaggctgtgagagatttgtggcaggaactgtttatgaggctctagttgttgctgttgtggcgggaaagttaagaaacatagcccttaaggaaaccacctttatgtattttcttaaagcacgcctttaaataagcaaaaactttaaaaggcaggaaagagaattcttaggcaaattcagagaaataagtgctagttaatactaatcacctcctcctctgtctctcatcctcctttctcccatcaaagcaaaatatggcctcaccaccagccccaaatcagtgctcagaccctctctgtgtctgtgtgccctcctgggagtcagtcagcgctcaggccaggactgtgcagggccagccagcccatgcgctagtcaggagcacaggcaaggggtgcttgtggcagtggccgggcacctgagccccagctcgttgttaaacgtgctgacggcaaggggcaatggagtgagtttcccaactaagaaaccactattatatattttttcccttcagtcacatagacttcagacaactctcctattttttatggatttttcagctcatttcagatgaaggaactaagtcattgtgaactgtctcttgagatctaaaaacaagatgacttttcctggcacatattccaaagcaaagactttgttgcctgctgcttattgtctaatttacagggatatttaattttgtcaggtctatgtatatttatccagctatacttacttgcacagtggattggagagaaaggattctccagtgtgcacactcatcggtactctttctgcatttccctcgtgctgtgtcccgctcgggttccaatggacagtatcagggcttgtttgacttaggtctttcagttttcctttcggttcccttttaaaaatgtgattgttaacctgcctcttgaaagattcaaccgggtgtggtggctcacgcctgtaatcccagcacattgggaggccaaggcaggtggatcacctgaggtcagaagtttgagaccagcctggccaacatggtgaaaccccgtctctactaaaaatacaaaaagtagccaggcgtggtggcgtgtgcctgtagtcccagctacttgggaggctgaggcaggagaatagcttgaacctgggaggtggaggctgcagtgagttgagactgcaccattgcactccagcctgggtgacaaagcaggactccgtctcaaaaaaaaagaaaagattcatgatgctgctgctcccagaaggtttgctggatgtgtttacataggactctaacttgtgtgcactacagttgttcaccagggccagtgattcaccccagtgtgtggccagaccatgactgtgtagcaggaatgttttaatttgtgcttccttagtaaattgaaatatcagctgagagattatttgctgctgttattcaaaaggccatttatgaagttagtatttgagccccataagatctttaaaaagcctccaatcatttaaaggaagaaatcagagttgctataaaattcagtaaaaagctcatagccaaacggctgtgctcagatggaaagtctgagctgaggttggtctcttgccaaaccgtggctgttgtgtgttgttcttcatgtcttcgagttcattttttttcattctgcctattctggcatcagctcacttgaggagtccctcagccttcttgtatttaaggcatcgtcttagactttgtggctctaaagtacctgtctgttgagatttcaagtctcttgtcaccatcctcacacatgacaacaaaacccataatgcataagtggcctttttgaaccaagactttgcaaactgatctctcccccgtgaaggagttgagcacattagcaacaatgtacattaattttggattttcattttcatgttttattttgtaaatattatctgatgtttggagcttgagtatacagactgtaaatatagttcttgtatttgtactaattctgattcttttgctgtatagccttagatgtgcaatgcagacactatctaactgtgtgtggtaaccttgcgtcacggagctgttagtgaacgaggtaaaaataataaaggtacagccagtgca

SEQ ID NO: 146701 - DNA, 5885 bp, Homo sapiens
  Payload ID: 9022
  Gene Symbol: KIF1B
  Gene Name: kinesin family member 1B
  Uniprot ID: O60333
  ENST ID: ENST00000377083
  CDS Start-End: 314-3775
ggattcttttcacacagtagtgttggctttgttctgttgggagggaaactattcctctaaaaaatgttcacatttttcctattacttcattcagtagtgaaatgtaatgatttgactctgccatgagtcagtggcatatctgagggatctttgaagttaaaggaaattggccaggcgcagtgactcacgcttataatcccagcactttgggagaccgaggcaggtgaatctgaggaaacttggctgtaacttcaaaagaagatttgattctttatttctggactgcatatatatatataacaaggccattaaaatgtcgggagcctcagtgaaggtggctgtccgggtaaggcccttcaattctcgagagaccagcaaggaatccaaatgcatcattcagatgcaaggcaactcgaccagtattattaacccaaagaatccaaaggaagctccaaagtccttcagcttcgactattcctactggtctcatacctcacccgaagatccctgttttgcatctcaaaaccgtgtgtacaatgacattggcaaggaaatgctcttacacgcctttgagggatataatgtctgtatttttgcctatgggcagactggtgctggaaaatcttatacaatgatgggtaaacaagaagaaagccaggctggcatcattccacagttatgtgaagaactttttgagaaaatcaatgacaactgtaatgaagaaatgtcttactctgtagaggtgagctacatggaaatttactgtgaaagagtacgagatttgctgaatccaaaaaacaagggtaatttgcgtgtgcgtgaacacccacttcttggaccctatgtggaggatctgtccaagttggcagttacttcctacacagacattgctgacctcatggatgctgggaacaaagccaggacagtggcagctacaaacatgaatgaaacaagtagccgttcccacgctgtgtttacgattgttttcacccagaagaaacacgataatgagaccaacctttccactgagaaggtcagtaaaatcagcttggtggatctagcaggaagtgaacgagctgattcaactggtgccaaagggactcgattaaaggaaggagcaaatattaataagtctcttacaactttgggcaaagtcatttcagccttggccgaggtgagtaaaaagaagaagaaaacagattttattccctacagggattctgtacttacttggctccttcgagaaaatttaggtggcaattctcggactgcaatggttgctgctctgagccccgcggatatcaactacgatgagactttgagcactctgagatatgcagatcgtgcaaaacaaattaaatgcaatgctgttatcaatgaggaccccaatgccaaactggttcgtgaattaaaggaggaggtgacacggctgaaggaccttcttcgtgctcagggcctgggagatattattgatacatccatggggtccctcacttcatccccatcttcctgctcactcagtagtcaggtgggcttgacgtctgtgaccagtattcaagagaggatcatgtctacacctggaggagaggaagctattgaacgtttaaaggaatcagagaagatcattgctgagttgaatgaaacttgggaagagaagcttcgtaaaacagaggccatcagaatggagagagaggctttgttggctgagatgggagttgccattcgggaagatggaggaaccctaggggttttctcacctaaaaagaccccacatcttgttaacctcaatgaagacccactaatgtctgagtgcctactttattacatcaaagatggaattacaagggttggccaagcagatgctgagcggcgccaggacatagtgctgagcggggctcacattaaagaagagcattgtatcttccggagtgagagaagcaacagcggggaagttatcgtgaccttagagccctgtgagcgctcagaaacctacgtaaatggcaagagggtgtcccagcctgttcagctgcgctcaggaaaccgtatcatcatgggtaaaaaccatgttttccgctttaaccacccggaacaagcacgagctgagcgagagaagactccttctgctgagaccccctctgagcctgtggactggacatttgcccagagggagcttctggaaaaacaaggaattgatatgaaacaagagatggagaaaaggctacaggaaatggagatcttatacaaaaaggagaaggaagaagcagatcttcttttggagcagcagagactggacgcggattctgatagcggggacgattctgacaagaggtcgtgtgaagagagctggaaactgattacttctctgagagaaaagctacctcccagcaagttgcaaaccattgttaaaaaatgtggcctcccaagcagtgggaagaaacgtgaaccaattaaaatgtatcagataccccaaagaaggcgcttgagtaaagattccaagtgggtcacaatctcagatcttaaaattcaggctgtcaaagagatttgctatgaggttgctctcaatgacttcaggcacagtcggcaggagattgaagccctggccattgtcaagatgaaggagctttgtgccatgtatggcaagaaagaccccaatgagcgggactcctggagggcagtggccagggacgtctgggataccgtcggtgttggggatgagaagatcgaagacgtcatggccactgggaaaggcagcactgatgtagatgacctcaaggttcatatagacaagctggaagatattttgcaagaagtcaaaaagcaaaataacatgaaagacgaggagataaaagtcttaagaaataaaatgctcaaaatggaaaaagtcttgccactgatcggatctcaggaacagaaaagcccaggaagccacaaagcaaaggagcctgttggtgctggtgttagtagcacctctgagaataatgtaagtaaaggagacaatggagaacttgcaaaagaagaacgtgtttcccagctgatgaatggggatccagcttttagacgtggacgtctgcgctggatgaggcaagagcaaattcggtttaagaacttgcaacagcaggagataacaaagcagcttcgtcggcagaatgtacctcataggttcatccctcctgagaaccggaagccccgcttcccctttaagagcaaccctaaacacagaaactcttggagtcctgggacacatatcatcataacagaagatgaggttatagagcttaggattccaaaagacgatgaagcaaggaaagggaataaagaagagagccaagaaaaagggggtaaaggagcttttaaggatccccagtttccatggggctctcaaggaatgagaagtcaagatcacatccaagttagcaagcagcacattaataatcagcaacagccacctcaactacgttggagaagcaattctctcaataatggccagccgaaaagtacgcgctgccaggcatctgcctccgcggagtcattaaactcccacagtggtcaccccactgctgatgtacagactttccaggcaaagcgccatattcatcaacaccgtcagtcttactgtaattataacactggaggtcagttagagggcaatgcagccacttcctatcagaagcagactgacaaacccagccactgtagccagtttgtgacacctccgcggatgaggagacagttctcagcacccaatctcaaagctggtcgagaaaccacagtataaatcagttactggacaaacttgaaatcatggtggaagaaacagacagtgttagctcatgatttgatttggttctacctttggccttgagttcttattatttacattataaatattaactggttttatattgttaagacaaaacactggtaaaagtttcaacacctcccttttgcttgtataccataaatgggcagtttctgaaattttggataaagcatcaagaactcctttttctgaaacgttcctccttttttagtgcctaattaatatacttacttacacagacttgtcccatcttgatgtaagtttgttatgtttttataatgcctataaattaatctgacatccagaaagacctgcctcttagtttatgcagacattcaaaaggagaatttgataagcagaattaaatgtctgttattcataaatgttagaaattggtttaaaaataataacatgcaactgggtgggcacagctttggatttctcatccacgtctgttcccttctttaaatatgattagaattttcgtaagccaaaactaaaggtcttcaaacatatcttgcaatacatagctttgcatcttccacacaacttccacgtcttcttttattctgtattttacaaaaaactcatataatggttttttcttttgaatgtatcagaatatgtatgaaatttgtcatatcagaatctataaattggcactgtgtctgggattctgtttgtggtttgcattttgaagttcaatgtatcatttgacacacatgcacacaaagtgaactattcaccaaaatcatgccaacagaaataccaacaaaaaacttgtgtagcttgtaaggaggttatttggcttgagagggaagaggtgggacagacatgggggacaaagctacagcatatggctctgtggtgctgcttttttccaatagttgatgaaatagtgaaataaaagttaactttggttgggcttggaataaaggagatgatacataataaactattctttggttagcattagtaatgcttgtagacactcaaacaaggaaggcgaagtcctgatgatgatttattgtatcaatacctcattttatttggttgtggtctcagtttgcctcactggagaatccactaagaaagatggattttaatgggaagaaaagaattattttctacatcgttcctcatctcttgagtttgtcaaaaagttttctaagaggcagtgtgaagagccagagatgtccgaaattgcctgacttcatgttttggaagattcctaagtcacatgaaatcatctatcaaacacttgtcttccaaacggtgtgaaaaactacagccaagatagcagttagcattcaaggaagccttaaagattgtgattatgtttttttttcctttgcgtgtgggcactatgctttattagaacacattatttttaatcatagtattttttctttgcctctaagaaaatactttcttaatgctcagaaagttgcttccaattaatgtttttttccccttaaaaagagaagctttgagagatatttttgctttcatagctagaacagttgaagtcttcaactgaggttttatagcagattagacatgggtaaatgatgtctgtaatgggttgagttactgagatgacaatctcctgtgccatttggtttgaatgtacttgataggctgcttcaaatcagtcacttcaatgcattttgtgtaaacccagttgtccttttttattcctctttagacataaatgtgctaactattcctttctatacacaatttattttctaagattaaaaataataattgctaggtttggtggcacatgcgtacagccccagctacttaggaggctgaagcaggaggatccctagagcccaggagttctgggctgtggtacactatgccagttgggtgtaagtttggcatcaatatggtgatgtccctgaagcaggaaaccacaaacttgcatcaggacgggtgaacccagcccaggttggaaatggagcaggccaaaactcccaggctgatcagtaatgggatcttgcctatgaatagccagtgcactgcagccaggacaacagagtgagaacctgtcttt

SEQ ID NO: 146702 - DNA, 10669 bp, Homo sapiens
  Payload ID: 9022
  Gene Symbol: KIF1B
  Gene Name: kinesin family member 1B
  Uniprot ID: O60333
  ENST ID: ENST00000377086
  CDS Start-End: 203-5653
ggaggctgcttgagcaagctagtcattgttcatgcaacacaaaacattcccgcccctaacgccagaatggagcttccagatccctttttttttttttccttgattgctaaatgagcttccaaggaaacttggctgtaacttcaaaagaagatttgattctttatttctggactgcatatatatatataacaaggccattaaaatgtcgggagcctcagtgaaggtggctgtccgggtaaggcccttcaattctcgagagaccagcaaggaatccaaatgcatcattcagatgcaaggcaactcgaccagtattattaacccaaagaatccaaaggaagctccaaagtccttcagcttcgactattcctactggtctcatacctcacccgaagatccctgttttgcatctcaaaaccgtgtgtacaatgacattggcaaggaaatgctcttacacgcctttgagggatataatgtctgtatttttgcctatgggcagactggtgctggaaaatcttatacaatgatgggtaaacaagaagaaagccaggctggcatcattccacagttatgtgaagaactttttgagaaaatcaatgacaactgtaatgaagaaatgtcttactctgtagaggtgagctacatggaaatttactgtgaaagagtacgagatttgctgaatccaaaaaacaagggtaatttgcgtgtgcgtgaacacccacttcttggaccctatgtggaggatctgtccaagttggcagttacttcctacacagacattgctgacctcatggatgctgggaacaaagccaggacagtggcagctacaaacatgaatgaaacaagtagccgttcccacgctgtgtttacgattgttttcacccagaagaaacacgataatgagaccaacctttccactgagaaggtcagtaaaatcagcttggtggatctagcaggaagtgaacgagctgattcaactggtgccaaagggactcgattaaaggaaggagcaaatattaataagtctcttacaactttgggcaaagtcatttcagccttggccgaggtggataactgcactagcaagagtaaaaagaagaagaaaacagattttattccctacagggattctgtacttacttggctccttcgagaaaatttaggtggcaattctcggactgcaatggttgctgctctgagccccgcggatatcaactacgatgagactttgagcactctgagatatgcagatcgtgcaaaacaaattaaatgcaatgctgttatcaatgaggaccccaatgccaaactggttcgtgaattaaaggaggaggtgacacggctgaaggaccttcttcgtgctcagggcctgggagatattattgatattgatccattgatcgatgattactctggaagtggaagcaaatatctgaaagattttcagaacaataagcatagatacttgctagcctctgagaatcaacgccctggccatttttccacagcatccatggggtccctcacttcatccccatcttcctgctcactcagtagtcaggtgggcttgacgtctgtgaccagtattcaagagaggatcatgtctacacctggaggagaggaagctattgaacgtttaaaggaatcagagaagatcattgctgagttgaatgaaacttgggaagagaagcttcgtaaaacagaggccatcagaatggagagagaggctttgttggctgagatgggagttgccattcgggaagatggaggaaccctaggggttttctcacctaaaaagaccccacatcttgttaacctcaatgaagacccactaatgtctgagtgcctactttattacatcaaagatggaattacaagggttggccaagcagatgctgagcggcgccaggacatagtgctgagcggggctcacattaaagaagagcattgtatcttccggagtgagagaagcaacagcggggaagttatcgtgaccttagagccctgtgagcgctcagaaacctacgtaaatggcaagagggtgtcccagcctgttcagctgcgctcaggaaaccgtatcatcatgggtaaaaaccatgttttccgctttaaccacccggaacaagcacgagctgagcgagagaagactccttctgctgagaccccctctgagcctgtggactggacatttgcccagagggagcttctggaaaaacaaggaattgatatgaaacaagagatggagaaaaggctacaggaaatggagatcttatacaaaaaggagaaggaagaagcagatcttcttttggagcagcagagactggactatgagagtaaattgcaggccttgcagaagcaggttgaaacccgatctctggctgcagaaacaactgaagaggaggaagaagaggaagaagttccttggacacagcatgaatttgagttggcccaatgggccttccggaaatggaagtctcatcagtttacttcattacgggacttactctggggcaatgccgtgtacctaaaggaggccaatgccatcagtgtggaactgaaaaagaaggtgcagtttcagtttgttctgctgactgacacactgtactcccctttgcctcctgaattacttcccactgagatggaaaaaactcatgaggacaggcctttccctcgcacagtggtagcagtagaagtccaggatttgaagaatggagcaacacactattggtctttggagaaactcaagcagaggctggatttgatgcgagagatgtatgatagggcaggggagatggcctccagtgcccaagacgaaagcgaaaccactgtgactggcagcgatcccttctatgatcggttccactggttcaaacttgtggggagctcccccattttccacggctgtgtgaacgagcgccttgccgaccgcacaccctcccccactttttccacggccgattccgacatcactgagctggctgacgagcagcaagatgagatggaggattttgatgatgaggcattcgtggatgacgccggctctgacgcagggacggaggagggatcagatctcttcagtgacgggcatgacccgttttacgaccgatccccttggttcattttagtgggaagggcatttgtttacctgagcaatctgctgtatcccgtgcccctgatccacagggtggccatcgtcagtgagaaaggtgaagtgcggggatttctgcgtgtggctgtacaggccatcgcagcggatgaagaagctcctgattatggctctggaattcgacagtcaggaacagctaaaatatcttttgataatgaatactttaatcagagtgacttttcgtctgttgcaatgactcgttctggtctgtccttggaggagttgaggattgtggaaggacagggtcagagttctgaggtcatcactcctccagaagaaatcagtcgaattaatgacttggatttgaagtcaagcactttgctggatggtaagatggtaatggaagggttttctgaagagattggcaaccacctgaaactgggcagtgccttcactttccgagtaacagtgttgcaggccagtggaatcctcccagagtatgcagatatcttctgtcagttcaactttttgcatcgccatgatgaagcattctccacggagcccctcaaaaacaatggcagaggaagtcccctggccttttatcatgtgcagaatattgcagtggagatcactgaatcatttgtggattacatcaaaaccaagcctattgtatttgaagtctttgggcattatcagcagcacccacttcatctgcaaggacaggagcttaacagtccgcctcagccgtgccgccgattcttccctccacccatgccactgtccaagccagttccagccaccaagttaaacacgatgagcaaaaccagccttggccagagcatgagcaagtatgacctcctggtttggtttgagatcagtgaactggagcctacaggagagtatatcccagctgtggttgaccacacagcaggcttgccttgccaggggacatttttgcttcatcagggcatccagcgaaggatcacagtgaccattatccatgagaaggggagcgagctccattggaaagatgttcgtgaactggtggtaggtcgtattcggaataagcctgaggtggatgaagctgcagttgatgccatcctctccctaaatattatttctgccaagtacctgaagtcttcccacaactctagcaggaccttctaccgctttgaggctgtgtgggatagctctctgcataactcccttcttctgaaccgagtgacaccctatggagaaaagatctacatgaccttgtcggcctacctagagctggatcattgcatccagccggctgtcatcaccaaggatgtgtgcatggtcttctactcccgagatgccaagatctcaccaccacgctctctgcgtagcctctttggcagcggctactcaaagtcaccagattcgaatcgagtcactggcatttacgaactcagcttatgcaaaatgtcagacacaggtagtccaggtatgcagagaaggagaagaaaaatcttagatacgtcagtggcatatgtgcggggagaagagaacttagcaggctggcggccccgtggagacagcctcatccttgagcaccagtgggagctggagaagctggagctcctacatgaggtggaaaaaacccgccactttttgctgctgcgtgagagacttggtgacagcatccccaaatccctgagcgactcgttatcccccagcctcagcagtgggaccctcagcacctccaccagtatctcctctcagatctcaaccactacctttgaaagcgccatcacacctagcgagagcagtggctatgattcaggagacatcgaaagcctggtggaccgagagaaagagctggctaccaagtgcctgcaacttctcacccacactttcaacagagaattcagccaggtgcacggcagcgtcagtgactgtaagttgtctgatatctctccaattggacgggatccctctgagtccagtttcagcagtgccaccctcactccctcctccacctgtccctctctggtagactctaggagcaactctctggatcagaagaccccagaagccaattcccgggcctctagtccctgcccagaatttgaacagtttcagattgtcccagctgtggaaacaccatatttggcccgagcaggaaaaaacgaatttctcaatcttgttccagatattgaagaaattagaccaagctcagtggtctctaagaaaggataccttcatttcaaggagcctctttacagtaactgggctaaacattttgttgtcgtccgtcggccttatgtcttcatctataacagtgacaaagaccctgtggagcgtggaatcattaacctgtccacagcacaggtggagtacagtgaggaccagcaggccatggtgaagacaccaaacacctttgctgtctgcacaaagcaccgtggggtccttttgcaggccctcaatgacaaagacatgaacgactggttgtatgccttcaacccacttctagctggcacaatacggtcaaagctttcccgcagatgcccgagccagtcgaaatactaagtgactctgccgagtgccctcactcgccttcgagagataaagaaagcgttacctctcatttctctttgtgattcttgacggtgactcttgtatgtaatcctgtggcttaactacttctccctccttgtccagcacttttctagctctcccgttccccatctccattgctctgtactcttttcttttttcttgtgctgagaatctcgttagtagcatgtggcctaacaaaaggaaaaaatgtttttaaacacacacacacacacacacacacacacacacatacacagacaaaaacacaaaaactctgaggggatctggtgaatctccaaattattgtgggtgtactttggcttccttttgtatgataggtccccatcatgaccacctctgatgtctgtgctgctgtcaccaggcacctttgtttttcaagacaacatactttttttttcttttctctgtttgtgatatcactttaatttttcttgggtggcttagagactaagggaggagacatctggcctttttagaacctgagaggaaaaaaagagtctttttttcccctctgtctctttttgccatggctaatccctgcatttccattcagggaaaaggtggtagtgagcatagaactgcaacagttatattctgagtcaaagttggggctttttacggcataattatggaatttttatttactggtagagaggagacgagaggctttttcagtgggcctgggacagtggctgctcttgactttgtgtgaagggaaatgccaaggatgcttctggtggacttcaggggaccccagggtttggccgtgggccgtgatggcagcaggcggtgggatgcttgtagctcctcacagcaggattcctgcccactgttttttctctgttgggagggaagctcttttctaggagtgtctcagttctgcttttggcattagtgatggtggtggtacagttggaattagtgccatgtcatacacaaatgttccacaaggcgggagtgtttcactttctggtgataaacttgatggtcattgttatgattaagataatgccgggcaggccgggcacagtggctcacgcctgtaatccaagcacttggggaggccgaggcgggcagatcacgagatcaggagttcaagaccagcctggccaatatgatgaaaccccgtctctactaaaaatacaaaattagtcgggtatggtggcacatgcctgtaattccagctgcttgggagcctgaggcaggagaactgcttgaacccaggaggcagaggttgcagtgagccaagatcgcgctattgcactccagcctgggtgacagagcaagactctgcctcagaaaaaaaaaaaaataataatgctgggtagtgaccttgtgattgttacagctccctttgatcaaagaaatatagctttcaggcataaacctggaagtctccctctgaatccagcagttgttttcattgatgcttgtcaggttgaagatgctttcagtgatgctctctatactcataaataagcaaatgtggcaggctttgctttctggatcccaggattaaaactaaccgtgaccactactccaaacaaaacacaatatgcctaggggcacggatgaacgtccagggagcccgggccccaggctttgttgcgtgttccctgctcctctccatctggtgtggaaacactgcccagggagaaaggaggaagctcactgtggacagtcttctttccttctgacagaccaggtcatctggcttccgagatcatcagagaagataagtctgtctctttcagctgccagtaagttttccaggatgagaggggaaaaagaaagcctccagtgacttcagttgctttgccagttgtcttgggattgttttacaccatcctttacttcccttgctcagacctctctgtttcaccattgctcaggcattcaggaaagtatctgctcactcccacttggtgagtcctcggccttgaggttgctgactctcaggcgttaggcagctggatgacttcccgcttcacgcagcaaaggccaggggcttgcgcgcctctgcagagttgttgctagggagacttgtgtcatcatccacaaccttgtttctcacttcctggttgggctcatctctgaagaacaggtctcccagcttcgctccttatcactgcattgtgaagaggaggaaaagtgaatcacggagagagaaaggaaaggatagaatcacaggctgcgtctgcacctgaaaagtgacccgcggaaactctatggcggattttttttttaactttcttcttcctgttaaaacataggtcactaactgtgatgttatttgttttctaagtggtatgtgagattttctaatgtagttagaagtttcattgtctgatggacacaatatgcccttccggttctattcaaaccagcaggatctgtcggtgcttagagatggctgcctggactggaatcaaatctaatttcagggaaatgaagatggaatttgaaggtcacttttaaaattaagtcattgatgctgctgttacagagtgtgacagaggatccatgtctgtgacacaggacggtgggaagcctgagagagagtgaaattatgtgatacactgaaatgacttttgtttttcttctaactcatacaaaactggtttggaaagtctttgctttggaagcgtcagacattagaacaggccaaactggactgtctgttcatagcgtgcctgaataagaaggcctcttagggagccagagggagcagagtggtcgtgtcctgcgtgctcttcaccctctggggcgcccctgctgcggctggcaggtgcagacagcctttgctggtccccagcacgtccagggtgggtgctcccttgcccgacagaaccatccccactgtgaggctgtgagagatttgtggcaggaactgtttatgaggctctagttgttgctgttgtggcgggaaagttaagaaacatagcccttaaggaaaccacctttatgtattttcttaaagcacgcctttaaataagcaaaaactttaaaaggcaggaaagagaattcttaggcaaattcagagaaataagtgctagttaatactaatcacctcctcctctgtctctcatcctcctttctcccatcaaagcaaaatatggcctcaccaccagccccaaatcagtgctcagaccctctctgtgtctgtgtgccctcctgggagtcagtcagcgctcaggccaggactgtgcagggccagccagcccatgcgctagtcaggagcacaggcaaggggtgcttgtggcagtggccgggcacctgagccccagctcgttgttaaacgtgctgacggcaaggggcaatggagtgagtttcccaactaagaaaccactattatatattttttcccttcagtcacatagacttcagacaactctcctattttttatggatttttcagctcatttcagatgaaggaactaagtcattgtgaactgtctcttgagatctaaaaacaagatgacttttcctggcacatattccaaagcaaagactttgttgcctgctgcttattgtctaatttacagggatatttaattttgtcaggtctatgtatatttatccagctatacttacttgcacagtggattggagagaaaggattctccagtgtgcacactcatcggtactctttctgcatttccctcgtgctgtgtcccgctcgggttccaatggacagtatcagggcttgtttgacttaggtctttcagttttcctttcggttcccttttaaaaatgtgattgttaacctgcctcttgaaagattcaaccgggtgtggtggctcacgcctgtaatcccagcacattgggaggccaaggcaggtggatcacctgaggtcagaagtttgagaccagcctggccaacatggtgaaaccccgtctctactaaaaatacaaaaagtagccaggcgtggtggcgtgtgcctgtagtcccagctacttgggaggctgaggcaggagaatagcttgaacctgggaggtggaggctgcagtgagttgagactgcaccattgcactccagcctgggtgacaaagcaggactccgtctcaaaaaaaaagaaaagattcatgatgctgctgctcccagaaggtttgctggatgtgtttacataggactctaacttgtgtgcactacagttgttcaccagggccagtgattcaccccagtgtgtggccagaccatgactgtgtagcaggaatgttttaatttgtgcttccttagtaaattgaaatatcagctgagagattatttgctgctgttattcaaaaggccatttatgaagttagtatttgagccccataagatctttaaaaagcctccaatcatttaaaggaagaaatcagagttgctataaaattcagtaaaaagctcatagccaaacggctgtgctcagatggaaagtctgagctgaggttggtctcttgccaaaccgtggctgttgtgtgttgttcttcatgtcttcgagttcattttttttcattctgcctattctggcatcagctcacttgaggagtccctcagccttcttgtatttaaggcatcgtcttagactttgtggctctaaagtacctgtctgttgagatttcaagtctcttgtcaccatcctcacacatgacaacaaaacccataatgcataagtggcctttttgaaccaagactttgcaaactgatctctcccccgtgaaggagttgagcacattagcaacaatgtacattaattttggattttcattttcatgttttattttgtaaatattatctgatgtttggagcttgagtatacagactgtaaatatagttcttgtatttgtactaattctgattcttttgctgtatagccttagatgtgcaatgcagacactatctaactgtgtgtggtaaccttgcgtcacggagctgttagtgaacgaggtaaaaataataaaggtacagccagtgcatcagaa

SEQ ID NO: 146703 - DNA, 7565 bp, Homo sapiens
  Payload ID: 9022
  Gene Symbol: KIF1B
  Gene Name: kinesin family member 1B
  Uniprot ID: O60333
  ENST ID: ENST00000377093
  CDS Start-End: 154-3615
cccggccccccgcgcccccgcgcgccgcggctcctgttgacccggtccgcccgtcggtctgcagcgcggctgaggaaacttggctgtaacttcaaaagaagatttgattctttatttctggactgcatatatatatataacaaggccattaaaatgtcgggagcctcagtgaaggtggctgtccgggtaaggcccttcaattctcgagagaccagcaaggaatccaaatgcatcattcagatgcaaggcaactcgaccagtattattaacccaaagaatccaaaggaagctccaaagtccttcagcttcgactattcctactggtctcatacctcacccgaagatccctgttttgcatctcaaaaccgtgtgtacaatgacattggcaaggaaatgctcttacacgcctttgagggatataatgtctgtatttttgcctatgggcagactggtgctggaaaatcttatacaatgatgggtaaacaagaagaaagccaggctggcatcattccacagttatgtgaagaactttttgagaaaatcaatgacaactgtaatgaagaaatgtcttactctgtagaggtgagctacatggaaatttactgtgaaagagtacgagatttgctgaatccaaaaaacaagggtaatttgcgtgtgcgtgaacacccacttcttggaccctatgtggaggatctgtccaagttggcagttacttcctacacagacattgctgacctcatggatgctgggaacaaagccaggacagtggcagctacaaacatgaatgaaacaagtagccgttcccacgctgtgtttacgattgttttcacccagaagaaacacgataatgagaccaacctttccactgagaaggtcagtaaaatcagcttggtggatctagcaggaagtgaacgagctgattcaactggtgccaaagggactcgattaaaggaaggagcaaatattaataagtctcttacaactttgggcaaagtcatttcagccttggccgaggtgagtaaaaagaagaagaaaacagattttattccctacagggattctgtacttacttggctccttcgagaaaatttaggtggcaattctcggactgcaatggttgctgctctgagccccgcggatatcaactacgatgagactttgagcactctgagatatgcagatcgtgcaaaacaaattaaatgcaatgctgttatcaatgaggaccccaatgccaaactggttcgtgaattaaaggaggaggtgacacggctgaaggaccttcttcgtgctcagggcctgggagatattattgatacatccatggggtccctcacttcatccccatcttcctgctcactcagtagtcaggtgggcttgacgtctgtgaccagtattcaagagaggatcatgtctacacctggaggagaggaagctattgaacgtttaaaggaatcagagaagatcattgctgagttgaatgaaacttgggaagagaagcttcgtaaaacagaggccatcagaatggagagagaggctttgttggctgagatgggagttgccattcgggaagatggaggaaccctaggggttttctcacctaaaaagaccccacatcttgttaacctcaatgaagacccactaatgtctgagtgcctactttattacatcaaagatggaattacaagggttggccaagcagatgctgagcggcgccaggacatagtgctgagcggggctcacattaaagaagagcattgtatcttccggagtgagagaagcaacagcggggaagttatcgtgaccttagagccctgtgagcgctcagaaacctacgtaaatggcaagagggtgtcccagcctgttcagctgcgctcaggaaaccgtatcatcatgggtaaaaaccatgttttccgctttaaccacccggaacaagcacgagctgagcgagagaagactccttctgctgagaccccctctgagcctgtggactggacatttgcccagagggagcttctggaaaaacaaggaattgatatgaaacaagagatggagaaaaggctacaggaaatggagatcttatacaaaaaggagaaggaagaagcagatcttcttttggagcagcagagactggacgcggattctgatagcggggacgattctgacaagaggtcgtgtgaagagagctggaaactgattacttctctgagagaaaagctacctcccagcaagttgcaaaccattgttaaaaaatgtggcctcccaagcagtgggaagaaacgtgaaccaattaaaatgtatcagataccccaaagaaggcgcttgagtaaagattccaagtgggtcacaatctcagatcttaaaattcaggctgtcaaagagatttgctatgaggttgctctcaatgacttcaggcacagtcggcaggagattgaagccctggccattgtcaagatgaaggagctttgtgccatgtatggcaagaaagaccccaatgagcgggactcctggagggcagtggccagggacgtctgggataccgtcggtgttggggatgagaagatcgaagacgtcatggccactgggaaaggcagcactgatgtagatgacctcaaggttcatatagacaagctggaagatattttgcaagaagtcaaaaagcaaaataacatgaaagacgaggagataaaagtcttaagaaataaaatgctcaaaatggaaaaagtcttgccactgatcggatctcaggaacagaaaagcccaggaagccacaaagcaaaggagcctgttggtgctggtgttagtagcacctctgagaataatgtaagtaaaggagacaatggagaacttgcaaaagaagaacgtgtttcccagctgatgaatggggatccagcttttagacgtggacgtctgcgctggatgaggcaagagcaaattcggtttaagaacttgcaacagcaggagataacaaagcagcttcgtcggcagaatgtacctcataggttcatccctcctgagaaccggaagccccgcttcccctttaagagcaaccctaaacacagaaactcttggagtcctgggacacatatcatcataacagaagatgaggttatagagcttaggattccaaaagacgatgaagcaaggaaagggaataaagaagagagccaagaaaaagggggtaaaggagcttttaaggatccccagtttccatggggctctcaaggaatgagaagtcaagatcacatccaagttagcaagcagcacattaataatcagcaacagccacctcaactacgttggagaagcaattctctcaataatggccagccgaaaagtacgcgctgccaggcatctgcctccgcggagtcattaaactcccacagtggtcaccccactgctgatgtacagactttccaggcaaagcgccatattcatcaacaccgtcagtcttactgtaattataacactggaggtcagttagagggcaatgcagccacttcctatcagaagcagactgacaaacccagccactgtagccagtttgtgacacctccgcggatgaggagacagttctcagcacccaatctcaaagctggtcgagaaaccacagtataaatcagttactggacaaacttgaaatcatggtggaagaaacagacagtgttagctcatgatttgatttggttctacctttggccttgagttcttattatttacattataaatattaactggttttatattgttaagacaaaacactggtaaaagtttcaacacctcccttttgcttgtataccataaatgggcagtttctgaaattttggataaagcatcaagaactcctttttctgaaacgttcctccttttttagtgcctaattaatatacttacttacacagacttgtcccatcttgatgtaagtttgttatgtttttataatgcctataaattaatctgacatccagaaagacctgcctcttagtttatgcagacattcaaaaggagaatttgataagcagaattaaatgtctgttattcataaatgttagaaattggtttaaaaataataacatgcaactgggtgggcacagctttggatttctcatccacgtctgttcccttctttaaatatgattagaattttcgtaagccaaaactaaaggtcttcaaacatatcttgcaatacatagctttgcatcttccacacaacttccacgtcttcttttattctgtattttacaaaaaactcatataatggttttttcttttgaatgtatcagaatatgtatgaaatttgtcatatcagaatctataaattggcactgtgtctgggattctgtttgtggtttgcattttgaagttcaatgtatcatttgacacacatgcacacaaagtgaactattcaccaaaatcatgccaacagaaataccaacaaaaaacttgtgtagcttgtaaggaggttatttggcttgagagggaagaggtgggacagacatgggggacaaagctacagcatatggctctgtggtgctgcttttttccaatagttgatgaaatagtgaaataaaagttaactttggttgggcttggaataaaggagatgatacataataaactattctttggttagcattagtaatgcttgtagacactcaaacaaggaaggcgaagtcctgatgatgatttattgtatcaatacctcattttatttggttgtggtctcagtttgcctcactggagaatccactaagaaagatggattttaatgggaagaaaagaattattttctacatcgttcctcatctcttgagtttgtcaaaaagttttctaagaggcagtgtgaagagccagagatgtccgaaattgcctgacttcatgttttggaagattcctaagtcacatgaaatcatctatcaaacacttgtcttccaaacggtgtgaaaaactacagccaagatagcagttagcattcaaggaagccttaaagattgtgattatgtttttttttcctttgcgtgtgggcactatgctttattagaacacattatttttaatcatagtattttttctttgcctctaagaaaatactttcttaatgctcagaaagttgcttccaattaatgtttttttccccttaaaaagagaagctttgagagatatttttgctttcatagctagaacagttgaagtcttcaactgaggttttatagcagattagacatgggtaaatgatgtctgtaatgggttgagttactgagatgacaatctcctgtgccatttggtttgaatgtacttgataggctgcttcaaatcagtcacttcaatgcattttgtgtaaacccagttgtccttttttattcctctttagacataaatgtgctaactattcctttctatacacaatttattttctaagattaaaaataataattgctaggtttggtggcacatgcgtacagccccagctacttaggaggctgaagcaggaggatccctagagcccaggagttctgggctgtggtacactatgccagttgggtgtaagtttggcatcaatatggtgatgtccctgaagcaggaaaccacaaacttgcatcaggacgggtgaacccagcccaggttggaaatggagcaggccaaaactcccaggctgatcagtaatgggatcttgcctatgaatagccagtgcactgcagccaggacaacagagtgagaacctgtctttaaaaaaaaaaaaaaaaaaaaaaaaaaaggtaatatttattatattattcaggtttcaactctgtagcaaaaatgggctctcatttccctaacttgagataacatagggtaggtccatatattttcattcttacagtggtcttttcatgggagtgaatgagttactctccactggtgattaggtaatactgtagaatgaagagttgtataatatattcatttacagctgtggattgtggtaaggactatgtccacagtgatattccaaagaattgggtttatatttgtgcttcatctgttaatcccaggtgtcctcatgttgctgaaatatttagatagctaaaatatcccttaatttcacagatgaccaggaagaaattaaccaaggttttattgactgccatgtatgtcccatgatgcatttctgagcaaatgcttatcctagagaataactctgtatgaataaaattgcttaattgagtctcttactaaataagtaactagtgccatgcttttgtgagctcttggtatggcccatattactttgttttttgtttttgttattgttgttttgtgatagtcttgctctgtcgcccaggctgcagtgcagtggcacaatctcagctcactgcaacctctgcctcctgggttcaagcaattctcctgtctcagcctcctgggtagctgggactacaggtgcatgccaccatgcctggctaacttttgtatttttagtagagacagggtttcaccacgttggtcaggctggtctcgaattcctaacctcaggtgatccacctgccttggcctcccaaagtgctgagattacaggcgtgagccaccgcgcctggcctgtttgtttttttaacatgatttttctctaagcttaaataccacaaggccaaagagaaatggtcataatttaaaccattattatattgttgaggtatccctagctattattatagcaaagtgggaaaaaagtgtttattctattgaagttatgtaatgatccgacattaatgggaatatagaggagtcctaattaattggtataatttcacaaagcggaatggtattccttggagagttaaagacattctctttagtaagtgtaaaccaaagggcattttctttattcctgcttctaattccttctagcccagtgaattatttctcttttcactggtaatgtgatgaatgggaattgtttattacattgaagtgacttgaagtgaccttttgtgctttaggtgcaggttgacactgaaaaaaaaacaaaacactgaatttttcacacctatgtctgcattaaaggctgttttactaccggaagttacatagacttcctgcagtcagctgctgtgccccagtgccttactggtcctttgtagatttgccttaatgatttgtacaaatgactgggaggcggggatgctgcctgtgtcctggtgaaccttaatgaaggggccgtcttaggcacagtgcaaaacaagcatttgtcctgtactgttagagccaaaattgtgatgagcaatactgataattgtccagtttatgtcatctttcccagattttaaaatctgttctagatattcttagcttgaaccacttttgattgtgaaatgtattaggtgttgtcccattattactgtaaaatgaagttttgaatcttcttgttaataaactgtggatttcccctctcaatttcttaaacaacaacaaaaaaatgcttgaagattgtctttgagtgtaagatctgccttttcagaaagggagtgttagtttgtaatgttaaaaaataaagacctcattcaataaaagttgaagtcatcttttaa

SEQ ID NO: 146704 - DNA, 8624 bp, Homo sapiens
  Payload ID: 9022
  Gene Symbol: KIF1B
  Gene Name: kinesin family member 1B
  ENST ID: ENST00000620295
  CDS Start-End: 1-5430
atgtcgggagcctcagtgaaggtggctgtccgggtaaggcccttcaattctcgagagaccagcaaggaatccaaatgcatcattcagatgcaaggcaactcgaccagtattattaacccaaagaatccaaaggaagctccaaagtccttcagcttcgactattcctactggtctcatacctcacccgaagatccctgttttgcatctcaaaaccgtgtgtacaatgacattggcaaggaaatgctcttacacgcctttgagggatataatgtctgtatttttgcctatgggcagactggtgctggaaaatcttatacaatgatgggtaaacaagaagaaagccaggctggcatcattccacagttatgtgaagaactttttgagaaaatcaatgacaactgtaatgaagaaatgtcttactctgtagaggtgagctacatggaaatttactgtgaaagagtacgagatttgctgaatccaaaaaacaagggtaatttgcgtgtgcgtgaacacccacttcttggaccctatgtggaggatctgtccaagttggcagttacttcctacacagacattgctgacctcatggatgctgggaacaaagccaggacagtggcagctacaaacatgaatgaaacaagtagccgttcccacgctgtgtttacgattgttttcacccagaagaaacacgataatgagaccaacctttccactgagaaggtcagtaaaatcagcttggtggatctagcaggaagtgaacgagctgattcaactggtgccaaagggactcgattaaaggaaggagcaaatattaataagtctcttacaactttgggcaaagtcatttcagccttggccgaggtggataactgcactagcaagagtaaaaagaagaagaaaacagattttattccctacagggattctgtacttacttggctccttcgagaaaatttaggtggcaattctcggactgcaatggttgctgctctgagccccgcggatatcaactacgatgagactttgagcactctgagatatgcagatcgtgcaaaacaaattaaatgcaatgctgttatcaatgaggaccccaatgccaaactggttcgtgaattaaaggaggaggtgacacggctgaaggaccttcttcgtgctcagggcctgggagatattattgataatctgaaagattttcagaacaataagcatagatacttgctagcctctgagaatcaacgccctggccatttttccacagcatccatggggtccctcacttcatccccatcttcctgctcactcagtagtcaggtgggcttgacgtctgtgaccagtattcaagagaggatcatgtctacacctggaggagaggaagctattgaacgtttaaaggaatcagagaagatcattgctgagttgaatgaaacttgggaagagaagcttcgtaaaacagaggccatcagaatggagagagaggctttgttggctgagatgggagttgccattcgggaagatggaggaaccctaggggttttctcacctaaaaagaccccacatcttgttaacctcaatgaagacccactaatgtctgagtgcctactttattacatcaaagatggaattacaagggttggccaagcagatgctgagcggcgccaggacatagtgctgagcggggctcacattaaagaagagcattgtatcttccggagtgagagaagcaacagcggggaagttatcgtgaccttagagccctgtgagcgctcagaaacctacgtaaatggcaagagggtgtcccagcctgttcagctgcgctcaggaaaccgtatcatcatgggtaaaaaccatgttttccgctttaaccacccggaacaagcacgagctgagcgagagaagactccttctgctgagaccccctctgagcctgtggactggacatttgcccagagggagcttctggaaaaacaaggaattgatatgaaacaagagatggagaaaaggctacaggaaatggagatcttatacaaaaaggagaaggaagaagcagatcttcttttggagcagcagagactggactatgagagtaaattgcaggccttgcagaagcaggttgaaacccgatctctggctgcagaaacaactgaagaggaggaagaagaggaagaagttccttggacacagcatgaatttgagttggcccaatgggccttccggaaatggaagtctcatcagtttacttcattacgggacttactctggggcaatgccgtgtacctaaaggaggccaatgccatcagtgtggaactgaaaaagaaggtgcagtttcagtttgttctgctgactgacacactgtactcccctttgcctcctgaattacttcccactgagatggaaaaaactcatgaggacaggcctttccctcgcacagtggtagcagtagaagtccaggatttgaagaatggagcaacacactattggtctttggagaaactcaagcagaggctggatttgatgcgagagatgtatgatagggcaggggagatggcctccagtgcccaagacgaaagcgaaaccactgtgactggcagcgatcccttctatgatcggttccactggttcaaacttgtggggagctcccccattttccacggctgtgtgaacgagcgccttgccgaccgcacaccctcccccactttttccacggccgattccgacatcactgagctggctgacgagcagcaagatgagatggaggattttgatgatgaggcattcgtggatgacgccggctctgacgcagggacggaggagggatcagatctcttcagtgacgggcatgacccgttttacgaccgatccccttggttcattttagtgggaagggcatttgtttacctgagcaatctgctgtatcccgtgcccctgatccacagggtggccatcgtcagtgagaaaggtgaagtgcggggatttctgcgtgtggctgtacaggccatcgcagcggatgaagaagctcctgattatggctctggaattcgacagtcaggaacagctaaaatatcttttgataatgaatactttaatcagagtgacttttcgtctgttgcaatgactcgttctggtctgtccttggaggagttgaggattgtggaaggacagggtcagagttctgaggtcatcactcctccagaagaaatcagtcgaattaatgacttggatttgaagtcaagcactttgctggatggtaagatggtaatggaagggttttctgaagagattggcaaccacctgaaactgggcagtgccttcactttccgagtaacagtgttgcaggccagtggaatcctcccagagtatgcagatatcttctgtcagttcaactttttgcatcgccatgatgaagcattctccacggagcccctcaaaaacaatggcagaggaagtcccctggccttttatcatgtgcagaatattgcagtggagatcactgaatcatttgtggattacatcaaaaccaagcctattgtatttgaagtctttgggcattatcagcagcacccacttcatctgcaaggacaggagcttaacagtccgcctcagccgtgccgccgattcttccctccacccatgccactgtccaagccagttccagccaccaagttaaacacgatgagcaaaaccagccttggccagagcatgagcaagtatgacctcctggtttggtttgagatcagtgaactggagcctacaggagagtatatcccagctgtggttgaccacacagcaggcttgccttgccaggggacatttttgcttcatcagggcatccagcgaaggatcacagtgaccattatccatgagaaggggagcgagctccattggaaagatgttcgtgaactggtggtaggtcgtattcggaataagcctgaggtggatgaagctgcagttgatgccatcctctccctaaatattatttctgccaagtacctgaagtcttcccacaactctagcaggaccttctaccgctttgaggctgtgtgggatagctctctgcataactcccttcttctgaaccgagtgacaccctatggagaaaagatctacatgaccttgtcggcctacctagagctggatcattgcatccagccggctgtcatcaccaaggatgtgtgcatggtcttctactcccgagatgccaagatctcaccaccacgctctctgcgtagcctctttggcagcggctactcaaagtcaccagattcgaatcgagtcactggcatttacgaactcagcttatgcaaaatgtcagacacaggtagtccaggtatgcagagaaggagaagaaaaatcttagatacgtcagtggcatatgtgcggggagaagagaacttagcaggctggcggccccgtggagacagcctcatccttgagcaccagtgggagctggagaagctggagctcctacatgaggtggaaaaaacccgccactttttgctgctgcgtgagagacttggtgacagcatccccaaatccctgagcgactcgttatcccccagcctcagcagtgggaccctcagcacctccaccagtatctcctctcagatctcaaccactacctttgaaagcgccatcacacctagcgagagcagtggctatgattcaggagacatcgaaagcctggtggaccgagagaaagagctggctaccaagtgcctgcaacttctcacccacactttcaacagagaattcagccaggtgcacggcagcgtcagtgactgtaagttgtctgatatctctccaattggacgggatccctctgagtccagtttcagcagtgccaccctcactccctcctccacctgtccctctctggtagactctaggagcaactctctggatcagaagaccccagaagccaattcccgggcctctagtccctgcccagaatttgaacagtttcagattgtcccagctgtggaaacaccatatttggcccgagcaggaaaaaacgaatttctcaatcttgttccagatattgaagaaattagaccaagctcagtggtctctaagaaaggataccttcatttcaaggagcctctttacagtaactgggctaaacattttgttgtcgtccgtcggccttatgtcttcatctataacagtgacaaagaccctgtggagcgtggaatcattaacctgtccacagcacaggtggagtacagtgaggaccagcaggccatggtgaagacaccaaacacctttgctgtctgcacaaagcaccgtggggtccttttgcaggccctcaatgacaaagacatgaacgactggttgtatgccttcaacccacttctagctggcacaatacgaccaggtcatctggcttccgagatcatcagagaagataagtctgtctctttcagctgccagtaagttttccaggatgagaggggaaaaagaaagcctccagtgacttcagttgctttgccagttgtcttgggattgttttacaccatcctttacttcccttgctcagacctctctgtttcaccattgctcaggcattcaggaaagtatctgctcactcccacttggtgagtcctcggccttgaggttgctgactctcaggcgttaggcagctggatgacttcccgcttcacgcagcaaaggccaggggcttgcgcgcctctgcagagttgttgctagggagacttgtgtcatcatccacaaccttgtttctcacttcctggttgggctcatctctgaagaacaggtctcccagcttcgctccttatcactgcattgtgaagaggaggaaaagtgaatcacggagagagaaaggaaaggatagaatcacaggctgcgtctgcacctgaaaagtgacccgcggaaactctatggcggattttttttttaactttcttcttcctgttaaaacataggtcactaactgtgatgttatttgttttctaagtggtatgtgagattttctaatgtagttagaagtttcattgtctgatggacacaatatgcccttccggttctattcaaaccagcaggatctgtcggtgcttagagatggctgcctggactggaatcaaatctaatttcagggaaatgaagatggaatttgaaggtcacttttaaaattaagtcattgatgctgctgttacagagtgtgacagaggatccatgtctgtgacacaggacggtgggaagcctgagagagagtgaaattatgtgatacactgaaatgacttttgtttttcttctaactcatacaaaactggtttggaaagtctttgctttggaagcgtcagacattagaacaggccaaactggactgtctgttcatagcgtgcctgaataagaaggcctcttagggagccagagggagcagagtggtcgtgtcctgcgtgctcttcaccctctggggcgcccctgctgcggctggcaggtgcagacagcctttgctggtccccagcacgtccagggtgggtgctcccttgcccgacagaaccatccccactgtgaggctgtgagagatttgtggcaggaactgtttatgaggctctagttgttgctgttgtggcgggaaagttaagaaacatagcccttaaggaaaccacctttatgtattttcttaaagcacgcctttaaataagcaaaaactttaaaaggcaggaaagagaattcttaggcaaattcagagaaataagtgctagttaatactaatcacctcctcctctgtctctcatcctcctttctcccatcaaagcaaaatatggcctcaccaccagccccaaatcagtgctcagaccctctctgtgtctgtgtgccctcctgggagtcagtcagcgctcaggccaggactgtgcagggccagccagcccatgcgctagtcaggagcacaggcaaggggtgcttgtggcagtggccgggcacctgagccccagctcgttgttaaacgtgctgacggcaaggggcaatggagtgagtttcccaactaagaaaccactattatatattttttcccttcagtcacatagacttcagacaactctcctattttttatggatttttcagctcatttcagatgaaggaactaagtcattgtgaactgtctcttgagatctaaaaacaagatgacttttcctggcacatattccaaagcaaagactttgttgcctgctgcttattgtctaatttacagggatatttaattttgtcaggtctatgtatatttatccagctatacttacttgcacagtggattggagagaaaggattctccagtgtgcacactcatcggtactctttctgcatttccctcgtgctgtgtcccgctcgggttccaatggacagtatcagggcttgtttgacttaggtctttcagttttcctttcggttcccttttaaaaatgtgattgttaacctgcctcttgaaagattcaaccgggtgtggtggctcacgcctgtaatcccagcacattgggaggccaaggcaggtggatcacctgaggtcagaagtttgagaccagcctggccaacatggtgaaaccccgtctctactaaaaatacaaaaagtagccaggcgtggtggcgtgtgcctgtagtcccagctacttgggaggctgaggcaggagaatagcttgaacctgggaggtggaggctgcagtgagttgagactgcaccattgcactccagcctgggtgacaaagcaggactccgtctcaaaaaaaaagaaaagattcatgatgctgctgctcccagaaggtttgctggatgtgtttacataggactctaacttgtgtgcactacagttgttcaccagggccagtgattcaccccagtgtgtggccagaccatgactgtgtagcaggaatgttttaatttgtgcttccttagtaaattgaaatatcagctgagagattatttgctgctgttattcaaaaggccatttatgaagttagtatttgagccccataagatctttaaaaagcctccaatcatttaaaggaagaaatcagagttgctataaaattcagtaaaaagctcatagccaaacggctgtgctcagatggaaagtctgagctgaggttggtctcttgccaaaccgtggctgttgtgtgttgttcttcatgtcttcgagttcattttttttcattctgcctattctggcatcagctcacttgaggagtccctcagccttcttgtatttaaggcatcgtcttagactttgtggctctaaagtacctgtctgttgagatttcaagtctcttgtcaccatcctcacacatgacaacaaaacccataatgcataagtggcctttttgaaccaagactttgcaaactgatctctcccccgtgaaggagttgagcacattagcaacaatgtacattaattttggattttcattttcatgttttattttgtaaatattatctgatgtttggagcttgagtatacagactgtaaatatagttcttgtatttgtactaattctgattcttttgctgtatagccttagatgtgcaatgcagacactatctaactgtgtgtggtaaccttgcgtcacggagctgttagtgaacgaggtaaaaataataaaggtacagccagtgc

SEQ ID NO: 146705 - DNA, 8588 bp, Homo sapiens
  Payload ID: 9022
  Gene Symbol: KIF1B
  Gene Name: kinesin family member 1B
  ENST ID: ENST00000622724
  CDS Start-End: 1-5394
atgtcgggagcctcagtgaaggtggctgtccgggtaaggcccttcaattctcgagagaccagcaaggaatccaaatgcatcattcagatgcaaggcaactcgaccagtattattaacccaaagaatccaaaggaagctccaaagtccttcagcttcgactattcctactggtctcatacctcacccgaagatccctgttttgcatctcaaaaccgtgtgtacaatgacattggcaaggaaatgctcttacacgcctttgagggatataatgtctgtatttttgcctatgggcagactggtgctggaaaatcttatacaatgatgggtaaacaagaagaaagccaggctggcatcattccacagttatgtgaagaactttttgagaaaatcaatgacaactgtaatgaagaaatgtcttactctgtagaggtgagctacatggaaatttactgtgaaagagtacgagatttgctgaatccaaaaaacaagggtaatttgcgtgtgcgtgaacacccacttcttggaccctatgtggaggatctgtccaagttggcagttacttcctacacagacattgctgacctcatggatgctgggaacaaagccaggacagtggcagctacaaacatgaatgaaacaagtagccgttcccacgctgtgtttacgattgttttcacccagaagaaacacgataatgagaccaacctttccactgagaaggtcagtaaaatcagcttggtggatctagcaggaagtgaacgagctgattcaactggtgccaaagggactcgattaaaggaaggagcaaatattaataagtctcttacaactttgggcaaagtcatttcagccttggccgaggtggataactgcactagcaagagtaaaaagaagaagaaaacagattttattccctacagggattctgtacttacttggctccttcgagaaaatttaggtggcaattctcggactgcaatggttgctgctctgagccccgcggatatcaactacgatgagactttgagcactctgagatatgcagatcgtgcaaaacaaattaaatgcaatgctgttatcaatgaggaccccaatgccaaactggttcgtgaattaaaggaggaggtgacacggctgaaggaccttcttcgtgctcagggcctgggagatattattgatattgatccattgatcgatgattactctggaagtggaagcaaatcatccatggggtccctcacttcatccccatcttcctgctcactcagtagtcaggtgggcttgacgtctgtgaccagtattcaagagaggatcatgtctacacctggaggagaggaagctattgaacgtttaaaggaatcagagaagatcattgctgagttgaatgaaacttgggaagagaagcttcgtaaaacagaggccatcagaatggagagagaggctttgttggctgagatgggagttgccattcgggaagatggaggaaccctaggggttttctcacctaaaaagaccccacatcttgttaacctcaatgaagacccactaatgtctgagtgcctactttattacatcaaagatggaattacaagggttggccaagcagatgctgagcggcgccaggacatagtgctgagcggggctcacattaaagaagagcattgtatcttccggagtgagagaagcaacagcggggaagttatcgtgaccttagagccctgtgagcgctcagaaacctacgtaaatggcaagagggtgtcccagcctgttcagctgcgctcaggaaaccgtatcatcatgggtaaaaaccatgttttccgctttaaccacccggaacaagcacgagctgagcgagagaagactccttctgctgagaccccctctgagcctgtggactggacatttgcccagagggagcttctggaaaaacaaggaattgatatgaaacaagagatggagaaaaggctacaggaaatggagatcttatacaaaaaggagaaggaagaagcagatcttcttttggagcagcagagactggactatgagagtaaattgcaggccttgcagaagcaggttgaaacccgatctctggctgcagaaacaactgaagaggaggaagaagaggaagaagttccttggacacagcatgaatttgagttggcccaatgggccttccggaaatggaagtctcatcagtttacttcattacgggacttactctggggcaatgccgtgtacctaaaggaggccaatgccatcagtgtggaactgaaaaagaaggtgcagtttcagtttgttctgctgactgacacactgtactcccctttgcctcctgaattacttcccactgagatggaaaaaactcatgaggacaggcctttccctcgcacagtggtagcagtagaagtccaggatttgaagaatggagcaacacactattggtctttggagaaactcaagcagaggctggatttgatgcgagagatgtatgatagggcaggggagatggcctccagtgcccaagacgaaagcgaaaccactgtgactggcagcgatcccttctatgatcggttccactggttcaaacttgtggggagctcccccattttccacggctgtgtgaacgagcgccttgccgaccgcacaccctcccccactttttccacggccgattccgacatcactgagctggctgacgagcagcaagatgagatggaggattttgatgatgaggcattcgtggatgacgccggctctgacgcagggacggaggagggatcagatctcttcagtgacgggcatgacccgttttacgaccgatccccttggttcattttagtgggaagggcatttgtttacctgagcaatctgctgtatcccgtgcccctgatccacagggtggccatcgtcagtgagaaaggtgaagtgcggggatttctgcgtgtggctgtacaggccatcgcagcggatgaagaagctcctgattatggctctggaattcgacagtcaggaacagctaaaatatcttttgataatgaatactttaatcagagtgacttttcgtctgttgcaatgactcgttctggtctgtccttggaggagttgaggattgtggaaggacagggtcagagttctgaggtcatcactcctccagaagaaatcagtcgaattaatgacttggatttgaagtcaagcactttgctggatggtaagatggtaatggaagggttttctgaagagattggcaaccacctgaaactgggcagtgccttcactttccgagtaacagtgttgcaggccagtggaatcctcccagagtatgcagatatcttctgtcagttcaactttttgcatcgccatgatgaagcattctccacggagcccctcaaaaacaatggcagaggaagtcccctggccttttatcatgtgcagaatattgcagtggagatcactgaatcatttgtggattacatcaaaaccaagcctattgtatttgaagtctttgggcattatcagcagcacccacttcatctgcaaggacaggagcttaacagtccgcctcagccgtgccgccgattcttccctccacccatgccactgtccaagccagttccagccaccaagttaaacacgatgagcaaaaccagccttggccagagcatgagcaagtatgacctcctggtttggtttgagatcagtgaactggagcctacaggagagtatatcccagctgtggttgaccacacagcaggcttgccttgccaggggacatttttgcttcatcagggcatccagcgaaggatcacagtgaccattatccatgagaaggggagcgagctccattggaaagatgttcgtgaactggtggtaggtcgtattcggaataagcctgaggtggatgaagctgcagttgatgccatcctctccctaaatattatttctgccaagtacctgaagtcttcccacaactctagcaggaccttctaccgctttgaggctgtgtgggatagctctctgcataactcccttcttctgaaccgagtgacaccctatggagaaaagatctacatgaccttgtcggcctacctagagctggatcattgcatccagccggctgtcatcaccaaggatgtgtgcatggtcttctactcccgagatgccaagatctcaccaccacgctctctgcgtagcctctttggcagcggctactcaaagtcaccagattcgaatcgagtcactggcatttacgaactcagcttatgcaaaatgtcagacacaggtagtccaggtatgcagagaaggagaagaaaaatcttagatacgtcagtggcatatgtgcggggagaagagaacttagcaggctggcggccccgtggagacagcctcatccttgagcaccagtgggagctggagaagctggagctcctacatgaggtggaaaaaacccgccactttttgctgctgcgtgagagacttggtgacagcatccccaaatccctgagcgactcgttatcccccagcctcagcagtgggaccctcagcacctccaccagtatctcctctcagatctcaaccactacctttgaaagcgccatcacacctagcgagagcagtggctatgattcaggagacatcgaaagcctggtggaccgagagaaagagctggctaccaagtgcctgcaacttctcacccacactttcaacagagaattcagccaggtgcacggcagcgtcagtgactgtaagttgtctgatatctctccaattggacgggatccctctgagtccagtttcagcagtgccaccctcactccctcctccacctgtccctctctggtagactctaggagcaactctctggatcagaagaccccagaagccaattcccgggcctctagtccctgcccagaatttgaacagtttcagattgtcccagctgtggaaacaccatatttggcccgagcaggaaaaaacgaatttctcaatcttgttccagatattgaagaaattagaccaagctcagtggtctctaagaaaggataccttcatttcaaggagcctctttacagtaactgggctaaacattttgttgtcgtccgtcggccttatgtcttcatctataacagtgacaaagaccctgtggagcgtggaatcattaacctgtccacagcacaggtggagtacagtgaggaccagcaggccatggtgaagacaccaaacacctttgctgtctgcacaaagcaccgtggggtccttttgcaggccctcaatgacaaagacatgaacgactggttgtatgccttcaacccacttctagctggcacaatacgaccaggtcatctggcttccgagatcatcagagaagataagtctgtctctttcagctgccagtaagttttccaggatgagaggggaaaaagaaagcctccagtgacttcagttgctttgccagttgtcttgggattgttttacaccatcctttacttcccttgctcagacctctctgtttcaccattgctcaggcattcaggaaagtatctgctcactcccacttggtgagtcctcggccttgaggttgctgactctcaggcgttaggcagctggatgacttcccgcttcacgcagcaaaggccaggggcttgcgcgcctctgcagagttgttgctagggagacttgtgtcatcatccacaaccttgtttctcacttcctggttgggctcatctctgaagaacaggtctcccagcttcgctccttatcactgcattgtgaagaggaggaaaagtgaatcacggagagagaaaggaaaggatagaatcacaggctgcgtctgcacctgaaaagtgacccgcggaaactctatggcggattttttttttaactttcttcttcctgttaaaacataggtcactaactgtgatgttatttgttttctaagtggtatgtgagattttctaatgtagttagaagtttcattgtctgatggacacaatatgcccttccggttctattcaaaccagcaggatctgtcggtgcttagagatggctgcctggactggaatcaaatctaatttcagggaaatgaagatggaatttgaaggtcacttttaaaattaagtcattgatgctgctgttacagagtgtgacagaggatccatgtctgtgacacaggacggtgggaagcctgagagagagtgaaattatgtgatacactgaaatgacttttgtttttcttctaactcatacaaaactggtttggaaagtctttgctttggaagcgtcagacattagaacaggccaaactggactgtctgttcatagcgtgcctgaataagaaggcctcttagggagccagagggagcagagtggtcgtgtcctgcgtgctcttcaccctctggggcgcccctgctgcggctggcaggtgcagacagcctttgctggtccccagcacgtccagggtgggtgctcccttgcccgacagaaccatccccactgtgaggctgtgagagatttgtggcaggaactgtttatgaggctctagttgttgctgttgtggcgggaaagttaagaaacatagcccttaaggaaaccacctttatgtattttcttaaagcacgcctttaaataagcaaaaactttaaaaggcaggaaagagaattcttaggcaaattcagagaaataagtgctagttaatactaatcacctcctcctctgtctctcatcctcctttctcccatcaaagcaaaatatggcctcaccaccagccccaaatcagtgctcagaccctctctgtgtctgtgtgccctcctgggagtcagtcagcgctcaggccaggactgtgcagggccagccagcccatgcgctagtcaggagcacaggcaaggggtgcttgtggcagtggccgggcacctgagccccagctcgttgttaaacgtgctgacggcaaggggcaatggagtgagtttcccaactaagaaaccactattatatattttttcccttcagtcacatagacttcagacaactctcctattttttatggatttttcagctcatttcagatgaaggaactaagtcattgtgaactgtctcttgagatctaaaaacaagatgacttttcctggcacatattccaaagcaaagactttgttgcctgctgcttattgtctaatttacagggatatttaattttgtcaggtctatgtatatttatccagctatacttacttgcacagtggattggagagaaaggattctccagtgtgcacactcatcggtactctttctgcatttccctcgtgctgtgtcccgctcgggttccaatggacagtatcagggcttgtttgacttaggtctttcagttttcctttcggttcccttttaaaaatgtgattgttaacctgcctcttgaaagattcaaccgggtgtggtggctcacgcctgtaatcccagcacattgggaggccaaggcaggtggatcacctgaggtcagaagtttgagaccagcctggccaacatggtgaaaccccgtctctactaaaaatacaaaaagtagccaggcgtggtggcgtgtgcctgtagtcccagctacttgggaggctgaggcaggagaatagcttgaacctgggaggtggaggctgcagtgagttgagactgcaccattgcactccagcctgggtgacaaagcaggactccgtctcaaaaaaaaagaaaagattcatgatgctgctgctcccagaaggtttgctggatgtgtttacataggactctaacttgtgtgcactacagttgttcaccagggccagtgattcaccccagtgtgtggccagaccatgactgtgtagcaggaatgttttaatttgtgcttccttagtaaattgaaatatcagctgagagattatttgctgctgttattcaaaaggccatttatgaagttagtatttgagccccataagatctttaaaaagcctccaatcatttaaaggaagaaatcagagttgctataaaattcagtaaaaagctcatagccaaacggctgtgctcagatggaaagtctgagctgaggttggtctcttgccaaaccgtggctgttgtgtgttgttcttcatgtcttcgagttcattttttttcattctgcctattctggcatcagctcacttgaggagtccctcagccttcttgtatttaaggcatcgtcttagactttgtggctctaaagtacctgtctgttgagatttcaagtctcttgtcaccatcctcacacatgacaacaaaacccataatgcataagtggcctttttgaaccaagactttgcaaactgatctctcccccgtgaaggagttgagcacattagcaacaatgtacattaattttggattttcattttcatgttttattttgtaaatattatctgatgtttggagcttgagtatacagactgtaaatatagttcttgtatttgtactaattctgattcttttgctgtatagccttagatgtgcaatgcagacactatctaactgtgtgtggtaaccttgcgtcacggagctgttagtgaacgaggtaaaaataataaaggtacagccagtgc

SEQ ID NO: 146706 - DNA, 2098 bp, Homo sapiens
  Payload ID: 9022
  Gene Symbol: KIF1B
  Gene Name: kinesin family member 1B
  ENST ID: ENST00000635499
  CDS Start-End: 1-1496
ctgcagttgatgccatcctctccctaaatattatttctgccaagtacctgaagtcttcccacaactctagcaggctctttcttgataaggatattcctaggaccttctaccgctttgaggctgtgtgggatagctctctgcataactcccttcttctgaaccgagtgacaccctatggagaaaagatctacatgaccttgtcggcctacctagagctggatcattgcatccagccggctgtcatcaccaaggatgtgtgcatggtcttctactcccgagatgccaagatctcaccaccacgctctctgcgtagcctctttggcagcggctactcaaagtcaccagattcgaatcgagtcactggcatttacgaactcagcttatgcaaaatgtcagacacaggtagtccaggtatgcagagaaggagaagaaaaatcttagatacgtcagtggcatatgtgcggggagaagagaacttagcaggctggcggccccgtggagacagcctcatccttgagcaccagtgggagctggagaagctggagctcctacatgaggtggaaaaaacccgccactttttgctgctgcgtgagagacttggtgacagcatccccaaatccctgagcgactcgttatcccccagcctcagcagtgggaccctcagcacctccaccagtatctcctctcagatctcaaccactacctttgaaagcgccatcacacctagcgagagcagtggctatgattcaggagacatcgaaagcctggtggaccgagagaaagagctggctaccaagtgcctgcaacttctcacccacactttcaacagagaattcagccaggtgcacggcagcgtcagtgactgtaagttgtctgatatctctccaattggacgggatccctctgagtccagtttcagcagtgccaccctcactccctcctccacctgtccctctctggtagactctaggagcaactctctggatcagaagaccccagaagccaattcccgggcctctagtccctgcccagaatttgaacagtttcagattgtcccagctgtggaaacaccatatttggcccgagcaggaaaaaacgaatttctcaatcttgttccagatattgaagaaattagaccaagctcagtggtctctaagaaaggataccttcatttcaaggagcctctttacagtaactgggctaaacattttgttgtcgtccgtcggccttatgtcttcatctataacagtgacaaagaccctgtggagcgtggaatcattaacctgtccacagcacaggtggagtacagtgaggaccagcaggccatggtgaagacaccaaacacctttgctgtctgcacaaagcaccgtggggtccttttgcaggccctcaatgacaaagacatgaacgactggttgtatgccttcaacccacttctagctggcacaatacggtcaaagctttcccgcagatgcccgagccagtcgaaatactaagtgactctgccgagtgccctcactcgccttcgagagataaagaaagcgttacctctcatttctctttgtgattcttgacggtgactcttgtatgtaatcctgtggcttaactacttctccctccttgtccagcacttttctagctctcccgttccccatctccattgctctgtactcttttcttttttcttgtgctgagaatctcgttagtagcatgtggcctaacaaaaggaaaaaatgtttttaaacacacacacacacacacacacacacacacacatacacagacaaaaacacaaaaactctgaggggatctggtgaatctccaaattattgtgggtgtactttggcttccttttgtatgataggtccccatcatgaccacctctgatgtctgtgctgctgtcaccaggcacctttgtttttcaagacaacatactttttttttcttttctctgtttgtgatatcactttaatttttcttgggtggcttagagactaagggaggagacatctggcctttttagaacctgagaggaaaaaaagagtctttttttcccctctgtctctttttgccatggctaatccctgcatttccattc

SEQ ID NO: 146707 - DNA, 7919 bp, Homo sapiens
  Payload ID: 9023
  Gene Symbol: KIF1C
  Gene Name: kinesin family member 1C
  Uniprot ID: O43896
  ENST ID: ENST00000320785
  CDS Start-End: 358-3669
ccagctcgcgctgcccgggcgggcgccggccgctggcgccgctactgctgccgcccccggggcgcgagtccgccgcccgccgcccgggcacccggcgaggggcgggggcagctccgaaccggccccagatccttcccgcttccgcctcacgcttcccggaaagcttgtccctctccgccgagctgctccgggagccccgccgcgccgagggtatctcccagagccccagctggtgtggccaggccccaggagtaggatggggctccccctacgagggccggtggcagccagaactgatacagcccccctggtctggggccaggacgccagctgaggagggcaggagtgtctggagctatggctggtgcctcggtgaaagtggcagtgagggttcggccctttaacgcccgtgagaccagccaggatgccaagtgtgtggtcagcatgcagggcaacaccacctccatcatcaatcctaaacagagcaaggatgcccccaaaagcttcacctttgactactcctactggtcacacacttcgacggaggacccccagtttgcatctcagcagcaagtgtatcgggacattggagaagagatgctgctccacgcctttgaaggctacaacgtgtgcatctttgcctatgggcagaccggggctgggaaatcctataccatgatggggcgacaggagccagggcagcagggcatcgtgccccagctctgtgaggacctcttctctcgcgttagtgagaaccagagtgctcagctatcctactctgtggaggtgagctatatggagatctactgtgagcgggtacgagacctcttgaaccccaagagtcggggttctctgcgggtccgggagcaccccatcctgggcccgtacgtgcaggacctgtccaaattggctgtgacctcctacgcagacattgctgacctcatggactgtggaaataaagcacggactgtggctgccaccaacatgaatgagaccagcagccgttcccatgccgtctttaccatcgtcttcacacagcgctgccatgaccagctcacggggctggactcggagaaggtcagtaagatcagtttggtggaccttgctgggagtgagcgagccgactcctcaggggcccggggcatgcgcctgaaggaaggagccaacatcaataagtccctgactacactagggaaagtgatctcggcccttgcagatatgcaatcaaagaagcgaaagtcggattttatcccctacagggactctgtgctcacctggctgctcaaggaaaatttgggggggaactcacgcacagccatgattgcagccctgagccctgctgacatcaattacgaggagactctcagcaccctcaggtatgctgaccgcaccaagcaaatccgctgcaatgccatcatcaacgaggaccctaatgcccggctgattagagagctgcaggaggaagtagcccggctgcgggaactgctgatggctcagggactgtcagcctctgctctggaaggcctgaagacggaagaagggagtgtcagaggcgccctgccagctgtgtcatctcccccagctccagtttcaccctcatcacccaccacacataatggggagctggagccgtcattctcccccaacacggagtcccagattgggcctgaggaagccatggagaggctgcaggagacagagaagattatagctgagctgaacgagacatgggaggagaagctacgcaagacagaagccctgaggatggagagagaagcattgctggctgagatgggggtggccgtccgggaggatgggggaactgtgggcgtcttctctccaaagaagactccccacctggtgaacctgaacgaagaccctctgatgtctgagtgtctgctctaccacatcaaagatggcgtcaccagggtcggccaagtagatatggacatcaagctgaccggacagttcattcgggagcaacactgtctgttccggagcatcccccagccagatggagaagtggtggtcactctggagccttgtgaaggagctgagacatatgtgaatgggaagcttgtgacggagccgctggtgctgaagtcagggaataggattgtgatgggcaagaaccacgttttccgcttcaaccacccggagcaggcaaggctggaacgggaacgaggggtccccccacccccaggaccgccctctgagccagtcgactggaactttgcccagaaggaactgctggagcagcaaggcatcgacataaagctggaaatggagaagaggctgcaggatctggagaatcagtaccggaaagaaaaggaagaagccgatcttctgctggagcagcagcgactgtatgcagactcggacagcggggatgactctgacaagcgctcttgtgaagagagctggaggctcatctcctccttgcgggagcagctgccgcccaccacggtccagaccattgtcaaacgctgtggtctgcccagcagtggcaagcgcagggcccctcgcagggtttatcagatcccccagcgacgcaggctgcagggcaaagacccccgctgggccaccatggctgacctgaagatgcaggcggtgaaggagatctgctacgaggtggccctggctgacttccgccacgggcgggctgagattgaggccctggccgccctcaagatgcgggagctgtgtcgcacctatggcaagccagacggccccggagacgcctggagggctgtggcccgggatgtctgggacactgtaggcgaggaggaaggaggtggagctggcagtggtggtggcagtgaggagggagcccgaggggcggaggtggaggacctccgggcccacatcgacaagctgacggggattctgcaggaggtgaagctgcagaacagcagcaaggaccgggagctgcaggccctgcgggaccgcatgctccgcatggagagggtcatccccctggcccaggatcatgaggatgagaatgaagaaggtggtgaggtcccctgggccccgcctgaaggatcagaggcagcagaggaggcagcccccagtgaccgcatgccgtcagcccggcccccctcgccaccactgtcaagctgggagcgggtgtcacggctcatggaggaggaccctgccttccgtcgtggtcgtcttcgctggctcaagcaggagcagctacggctgcagggactgcagggctctgggggccggggcggggggctgcgcaggcccccagcccgctttgtgccccctcacgactgcaagctacgcttccccttcaagagcaacccccagcaccgggagtcttggccagggatggggagcggggaggctccaactccgctccaaccccctgaggaggtcactccccatccagccacccctgcccgccggcctccgagtccccgaaggtcccaccatccccgcaggaactccctggatggagggggccgatcccggggagcgggttctgcacagcctgaaccccagcacttccagcccaaaaagcacaactcttatccccagccaccccaaccctacccagcccagcggcccccagggccccgctaccccccatacactactcccccacgaatgagacggcagcgttctgcccctgacctcaaggagagtggggcagctgtgtgagtcccacatcctgggcagagggcctggtggggccccttgctaggagaagggaagacgcccgagacgctgcttccccagaagtgctggggcagggaggcccaggagatgagagagaaggtccgagtaggtgatagaagacaagggggagaccgagccggaggctgaggaaaggaagagggcacggagttgccaggagcaaaccaaagtgaagagagagataggaagctgcctcggggccaccccttgcaaagggggtgtgtcccacaaacgctgctatgggtggggtggggggctggggtgctgcgtagccagtgtttgactttcttttcaagtgggggaaagtgggagaggactgagagtgaggcaagttctccccagcccctgtccgtctgtctgtctgtctgtggtggtttctgtttcttgggaggcatggtaggatcataagtcattcccctccccttccaggcctcctgctatatttgggggacctgactggtttggctggagtcccatgaggatgtgggccctttaataaaggatagcaaacagggagcttgtggcctgtttgttttgggttttcatggaggtgtaggttatataaggcaatggcacaggtcttaagcatacttatcagtgaagtattgtatgtgtgctctgtgcaggcaccacccagatctggatataagaatgtttccatcttgtcttcctgaacttcaccctcctgtctcttccttcagggtgcgcagcccgatcttttccccgctttttttttttgggagacagggtcttgctttgttgcccaggctggaggtacagtcttggctcactgcagcctccgcctcctgagtagctgggattacaggcatgtgccaccacgcccggctcattactgttttttttgtagtgacgaggtttcaccatattggccaggctggtctcgaactcctgatgacctcaagtgatccgcccaccttggcctcccaaagtggtgggattacaggtgtgagccaccgcgcccggcctcccctgctttcatgtttgcttacccagtgtctcagtctgtgccagcagcaccactgtctgttatggacaaagcacagaagcggggatgcgaggggaggtagagggaccgccagcctgtcaatgcttaactggctgttgctgacagatacagaaggatttgtggggtacagaggagttctgctttaagtcacctaacttacttgaaaggtctcccaagcagccagtttctcttgatagtgaatgggttgggcaagcatactgcgcttacctgattgttttcatcctggttgtgttacctgccttctggcaggctacatcattgttcccagtcgttattttatttgtgttaagactgtttgttggccaggcgcagtggttcacgcctgtaatgccagcactgggaggccgaggcaggtggatcacgaggtcaggagatcgagaccatcctggctatcatggtgaaaccccatctctactaaaaataaaaataaaaaaattagccgggcatggtggcgggggcctgtagtcccagctactcaggaggctgaggcaggagaatggcatgaacctgggaggcggagcttgcagtgagctgagattgcgccactgcactccagcctgggcgacagagcgagactccatttcaagaaaaattaaaaaactgtttgttgcctgcttgttttaatgttctggcttgaggcagcgagcccttgactatgccacattgccaggattttgcaggttagattgtactacagcactgcctttggcttgccagactctggagtccccacattttcatcctgttctcaggaaaacactttgacccacttgaagctctgagctactgcttcacagcttcctggggtcagtctccagccaaaaccatagatatcccaactgcagccaaaccacggctctgggcgaaggaacgattaggtttactctaggtttccacaccctgatgctcctgcctttactttgacacctctgactgccaggttttcacagacctgttgacagtgactcaagatctggaatgtaatggatggtttggcaacagtgtttgcttgagcagtttaaaatctggccagggagactcaatgtgagcaagaaaatgatagaataccaagttttctggaggtcagagggagctgagttgagtgttaccgagaatgctgtggggtttgagatgagaaaaatagcttgctaatttaaaagacggattatttttccctaaagaccttgacttatgtaaatgtatattatccataattttaaaaatccacttatggctgggcacagaagctcacacctgtaatcccagcactttgggaggctgaggcaggaggatcagttgagtccaggagttcgagaccagcctgggcaacatagtgaaaccctgtatctacaaaacatagaaaaactagttgggtgtggtggtgtgtacctgtagttccagctactagggaggtaggaagatcacctgagcccatggagattgaggctgtggtgagctgtgaaggcaccacagcactctggcctgggcaagagtgggactctctcaaaaaaaaaaaaaaaaaaaaatccacatatccagccttccaagtcagtctttaataatgtgcacgggccaggcacagtggctcacacccgtaatcccaacactttggaatattagggtgggagcatcacttgaggccaggaatttgagaccagcctgggcaacatagtgagactgccccccccatctctacaaaaaataaaaatcaaaaataatactgtgggcaaactttacttagattttattcagagtagtgcctgtttatttttcatctgtgctacctgtgccggcattccatatgcatttgatttagtctttaaagtaccccggtaaaataggtcttttgtctgcatttttcagatgggaagactgaggttttgtttatttatttttatttatttattttttgagacggagtctcgctctgttgcctaggctggagtgcgatggcacaatcttggctcactacaacctccgcttcctgggttcaagcgattctcctgcctcagcctcctgagtagctaggattacaggcgcccacaaccgcacccggctaattttttgtatctttagtagagacagggtttcactatgttgtccaagctggtttcgaattcctgacctcaggtgatccacccgcctctgcctcccaaaatgttgggattacaggcgtgagccaccacgcccagcctatttatttatttttttagaatcaagatcttgctatgttgcccaggctgaactcgaactcctgggctcaagcaatcctgcctcccaagccaagcagctggtactgcaagcatgtgccaccgtgcctggctcctgaagactgaggttggtttagattaatgagttgcccaaattcagacagttcttaagtggcaaagttaggattccaacccaggtcaacataactaaagcccaaaccccatctcacccctctaggccatcaagtattggctgggtgcggtggtttatgtctgtaatcccagcactttgggaggcggaggcgggaggactgtttgagctcaggagtttgagaccagcctgggcaacataacaagaccctgtctctacaaaaatatataaattagccgggtgtactggctcacacctgtagctacttgggaggctgaggtgggaggatcgcttgagcctgggaggtcaaggctgcggtgacctgtgattgcaccaccaggagaccctgtcttaaaaatgtatatataaaaataaaaagaacatcagacatcaccatcacctcgcttagaatccatggggccttctcctcaaattcaatcttcccaggcatttcatgaacttgcgtctagtttctgttccctctcaaattgcccaggctgtcctgtgagtgacagcagctatttcgtgggcctcctctggaatcatgagaagtcacccaaacaatctcagttttctagctcactccgtcttgacatttctacactgtcatccttggttttcttggaaattaatttgcttttcttcattgtctttctttggagctgctttccttttgttggttactattttatttttagcttctcacaccataccgacatatgttggttattcttttagacatgttttttgttgttgttgtcacctggaacttttgtatcttgaataaatttggggatcaaataca

SEQ ID NO: 146708 - DNA, 799 bp, Homo sapiens
  Payload ID: 9023
  Gene Symbol: KIF1C
  Gene Name: kinesin family member 1C
  ENST ID: ENST00000574165
  CDS Start-End: 386-799
cgcgctgcccgggcgggcgccggccgctggcgccgctactgctgccgcccccggggcgcgagtccgccgcccgccgcccgggcacccggcgaggggcgggggcagctccgaaccggccccagatccttcccgcttccgcctcacgcttcccggaaagcttgtccctctccgccgagctgctccgggagccccgccgcgccgagggaggccccagggaccctctaccctcaaacacagggtatctcccagagccccagctggtgtggccaggccccaggagtaggatggggctccccctacgagggccggtggcagccagaactgatacagcccccctggtctggggccaggacgccagctgaggagggcaggagtgtctggagctatggctggtgcctcggtgaaagtggcagtgagggttcggccctttaacgcccgtgagaccagccaggatgccaagtgtgtggtcagcatgcagggcaacaccacctccatcatcaatcctaaacagagcaaggatgcccccaaaagcttcacctttgactactcctactggtcacacacttcgacggaggacccccagtttgcatctcagcagcaagtgtatcgggacattggagaagagatgctgctccacgcctttgaaggctacaacgtgtgcatctttgcctatgggcagaccggggctgggaaatcctataccatgatggggcgacaggagccagggcagcagggcatcgtgccccagctctgtgaggacctcttctctcgcgttagtgagaaccagagtgctcagcta

SEQ ID NO: 146709 - DNA, 3201 bp, Homo sapiens
  Payload ID: 9024
  Gene Symbol: KIF20A
  Gene Name: kinesin family member 20A
  Uniprot ID: O95235
  ENST ID: ENST00000394894
  CDS Start-End: 227-2899
cgccccctttccttacgcggattggtagctgcaggcttccctatctgattggccgaacgaacgcagcgcgtaatttaaaatattgtatctgtaacaaagctgcacctcgtgggcggagttgtgctctgcggctgcgaaagtccagcttcggcgactaggtgtgagtaagccagtatcccaggaggagcaagtggcacgtcttcggacctaggctgcccctgccgtcatgtcgcaagggatcctttctccgccagcgggcttgctgtccgatgacgatgtcgtagtttctcccatgtttgagtccacagctgcagatttggggtctgtggtacgcaagaacctgctatcagactgctctgtcgtctctacctccctagaggacaagcagcaggttccatctgaggacagtatggagaaggtgaaagtatacttgagggttaggcccttgttaccttcagagttggaacgacaggaagatcagggttgtgtccgtattgagaatgtggagacccttgttctacaagcacccaaggactcttttgccctgaagagcaatgaacggggaattggccaagccacacacaggttcaccttttcccagatctttgggccagaagtgggacaggcatccttcttcaacctaactgtgaaggagatggtaaaggatgtactcaaagggcagaactggctcatctatacatatggagtcactaactcagggaaaacccacacgattcaaggtaccatcaaggatggagggattctcccccggtccctggcgctgatcttcaatagcctccaaggccaacttcatccaacacctgatctgaagcccttgctctccaatgaggtaatctggctagacagcaagcagatccgacaggaggaaatgaagaagctgtccctgctaaatggaggcctccaagaggaggagctgtccacttccttgaagaggagtgtctacatcgaaagtcggataggtaccagcaccagcttcgacagtggcattgctgggctctcttctatcagtcagtgtaccagcagtagccagctggatgaaacaagtcatcgatgggcacagccagacactgccccactacctgtcccggcaaacattcgcttctccatctggatctcattctttgagatctacaacgaactgctttatgacctattagaaccgcctagccaacagcgcaagaggcagactttgcggctatgcgaggatcaaaatggcaatccctatgtgaaagatctcaactggattcatgtgcaagatgctgaggaggcctggaagctcctaaaagtgggtcgtaagaaccagagctttgccagcacccacctcaaccagaactccagccgcagtcacagcatcttctcaatcaggatcctacaccttcagggggaaggagatatagtccccaagatcagcgagctgtcactctgtgatctggctggctcagagcgctgcaaagatcagaagagtggtgaacggttgaaggaagcaggaaacattaacacctctctacacaccctgggccgctgtattgctgcccttcgtcaaaaccagcagaaccggtcaaagcagaacctggttcccttccgtgacagcaagttgactcgagtgttccaaggtttcttcacaggccgaggccgttcctgcatgattgtcaatgtgaatccctgtgcatctacctatgatgaaactcttcatgtggccaagttctcagccattgctagccagcttgtgcatgccccacctatgcaactgggattcccatccctgcactcgttcatcaaggaacatagtcttcaggtatcccccagcttagagaaaggggctaaggcagacacaggccttgatgatgatattgaaaatgaagctgacatctccatgtatggcaaagaggagctcctacaagttgtggaagccatgaagacactgcttttgaaggaacgacaggaaaagctacagctggagatgcatctccgagatgaaatttgcaatgagatggtagaacagatgcaacagcgggaacagtggtgcagtgaacatttggacacccaaaaggaactattggaggaaatgtatgaagaaaaactaaatatcctcaaggagtcactgacaagtttttaccaagaagagattcaggagcgggatgaaaagattgaagagctagaagctctcttgcaggaagccagacaacagtcagtggcccatcagcaatcagggtctgaattggccctacggcggtcacaaaggttggcagcttctgcctccacccagcagcttcaggaggttaaagctaaattacagcagtgcaaagcagagctaaactctaccactgaagagttgcataagtatcagaaaatgttagaaccaccaccctcagccaagcccttcaccattgatgtggacaagaagttagaagagggccagaagaatataaggctgttgcggacagagcttcagaaacttggtgagtctctccaatcagcagagagagcttgttgccacagcactggggcaggaaaacttcgtcaagccttgaccacttgtgatgacatcttaatcaaacaggaccagactctggctgaactgcagaacaacatggtgctagtgaaactggaccttcggaagaaggcagcatgtattgctgagcagtatcatactgtgttgaaactccaaggccaggtttctgccaaaaagcgccttggtaccaaccaggaaaatcagcaaccaaaccaacaaccaccagggaagaaaccattccttcgaaatttacttccccgaacaccaacctgccaaagctcaacagactgcagcccttatgcccggatcctacgctcacggcgttcccctttactcaaatctgggccttttggcaaaaagtactaaggctgtggggaaagagaagagcagtcatggccctgaggtgggtcagctactctcctgaagaaataggtctcttttatgctttaccatatatcaggaattatatccaggatgcaatactcagacactagcttttttctcacttttgtattataaccacctatgtaatctcatgttgttgtttttttttatttacttatatgatttctatgcacacaaaaacagttatattaaagatattattgttcacattttttattgaattccaaatgtagcaaaatcattaaaacaaattataaaaggga

SEQ ID NO: 146710 - DNA, 2935 bp, Homo sapiens
  Payload ID: 9024
  Gene Symbol: KIF20A
  Gene Name: kinesin family member 20A
  Uniprot ID: O95235
  ENST ID: ENST00000508792
  CDS Start-End: 65-2683
gagtaagccagtatcccaggaggagcaagtggcacgtcttcggacctaggctgcccctgccgtcatgtcgcaagggatcctttctccgccagcgggcttgctgtccgatgacgatgtcgtagtttctcccatgtttgagtccacagctgcagatttggggtctgtggtacgcaagaacctgctatcagactgctctgtcgtctctacctccctagaggacaagcagcaggttccatctgaggacagtatggagaaggaagatcagggttgtgtccgtattgagaatgtggagacccttgttctacaagcacccaaggactcttttgccctgaagagcaatgaacggggaattggccaagccacacacaggttcaccttttcccagatctttgggccagaagtgggacaggcatccttcttcaacctaactgtgaaggagatggtaaaggatgtactcaaagggcagaactggctcatctatacatatggagtcactaactcagggaaaacccacacgattcaaggtaccatcaaggatggagggattctcccccggtccctggcgctgatcttcaatagcctccaaggccaacttcatccaacacctgatctgaagcccttgctctccaatgaggtaatctggctagacagcaagcagatccgacaggaggaaatgaagaagctgtccctgctaaatggaggcctccaagaggaggagctgtccacttccttgaagaggagtgtctacatcgaaagtcggataggtaccagcaccagcttcgacagtggcattgctgggctctcttctatcagtcagtgtaccagcagtagccagctggatgaaacaagtcatcgatgggcacagccagacactgccccactacctgtcccggcaaacattcgcttctccatctggatctcattctttgagatctacaacgaactgctttatgacctattagaaccgcctagccaacagcgcaagaggcagactttgcggctatgcgaggatcaaaatggcaatccctatgtgaaagatctcaactggattcatgtgcaagatgctgaggaggcctggaagctcctaaaagtgggtcgtaagaaccagagctttgccagcacccacctcaaccagaactccagccgcagtcacagcatcttctcaatcaggatcctacaccttcagggggaaggagatatagtccccaagatcagcgagctgtcactctgtgatctggctggctcagagcgctgcaaagatcagaagagtggtgaacggttgaaggaagcaggaaacattaacacctctctacacaccctgggccgctgtattgctgcccttcgtcaaaaccagcagaaccggtcaaagcagaacctggttcccttccgtgacagcaagttgactcgagtgttccaaggtttcttcacaggccgaggccgttcctgcatgattgtcaatgtgaatccctgtgcatctacctatgatgaaactcttcatgtggccaagttctcagccattgctagccagcttgtgcatgccccacctatgcaactgggattcccatccctgcactcgttcatcaaggaacatagtcttcaggtatcccccagcttagagaaaggggctaaggcagacacaggccttgatgatgatattgaaaatgaagctgacatctccatgtatggcaaagaggagctcctacaagttgtggaagccatgaagacactgcttttgaaggaacgacaggaaaagctacagctggagatgcatctccgagatgaaatttgcaatgagatggtagaacagatgcaacagcgggaacagtggtgcagtgaacatttggacacccaaaaggaactattggaggaaatgtatgaagaaaaactaaatatcctcaaggagtcactgacaagtttttaccaagaagagattcaggagcgggatgaaaagattgaagagctagaagctctcttgcaggaagccagacaacagtcagtggcccatcagcaatcagggtctgaattggccctacggcggtcacaaaggttggcagcttctgcctccacccagcagcttcaggaggttaaagctaaattacagcagtgcaaagcagagctaaactctaccactgaagagttgcataagtatcagaaaatgttagaaccaccaccctcagccaagcccttcaccattgatgtggacaagaagttagaagagggccagaagaatataaggctgttgcggacagagcttcagaaacttggtgagtctctccaatcagcagagagagcttgttgccacagcactggggcaggaaaacttcgtcaagccttgaccacttgtgatgacatcttaatcaaacaggaccagactctggctgaactgcagaacaacatggtgctagtgaaactggaccttcggaagaaggcagcatgtattgctgagcagtatcatactgtgttgaaactccaaggccaggtttctgccaaaaagcgccttggtaccaaccaggaaaatcagcaaccaaaccaacaaccaccagggaagaaaccattccttcgaaatttacttccccgaacaccaacctgccaaagctcaacagactgcagcccttatgcccggatcctacgctcacggcgttcccctttactcaaatctgggccttttggcaaaaagtactaaggctgtggggaaagagaagagcagtcatggccctgaggtgggtcagctactctcctgaagaaataggtctcttttatgctttaccatatatcaggaattatatccaggatgcaatactcagacactagcttttttctcacttttgtattataaccacctatgtaatctcatgttgttgtttttttttatttacttatatgatttctatgcacacaaaaacagttatattaaagatattattgttcacatttt

SEQ ID NO: 146711 - DNA, 631 bp, Homo sapiens
  Payload ID: 9024
  Gene Symbol: KIF20A
  Gene Name: kinesin family member 20A
  ENST ID: ENST00000513276
  CDS Start-End: 154-631
gaaatgtcgtttttccccttaagacaaagcaagcaccctaaaccagttaccctgtgcactcctgttaagattgttgctaaggaaggacaggagttggctgctgaagcctcaagatttcctttaggctcttagacctaggctgcccctgccgtcatgtcgcaagggatcctttctccgccagcgggcttgctgtccgatgacgatgtcgtagtttctcccatgtttgagtccacagctgcagatttggggtctgtggtacgcaagaacctgctatcagactgctctgtcgtctctacctccctagaggacaagcagcaggttccatctgaggacagtatggagaaggtgaaagtatacttgagggttaggcccttgttaccttcagagttggaacgacaggaagatcagggttgtgtccgtattgagaatgtggagacccttgttctacaagcacccaaggactcttttgccctgaagagcaatgaacggggaattggccaagccacacacaggttcaccttttcccagatctttgggccagaagtgggacaggcatccttcttcaacctaactgtgaaggagatggtaaaggatgtactcaaagggcagaactggctcatctatacatatg

SEQ ID NO: 146712 - DNA, 810 bp, Homo sapiens
  Payload ID: 9024
  Gene Symbol: KIF20A
  Gene Name: kinesin family member 20A
  ENST ID: ENST00000504621
  CDS Start-End: 135-810
tggagcccgggttaccagctcttgcccgcgcggaataggctttaagaaatcggagctgcagccatctgtttttctcttaatgctgcatctctgttctcacggtggtccttgggacctaggctgcccctgccgtcatgtcgcaagggatcctttctccgccagcgggcttgctgtccgatgacgatgtcgtagtttctcccatgtttgagtccacagctgcagatttggggtctgtggtacgcaagaacctgctatcagactgctctgtcgtctctacctccctagaggacaagcagcaggttccatctgaggacagtatggagaaggtgaaagtatacttgagggttaggcccttgttaccttcagagttggaacgacaggaagatcagggttgtgtccgtattgagaatgtggagacccttgttctacaagcacccaaggactcttttgccctgaagagcaatgaacggggaattggccaagccacacacaggttcaccttttcccagatctttgggccagaagtgggacaggcatccttcttcaacctaactgtgaaggagatggtaaaggatgtactcaaagggcagaactggctcatctatacatatggagtcactaactcagggaaaacccacacgattcaaggtaccatcaaggatggagggattctcccccggtccctggcgctgatcttcaatagcctccaaggccaacttcatccaacacctgatctgaagcccttgctctccaatgaggtaatctggctagacagcaagcagatccgacaggaggaaatgaagaagctgt

SEQ ID NO: 146713 - DNA, 600 bp, Homo sapiens
  Payload ID: 9024
  Gene Symbol: KIF20A
  Gene Name: kinesin family member 20A
  ENST ID: ENST00000502338
  CDS Start-End: 1-249
gccatgaagacactgcttttgaaggaacgacaggaaaagctacagctggagatgcatctccgagatgaaatttgcaatgagatggtagaacagatgcaacagcgggaacagtggtgcagtgaacatttggacacccaaaaggaactattggaggaaatgtatgaagaaaaactaaatatcctcaaggagtcactgacaagtttttaccaagaagagattcagagttgcataagtatcagaaaatgttagaaccaccaccctcagccaagcccttcaccattgatgtggacaagaagttagaagagggccagaagaatataaggctgttgcggacagagcttcagaaacttggtgagtctctccaatcagcagagagagcttgttgccacagcactggggcaggaaaacttcgtcaagccttgaccacttgtgatgacatcttaatcaaacaggaccagactctggctgaactgcagaacaacatggtgctagtgaaactggaccttcggaagaaggcagcatgtattgctgagcagtatcatactgtgttgaaactccaaggccaggtttctgccaaaaagcgccttggtaccaaccagg

SEQ ID NO: 146714 - DNA, 6306 bp, Homo sapiens
  Payload ID: 9025
  Gene Symbol: KIF20B
  Gene Name: kinesin family member 20B
  Uniprot ID: Q96Q89
  ENST ID: ENST00000260753
  CDS Start-End: 73-5415
attgtttgaatttgaaaacggtaacatcgcagtgctgctcgcgggtctggctagtcaggcgaagtttgcagaatggaatctaattttaatcaagagggagtacctcgaccatcttatgtttttagtgctgacccaattgcaaggccttcagaaataaatttcgatggcattaagcttgatctgtctcatgaattttccttagttgctccaaatactgaggcaaacagtttcgaatctaaagattatctccaggtttgtcttcgaataagaccatttacacagtcagaaaaagaacttgagtctgagggctgtgtgcatattctggattcacagactgttgtgctgaaagagcctcaatgcatccttggtcggttaagtgaaaaaagctcagggcagatggcacagaaattcagtttttccaaggtttttggcccagcaactacacagaaggaattctttcagggttgcattatgcaaccagtaaaagacctcttgaaaggacagagtcgtctgatttttacttacgggctaaccaattcaggaaaaacatatacatttcaagggacagaagaaaatattggcattctgcctcgaactttgaatgtattatttgatagtcttcaagaaagactgtatacaaagatgaaccttaaaccacatagatccagagaatacttaaggttatcatcagaacaagagaaagaagaaattgctagcaaaagtgcattgcttcggcaaattaaagaggttactgtgcataatgatagtgatgatactctttatggaagtttaactaactctttgaatatctcagagtttgaagaatccataaaagattatgaacaagccaacttgaatatggctaatagtataaaattttctgtgtgggtttctttctttgaaatttacaatgaatatatttatgacttatttgttcctgtatcatctaaattccaaaagagaaagatgctgcgcctttcccaagacgtaaagggctattcttttataaaagatctacaatggattcaagtatctgattccaaagaagcctatagacttttaaaactaggaataaagcaccagagtgttgccttcacaaaattgaataatgcttccagtagaagtcacagcatattcactgttaaaatattacagattgaagattctgaaatgtctcgtgtaattcgagtcagtgaattatctttatgtgatcttgctggttcagaacgaactatgaagacacagaatgaaggtgaaaggttaagagagactgggaatatcaacacttctttattgactctgggaaagtgtattaacgtcttgaagaatagtgaaaagtcaaagtttcaacagcatgtgcctttccgggaaagtaaactgactcactattttcaaagtttttttaatggtaaagggaaaatttgtatgattgtcaatatcagccaatgttatttagcctatgatgaaacactcaatgtattgaagttctccgccattgcacaaaaagtttgtgtcccagacactttaaattcctctcaagagaaattatttggacctgtcaaatcttctcaagatgtatcactagacagtaattcaaacagtaaaatattaaatgtaaaaagagccaccatttcatgggaaaatagtctagaagatttgatggaagacgaggatttggttgaggagctagaaaacgctgaagaaactcaaaatgtggaaactaaacttcttgatgaagatctagataaaacattagaggaaaataaggctttcattagccacgaggagaaaagaaaactgttggacttaatagaagacttgaaaaaaaaactgataaatgaaaaaaaggaaaaattaaccttggaatttaaaattcgagaagaagttacacaggagtttactcagtattgggctcaacgggaagctgactttaaggagactctgcttcaagaacgagagatattagaagaaaatgctgaacgtcgtttggctatcttcaaggatttggttggtaaatgtgacactcgagaagaagcagcgaaagacatttgtgccacaaaagttgaaactgaagaagctactgcttgtttagaactaaagtttaatcaaattaaagctgaattagctaaaaccaaaggagaattaatcaaaaccaaagaagagttaaaaaagagagaaaatgaatcagattcattgattcaagagcttgagacatctaataagaaaataattacacagaatcaaagaattaaagaattgataaatataattgatcaaaaagaagatactatcaacgaatttcagaacctaaagtctcatatggaaaacacatttaaatgcaatgacaaggctgatacatcttctttaataataaacaataaattgatttgtaatgaaacagttgaagtacctaaggacagcaaatctaaaatctgttcagaaagaaaaagagtaaatgaaaatgaacttcagcaagatgaaccaccagcaaagaaagggtctatccatgttagttcagctatcactgaagaccaaaagaaaagtgaagaagtgcgaccgaacattgcagaaattgaagacatcagagttttacaagaaaataatgaaggactgagagcatttttactcactattgagaatgaacttaaaaatgaaaaggaagaaaaagcagaattaaataaacagattgttcattttcagcaggaactttctctttctgaaaaaaagaatttaactttaagtaaagaggtccaacaaattcagtcaaattatgatattgcaattgctgaattacatgtgcagaaaagtaaaaatcaagaacaggaggaaaagatcatgaaattgtcaaatgagatagaaactgctacaagaagcattacaaataatgtttcacaaataaaattaatgcacacgaaaatagacgaactacgtactcttgattcagtttctcagatttcaaacatagatttgctcaatctcagggatctgtcaaatggttctgaggaggataatttgccaaatacacagttagaccttttaggtaatgattatttggtaagtaagcaagttaaagaatatcgaattcaagaacccaatagggaaaattctttccactctagtattgaagctatttgggaagaatgtaaagagattgtgaaggcctcttccaaaaaaagtcatcagattgaggaactggaacaacaaattgaaaaattgcaggcagaagtaaaaggctataaggatgaaaacaatagactaaaggagaaggagcataaaaaccaagatgacctactaaaagaaaaagaaactcttatacagcagctgaaagaagaattgcaagaaaaaaatgttactcttgatgttcaaatacagcatgtagttgaaggaaagagagcgctttcagaacttacacaaggtgttacttgctataaggcaaaaataaaggaacttgaaacaattttagagactcagaaagttgaatgtagtcattcagccaagttagaacaagacattttggaaaaggaatctatcatcttaaagctagaaagaaatttgaaggaatttcaagaacatcttcaggattctgtcaaaaacaccaaagatttaaatgtaaaggaactcaagctgaaagaagaaatcacacagttaacaaataatttgcaagatatgaaacatttacttcaattaaaagaagaagaagaagaaaccaacaggcaagaaacagaaaaattgaaagaggaactctctgcaagctctgctcgtacccagaatctgaaagcagatcttcagaggaaggaagaagattatgctgacctgaaagagaaactgactgatgccaaaaagcagattaagcaagtacagaaagaggtatctgtaatgcgtgatgaggataaattactgaggattaaaattaatgaactggagaaaaagaaaaaccagtgttctcaggaattagatatgaaacagcgaaccattcagcaactcaaggagcagttaaataatcagaaagtggaagaagctatacaacagtatgagagagcatgcaaagatctaaatgttaaagagaaaataattgaagacatgcgaatgacactagaagaacaggaacaaactcaggtagaacaggatcaagtgcttgaggctaaattagaggaagttgaaaggctggccacagaattggaaaaatggaaggaaaaatgcaatgatttggaaaccaaaaacaatcaaaggtcaaataaagaacatgagaacaacacagatgtgcttggaaagctcactaatcttcaagatgagttacaggagtctgaacagaaatataatgctgatagaaagaaatggttagaagaaaaaatgatgcttatcactcaagcgaaagaagcagagaatatacgaaataaagagatgaaaaaatatgctgaggacagggagcgtttttttaagcaacagaatgaaatggaaatactgacagcccagctgacagagaaagatagtgaccttcaaaagtggcgagaagaacgagatcaactggttgcagctttagaaatacagctaaaagcactgatatccagtaatgtacagaaagataatgaaattgaacaactaaaaaggatcatatcagagacttctaaaatagaaacacaaatcatggatatcaagcccaaacgtattagttcagcagatcctgacaaacttcaaactgaacctctatcgacaagttttgaaatttccagaaataaaatagaggatggatctgtagtccttgactcttgtgaagtgtcaacagaaaatgatcaaagcactcgatttccaaaacctgagttagagattcaatttacacctttacagccaaacaaaatggcagtgaaacaccctggttgtaccacaccagtgacagttaagattcccaaggctcggaagaggaagagtaatgaaatggaggaggacttggtgaaatgtgaaaataagaagaatgctacacccagaactaatttgaaatttcctatttcagatgatagaaattcttctgtcaaaaaggaacaaaaggttgccatacgtccatcatctaagaaaacatattctttacggagtcaggcatccataattggtgtaaacctggccactaagaaaaaagaaggaacactacagaaatttggagacttcttacaacattctccctcaattcttcaatcaaaagcaaagaagataattgaaacaatgagctcttcaaagctctcaaatgtagaagcaagtaaagaaaatgtgtctcaaccaaaacgagccaaacggaaattatacacaagtgaaatttcatctcctattgatatatcaggccaagtgattttaatggaccagaaaatgaaggagagtgatcaccagattatcaaacgacgacttcgaacaaaaacagccaaataaatcacttatggaaatgtttaatataaattttatagtcatagtcattggaacttgcatcctgtattgtaaatataaatgtatatattatgcattaaatcactctgcatatagattgctgttttatacatagtataattttaattcaataaatgagtcaaaatttgtatatttttataaggcttttttataatagcttctttcaaactgtatttccctattatctcagacattggatcagtgaagatcctaggaaagaggctgttattctcatttattttgctatacaggatgtaataggtcaggtatttggtttacttatatttaacaatgtcttatgaattttttttactttatctgttatacaactgattttacatatctgtttggattatagctaggatttggagaataagtgtgtacagatcacaaaacatgtatatacattatttagaaaagatctcaagtctttaattagaatgtctcacttattttgtaaacattttgtgggtacatagtacatgtatatatttacggggtatgtgagatgttttgacacaggcatgcaatgtgaaatacgtgtatcatggagaatgaggtatccatcccctcaagcatttttcctttgaattacagataatccaattacattctttagatcatttaaaaatatacaagtaagttattattgattatagtcactctattgtgctatcagatagtagatcattctttttatcttatttgtttttgtacccattaaccatccccacctccccctgcaaccgtcagtacccttaccagccactggtaaccattcttctactctgtatgcccatgaggtcaattgattttatttttagatcccataaataaatgagaacatgcagtctt

SEQ ID NO: 146715 - DNA, 6419 bp, Homo sapiens
  Payload ID: 9025
  Gene Symbol: KIF20B
  Gene Name: kinesin family member 20B
  Uniprot ID: Q96Q89
  ENST ID: ENST00000371728
  CDS Start-End: 66-5528
gaatttgaaaacggtaacatcgcagtgctgctcgcgggtctggctagtcaggcgaagtttgcagaatggaatctaattttaatcaagagggagtacctcgaccatcttatgtttttagtgctgacccaattgcaaggccttcagaaataaatttcgatggcattaagcttgatctgtctcatgaattttccttagttgctccaaatactgaggcaaacagtttcgaatctaaagattatctccaggtttgtcttcgaataagaccatttacacagtcagaaaaagaacttgagtctgagggctgtgtgcatattctggattcacagactgttgtgctgaaagagcctcaatgcatccttggtcggttaagtgaaaaaagctcagggcagatggcacagaaattcagtttttccaaggtttttggcccagcaactacacagaaggaattctttcagggttgcattatgcaaccagtaaaagacctcttgaaaggacagagtcgtctgatttttacttacgggctaaccaattcaggaaaaacatatacatttcaagggacagaagaaaatattggcattctgcctcgaactttgaatgtattatttgatagtcttcaagaaagactgtatacaaagatgaaccttaaaccacatagatccagagaatacttaaggttatcatcagaacaagagaaagaagaaattgctagcaaaagtgcattgcttcggcaaattaaagaggttactgtgcataatgatagtgatgatactctttatggaagtttaactaactctttgaatatctcagagtttgaagaatccataaaagattatgaacaagccaacttgaatatggctaatagtataaaattttctgtgtgggtttctttctttgaaatttacaatgaatatatttatgacttatttgttcctgtatcatctaaattccaaaagagaaagatgctgcgcctttcccaagacgtaaagggctattcttttataaaagatctacaatggattcaagtatctgattccaaagaagcctatagacttttaaaactaggaataaagcaccagagtgttgccttcacaaaattgaataatgcttccagtagaagtcacagcatattcactgttaaaatattacagattgaagattctgaaatgtctcgtgtaattcgagtcagtgaattatctttatgtgatcttgctggttcagaacgaactatgaagacacagaatgaaggtgaaaggttaagagagactgggaatatcaacacttctttattgactctgggaaagtgtattaacgtcttgaagaatagtgaaaagtcaaagtttcaacagcatgtgcctttccgggaaagtaaactgactcactattttcaaagtttttttaatggtaaagggaaaatttgtatgattgtcaatatcagccaatgttatttagcctatgatgaaacactcaatgtattgaagttctccgccattgcacaaaaagtttgtgtcccagacactttaaattcctctcaagagaaattatttggacctgtcaaatcttctcaagatgtatcactagacagtaattcaaacagtaaaatattaaatgtaaaaagagccaccatttcatgggaaaatagtctagaagatttgatggaagacgaggatttggttgaggagctagaaaacgctgaagaaactcaaaatgtggaaactaaacttcttgatgaagatctagataaaacattagaggaaaataaggctttcattagccacgaggagaaaagaaaactgttggacttaatagaagacttgaaaaaaaaactgataaatgaaaaaaaggaaaaattaaccttggaatttaaaattcgagaagaagttacacaggagtttactcagtattgggctcaacgggaagctgactttaaggagactctgcttcaagaacgagagatattagaagaaaatgctgaacgtcgtttggctatcttcaaggatttggttggtaaatgtgacactcgagaagaagcagcgaaagacatttgtgccacaaaagttgaaactgaagaaacacataattatgtaggatttgaagatattattgattctcttcaagataatgttgctgatattaagaaacaggctgaaattgctcacttatatattgcatctcttcctgacccccaggaagctactgcttgtttagaactaaagtttaatcaaattaaagctgaattagctaaaaccaaaggagaattaatcaaaaccaaagaagagttaaaaaagagagaaaatgaatcagattcattgattcaagagcttgagacatctaataagaaaataattacacagaatcaaagaattaaagaattgataaatataattgatcaaaaagaagatactatcaacgaatttcagaacctaaagtctcatatggaaaacacatttaaatgcaatgacaaggctgatacatcttctttaataataaacaataaattgatttgtaatgaaacagttgaagtacctaaggacagcaaatctaaaatctgttcagaaagaaaaagagtaaatgaaaatgaacttcagcaagatgaaccaccagcaaagaaagggtctatccatgttagttcagctatcactgaagaccaaaagaaaagtgaagaagtgcgaccgaacattgcagaaattgaagacatcagagttttacaagaaaataatgaaggactgagagcatttttactcactattgagaatgaacttaaaaatgaaaaggaagaaaaagcagaattaaataaacagattgttcattttcagcaggaactttctctttctgaaaaaaagaatttaactttaagtaaagaggtccaacaaattcagtcaaattatgatattgcaattgctgaattacatgtgcagaaaagtaaaaatcaagaacaggaggaaaagatcatgaaattgtcaaatgagatagaaactgctacaagaagcattacaaataatgtttcacaaataaaattaatgcacacgaaaatagacgaactacgtactcttgattcagtttctcagatttcaaacatagatttgctcaatctcagggatctgtcaaatggttctgaggaggataatttgccaaatacacagttagaccttttaggtaatgattatttggtaagtaagcaagttaaagaatatcgaattcaagaacccaatagggaaaattctttccactctagtattgaagctatttgggaagaatgtaaagagattgtgaaggcctcttccaaaaaaagtcatcagattgaggaactggaacaacaaattgaaaaattgcaggcagaagtaaaaggctataaggatgaaaacaatagactaaaggagaaggagcataaaaaccaagatgacctactaaaagaaaaagaaactcttatacagcagctgaaagaagaattgcaagaaaaaaatgttactcttgatgttcaaatacagcatgtagttgaaggaaagagagcgctttcagaacttacacaaggtgttacttgctataaggcaaaaataaaggaacttgaaacaattttagagactcagaaagttgaatgtagtcattcagccaagttagaacaagacattttggaaaaggaatctatcatcttaaagctagaaagaaatttgaaggaatttcaagaacatcttcaggattctgtcaaaaacaccaaagatttaaatgtaaaggaactcaagctgaaagaagaaatcacacagttaacaaataatttgcaagatatgaaacatttacttcaattaaaagaagaagaagaagaaaccaacaggcaagaaacagaaaaattgaaagaggaactctctgcaagctctgctcgtacccagaatctgaaagcagatcttcagaggaaggaagaagattatgctgacctgaaagagaaactgactgatgccaaaaagcagattaagcaagtacagaaagaggtatctgtaatgcgtgatgaggataaattactgaggattaaaattaatgaactggagaaaaagaaaaaccagtgttctcaggaattagatatgaaacagcgaaccattcagcaactcaaggagcagttaaataatcagaaagtggaagaagctatacaacagtatgagagagcatgcaaagatctaaatgttaaagagaaaataattgaagacatgcgaatgacactagaagaacaggaacaaactcaggtagaacaggatcaagtgcttgaggctaaattagaggaagttgaaaggctggccacagaattggaaaaatggaaggaaaaatgcaatgatttggaaaccaaaaacaatcaaaggtcaaataaagaacatgagaacaacacagatgtgcttggaaagctcactaatcttcaagatgagttacaggagtctgaacagaaatataatgctgatagaaagaaatggttagaagaaaaaatgatgcttatcactcaagcgaaagaagcagagaatatacgaaataaagagatgaaaaaatatgctgaggacagggagcgtttttttaagcaacagaatgaaatggaaatactgacagcccagctgacagagaaagatagtgaccttcaaaagtggcgagaagaacgagatcaactggttgcagctttagaaatacagctaaaagcactgatatccagtaatgtacagaaagataatgaaattgaacaactaaaaaggatcatatcagagacttctaaaatagaaacacaaatcatggatatcaagcccaaacgtattagttcagcagatcctgacaaacttcaaactgaacctctatcgacaagttttgaaatttccagaaataaaatagaggatggatctgtagtccttgactcttgtgaagtgtcaacagaaaatgatcaaagcactcgatttccaaaacctgagttagagattcaatttacacctttacagccaaacaaaatggcagtgaaacaccctggttgtaccacaccagtgacagttaagattcccaaggctcggaagaggaagagtaatgaaatggaggaggacttggtgaaatgtgaaaataagaagaatgctacacccagaactaatttgaaatttcctatttcagatgatagaaattcttctgtcaaaaaggaacaaaaggttgccatacgtccatcatctaagaaaacatattctttacggagtcaggcatccataattggtgtaaacctggccactaagaaaaaagaaggaacactacagaaatttggagacttcttacaacattctccctcaattcttcaatcaaaagcaaagaagataattgaaacaatgagctcttcaaagctctcaaatgtagaagcaagtaaagaaaatgtgtctcaaccaaaacgagccaaacggaaattatacacaagtgaaatttcatctcctattgatatatcaggccaagtgattttaatggaccagaaaatgaaggagagtgatcaccagattatcaaacgacgacttcgaacaaaaacagccaaataaatcacttatggaaatgtttaatataaattttatagtcatagtcattggaacttgcatcctgtattgtaaatataaatgtatatattatgcattaaatcactctgcatatagattgctgttttatacatagtataattttaattcaataaatgagtcaaaatttgtatatttttataaggcttttttataatagcttctttcaaactgtatttccctattatctcagacattggatcagtgaagatcctaggaaagaggctgttattctcatttattttgctatacaggatgtaataggtcaggtatttggtttacttatatttaacaatgtcttatgaattttttttactttatctgttatacaactgattttacatatctgtttggattatagctaggatttggagaataagtgtgtacagatcacaaaacatgtatatacattatttagaaaagatctcaagtctttaattagaatgtctcacttattttgtaaacattttgtgggtacatagtacatgtatatatttacggggtatgtgagatgttttgacacaggcatgcaatgtgaaatacgtgtatcatggagaatgaggtatccatcccctcaagcatttttcctttgaattacagataatccaattacattctttagatcatttaaaaatatacaagtaagttattattgattatagtcactctattgtgctatcagatagtagatcattctttttatcttatttgtttttgtacccattaaccatccccacctccccctgcaaccgtcagtacccttaccagccactggtaaccattcttctactctgtatgcccatgaggtcaattgattttatttttagatcccataaataaatgagaacatgcagtctt

SEQ ID NO: 146716 - DNA, 660 bp, Homo sapiens
  Payload ID: 9025
  Gene Symbol: KIF20B
  Gene Name: kinesin family member 20B
  ENST ID: ENST00000447580
  CDS Start-End: 41-660
aggtgaggaggtgacccgcgggaatgtgtggggaaggagaatggaatctaattttaatcaagagggagtacctcgaccatcttatgtttttagtgctgacccaattgcaaggccttcagaaataaatttcgatggcattaagcttgatctgtctcatgaattttccttagttgctccaaatactgaggcaaacagtttcgaatctaaagattatctccaggtttgtcttcgaataagaccatttacacagtcagaaaaagaacttgagtctgagggctgtgtgcatattctggattcacagactgttgtgctgaaagagcctcaatgcatccttggtcggttaagtgaaaaaagctcagggcagatggcacagaaattcagtttttccaaggtttttggcccagcaactacacagaaggaattctttcagggttgcattatgcaaccagtaaaagacctcttgaaaggacagagtcgtctgatttttacttacgggctaaccaattcaggaaaaacatatacatttcaagggacagaagaaaatattggcattctgcctcgaactttgaatgtattatttgatagtcttcaagaaagactgtatacaaagatgaaccttaaaccacatagatccagagaatacttaaggttatcatcaga

SEQ ID NO: 146717 - DNA, 6601 bp, Homo sapiens
  Payload ID: 9026
  Gene Symbol: KIF21A
  Gene Name: kinesin family member 21A
  Uniprot ID: Q7Z4S6
  ENST ID: ENST00000361961
  CDS Start-End: 421-5406
gaggagcccggagcgccctggcgggcgtggagtccccagcctggccgctgggaggccgcgtccccaccggagggggcagggcgcactcacccggccgccctgaggccgctggcggcctgttggcttctccacaggcgcgctcgccgttcaagcgcgctttgtccccgccccagatcctggggggtgagcggtggagaaggggcgggcgcccgcgagccgtgaatcacctcctcctcttgctgcctcagcgccgccgccacctttccattcagtcgcccaacatggctggagcgcggcggaggtgagccggccgcccgcccgcagacgccccagcctactgcgcccgagtcccgcggccccagtggcgcctcagctctgcggtgccgaggcccaacggctcgatcgctgcccgccgccagcatgttgggcgccccggacgagagctccgtgcgggtggctgtcagaataagaccacagcttgccaaagagaagattgaaggatgccatatttgtacatctgtcacaccaggagagcctcaggtcttcctagggaaagataaggcttttacttttgactatgtatttgacattgactcccagcaagagcagatctacattcaatgtatagaaaaactaattgaaggttgctttgaaggatacaatgctacagtttttgcttatggacaaactggagctggtaaaacatacacaatgggaacaggatttgatgttaacattgttgaggaagaactgggtattatttctcgagctgttaaacacctttttaagagtattgaagaaaaaaaacacatagcaattaaaaatgggcttcctgctccagattttaaagtgaatgcccaattcttagagctctataatgaagaggtccttgacttatttgataccactcgtgatattgatgcaaaaagtaaaaaatcaaatataagaattcatgaagattcaactggaggaatttatactgtgggcgttacaacacgtactgtgaatacagaatcagagatgatgcagtgtttgaagttgggtgctttatcccggacaactgccagtacccagatgaatgttcagagctctcgttcacatgccatttttaccattcatgtgtgtcaaaccagagtgtgtccccaaatagatgctgacaatgcaactgataataaaattatttctgaatcagcacagatgaatgaatttgaaaccctgactgcaaagttccattttgttgatctcgcaggatctgaaagactgaagcgtactggagctacaggcgagagggcaaaagaaggcatttctatcaactgtggacttttggcacttggcaatgtaataagtgccttgggagacaagagcaagagggccacacatgtcccctatagagattccaagctaacaagactactacaggattccctcgggggtaatagccaaacaatcatgatagcatgtgtcagcccttcagacagagactttatggaaacgttaaacaccctgaaatacgccaatcgagctagaaatatcaagaataaggtgatggtcaatcaggacagagctagtcagcaaatcaatgcacttcgtagtgaaatcacacgacttcagatggagctcatggagtacaaaacaggtaaaagaataattgacgaagagggtgtggaaagcatcaatgacatgtttcatgagaatgctatgctacagactgaaaataataacctgcgtgtaagaattaaagccatgcaagagacggttgatgcattgaggtccagaattacacagcttgttagtgatcaggccaaccatgttcttgccagagcaggtgaaggaaatgaggagattagtaatatgattcatagttatataaaagaaatcgaagatctcagggcaaaattattagaaagtgaagcagtgaatgagaaccttcgaaaaaacttgacaagagccacagcaagagcgccatatttcagcggatcatcaactttttctcctaccatactatcctcagacaaagaaaccattgaaattatagacctagcaaaaaaagatttagagaagttgaaaagaaaagaaaagaggaagaaaaaaagtgtggctggtaaagaggataatacagacactgaccaagagaagaaagaagaaaagggtgtttcggaaagagaaaacaatgaattagaagtggaagaaagtcaagaagtgagtgatcatgaggatgaagaagaggaggaggaggaggaggaagatgacattgatgggggtgaaagttctgatgaatcagattctgaatcagatgaaaaagccaattatcaagcagacttggcaaacattacttgtgaaattgcaattaagcaaaagctgattgatgaactagaaaacagccagaaaagactgcagactctgaaaaagcagtatgaagagaagctaatgatgctgcaacataaaattcgggatactcagcttgaaagagaccaggtgcttcaaaacttaggctcggtagaatcttactcagaagaaaaagcaaaaaaagttaggtctgaatatgaaaagaaactccaagccatgaacaaagaactgcagagacttcaagcagctcaaaaagaacatgcaaggttgcttaaaaatcagtctcagtatgaaaagcaattgaagaaattgcagcaggatgtgatggaaatgaaaaaaacaaaggttcgcctaatgaaacaaatgaaagaagaacaagagaaagccagactgactgagtctagaagaaacagagagattgctcagttgaaaaaggatcaacgtaaaagagatcatcaacttagacttctggaagcccaaaaaagaaaccaagaagtggttctacgtcgcaaaactgaagaggttacggctcttcgtcggcaagtaagacccatgtcagataaagtggctgggaaagttactcggaagctgagttcatctgatgcacctgctcaggacacaggttccagtgcagctgctgtcgaaacagatgcatcaaggacaggagcccagcagaaaatgagaattcctgtggcgagagtccaggccttaccaacgccggcaacaaatggaaacaggaaaaaatatcagaggaaaggattgactggccgagtgtttatttccaagacagctcgcatgaagtggcagctccttgagcgcagggtcacagacatcatcatgcagaagatgaccatttccaacatggaggcagatatgaatagactcctcaagcaacgggaggaactcacaaaaagacgagagaaactttcaaaaagaagggagaagatagtcaaggagaatggagagggagataaaaatgtggctaatatcaatgaagagatggagtcactgactgctaatatcgattacatcaatgacagtatttctgattgtcaggccaacataatgcagatggaagaagcaaaggaagaaggtgagacattggatgttactgcagtcattaatgcctgcacccttacagaagcccgatacctgctagatcacttcctgtcaatgggcatcaataagggtcttcaggctgcccagaaagaggctcaaattaaagtactggaaggtcgactcaaacaaacagaaataaccagtgctacccaaaaccagctcttattccatatgttgaaagagaaggcagaattaaatcctgagctagatgctttactaggccatgctttacaagatctagatagcgtaccattagaaaatgtagaggatagtactgatgaggatgctcctttaaacagcccaggatcagaaggaagcacgctgtcttcagatctcatgaagctttgtggtgaagtgaaacctaagaacaaggcccgaaggagaaccaccactcagatggaattgctgtatgcagatagcagtgaactagcttcagacactagtacaggagatgcctccttgcctggccctctcacacctgttgcagaagggcaagagattggaatgaatacagagacaagtggtacttctgctagggaaaaagagctctctcccccacctggcttaccttctaagataggcagcatttccaggcagtcatctctatcagaaaaaaaaattccagagccttctcctgtaacaaggagaaaggcatatgagaaagcagaaaaatcaaaggccaaggaacaaaagcactcagattctggaacttcagaggctagtctttcacctccttcttccccaccaagccggccccgtaatgaactgaatgtttttaatcgtcttactgtttctcagggaaacacatcagttcagcaggataagtctgatgaaagtgactcctctctctcggaggtacacagatcctccagaaggggcataatcaacccatttcctgcttcaaaaggaatcagagcttttccacttcagtgtattcacatagctgaagggcatacaaaagctgtgctctgtgtggattctactgatgatctcctcttcactggatcaaaagatcgtacttgtaaagtatggaatctggtgactgggcaggaaataatgtcactggggggtcatcccaacaatgtcgtgtctgtaaaatactgtaattataccagtttggtcttcactgtatcaacatcttatattaaggtgtgggatatcagagattcagcaaagtgcattcgaacactaacgtcttcaggtcaagttactcttggagatgcttgttctgcaagtaccagtcgaacagtagctattccttctggagagaaccagatcaatcaaattgccctaaacccaactggcaccttcctctatgctgcttctggaaatgctgtcaggatgtgggatcttaaaaggtttcagtctacaggaaagttaacaggacacctaggccctgttatgtgccttactgtggatcagatttccagtggacaagatctaatcatcactggctccaaggatcattacatcaaaatgtttgatgttacagaaggagctcttgggactgtgagtcccacccacaattttgaaccccctcattatgatggcatagaagcactaaccattcaaggggataacctatttagtgggtctagagataatggaatcaagaaatgggacttaactcaaaaagaccttcttcagcaagttccaaatgcacataaggattgggtctgtgccctgggagtggtgccagaccacccagttttgctcagtggctgcagagggggcattttgaaagtctggaacatggatacttttatgccagtgggagagatgaagggtcatgatagtcctatcaatgccatatgtgttaattccacccacatttttactgcagctgatgatcgaactgtgagaatttggaaggctcgcaatttgcaagatggtcagatctctgacacaggagatctgggggaagatattgccagtaattaaacatgaatgaagataggttgtaaactgaatgctgtgataatactctgtattctttatggaaaatgttgtcctgtacttactaggcaaaacgtatgaatcggattaactggaaaatatatctgaattcaactgctgactataaatggtattctaataaaattgtgtactatcctgtgtgcttagttttaagatcaaccaatagatatatatcctacaattgatatattgctttattcacacttttattgtggctgaatttttgtgcctatctataaaacacactttcaaattatttgaattaccaagacgtctgcttttgtgacagtcagaaaacacacctggaatacgatgcagcccaccattaactcattcatgtagtttattcaagtgatttatgtatttaaactaaatattgaaaatgttagtcaaattgtggtttgcttgtcaggtatttatatcagtctgtagtggattcccaaatttcaaagctcttttaatgtaatggacaaaaataagatatgagaatattattgatgaattttcataaggtggaattgatcttaatctactaacagagaagggtagacagtttgtgttaaatgttggcatttacttgtattgaccaaagttttgcagctctactatattctgtgctcaggactaaaatgctgttaatttttttttttttttccagtgctgtgcatatattctgtgatgggaaacattgttgatgtcctaacagaaatatattttgatctattttcctatggagttgtttctattatgaccatttaattttgtttttatttaatagtagtatttccttcccttttatctaattttttatatgctgctaaatatattttaaatatactatgtttgcgaaccttggtagctatgatgagagctattatcatctgtggtgggaaaagctatgtaaataggtagattgtatagagagactatcttgtgttgtgcctgtatgaatttttaaaagttgttgactggattttgcaaaaggatgtataatatttctgtctgctcagaatattaatttgtaaattctgcaagtttaatttttatgtagatggtataacatttgaaaatattgtcttatgtgattttttcccctgaaaatatttgcttgtaaatgaaaacttagctagggcttaaataaacatgttgctatgaaatt

SEQ ID NO: 146718 - DNA, 5044 bp, Homo sapiens
  Payload ID: 9026
  Gene Symbol: KIF21A
  Gene Name: kinesin family member 21A
  Uniprot ID: Q7Z4S6
  ENST ID: ENST00000361418
  CDS Start-End: 17-5041
gctgcccgccgccagcatgttgggcgccccggacgagagctccgtgcgggtggctgtcagaataagaccacagcttgccaaagagaagattgaaggatgccatatttgtacatctgtcacaccaggagagcctcaggtcttcctagggaaagataaggcttttacttttgactatgtatttgacattgactcccagcaagagcagatctacattcaatgtatagaaaaactaattgaaggttgctttgaaggatacaatgctacagtttttgcttatggacaaactggagctggtaaaacatacacaatgggaacaggatttgatgttaacattgttgaggaagaactgggtattatttctcgagctgttaaacacctttttaagagtattgaagaaaaaaaacacatagcaattaaaaatgggcttcctgctccagattttaaagtgaatgcccaattcttagagctctataatgaagaggtccttgacttatttgataccactcgtgatattgatgcaaaaagtaaaaaatcaaatataagaattcatgaagattcaactggaggaatttatactgtgggcgttacaacacgtactgtgaatacagaatcagagatgatgcagtgtttgaagttgggtgctttatcccggacaactgccagtacccagatgaatgttcagagctctcgttcacatgccatttttaccattcatgtgtgtcaaaccagagtgtgtccccaaatagatgctgacaatgcaactgataataaaattatttctgaatcagcacagatgaatgaatttgaaaccctgactgcaaagttccattttgttgatctcgcaggatctgaaagactgaagcgtactggagctacaggcgagagggcaaaagaaggcatttctatcaactgtggacttttggcacttggcaatgtaataagtgccttgggagacaagagcaagagggccacacatgtcccctatagagattccaagctaacaagactactacaggattccctcgggggtaatagccaaacaatcatgatagcatgtgtcagcccttcagacagagactttatggaaacgttaaacaccctgaaatacgccaatcgagctagaaatatcaagaataaggtgatggtcaatcaggacagagctagtcagcaaatcaatgcacttcgtagtgaaatcacacgacttcagatggagctcatggagtacaaaacaggtaaaagaataattgacgaagagggtgtggaaagcatcaatgacatgtttcatgagaatgctatgctacagactgaaaataataacctgcgtgtaagaattaaagccatgcaagagacggttgatgcattgaggtccagaattacacagcttgttagtgatcaggccaaccatgttcttgccagagcaggtgaaggaaatgaggagattagtaatatgattcatagttatataaaagaaatcgaagatctcagggcaaaattattagaaagtgaagcagtgaatgagaaccttcgaaaaaacttgacaagagccacagcaagagcgccatatttcagcggatcatcaactttttctcctaccatactatcctcagacaaagaaaccattgaaattatagacctagcaaaaaaagatttagagaagttgaaaagaaaagaaaagaggaagaaaaaaaggctacagaaacttgaggaaagcaatcgagaagaaagaagtgtggctggtaaagaggataatacagacactgaccaagagaagaaagaagaaaagggtgtttcggaaagagaaaacaatgaattagaagtggaagaaagtcaagaagtgagtgatcatgaggatgaagaagaggaggaggaggaggaggaagatgacattgatgggggtgaaagttctgatgaatcagattctgaatcagatgaaaaagccaattatcaagcagacttggcaaacattacttgtgaaattgcaattaagcaaaagctgattgatgaactagaaaacagccagaaaagactgcagactctgaaaaagcagtatgaagagaagctaatgatgctgcaacataaaattcgggatactcagcttgaaagagaccaggtgcttcaaaacttaggctcggtagaatcttactcagaagaaaaagcaaaaaaagttaggtctgaatatgaaaagaaactccaagccatgaacaaagaactgcagagacttcaagcagctcaaaaagaacatgcaaggttgcttaaaaatcagtctcagtatgaaaagcaattgaagaaattgcagcaggatgtgatggaaatgaaaaaaacaaaggttcgcctaatgaaacaaatgaaagaagaacaagagaaagccagactgactgagtctagaagaaacagagagattgctcagttgaaaaaggatcaacgtaaaagagatcatcaacttagacttctggaagcccaaaaaagaaaccaagaagtggttctacgtcgcaaaactgaagaggttacggctcttcgtcggcaagtaagacccatgtcagataaagtggctgggaaagttactcggaagctgagttcatctgatgcacctgctcaggacacaggttccagtgcagctgctgtcgaaacagatgcatcaaggacaggagcccagcagaaaatgagaattcctgtggcgagagtccaggccttaccaacgccggcaacaaatggaaacaggaaaaaatatcagaggaaaggattgactggccgagtgtttatttccaagacagctcgcatgaagtggcagctccttgagcgcagggtcacagacatcatcatgcagaagatgaccatttccaacatggaggcagatatgaatagactcctcaagcaacgggaggaactcacaaaaagacgagagaaactttcaaaaagaagggagaagatagtcaaggagaatggagagggagataaaaatgtggctaatatcaatgaagagatggagtcactgactgctaatatcgattacatcaatgacagtatttctgattgtcaggccaacataatgcagatggaagaagcaaaggaagaaggtgagacattggatgttactgcagtcattaatgcctgcacccttacagaagcccgatacctgctagatcacttcctgtcaatgggcatcaataagggtcttcaggctgcccagaaagaggctcaaattaaagtactggaaggtcgactcaaacaaacagaaataaccagtgctacccaaaaccagctcttattccatatgttgaaagagaaggcagaattaaatcctgagctagatgctttactaggccatgctttacaagatctagatagcgtaccattagaaaatgtagaggatagtactgatgaggatgctcctttaaacagcccaggatcagaaggaagcacgctgtcttcagatctcatgaagctttgtggtgaagtgaaacctaagaacaaggcccgaaggagaaccaccactcagatggaattgctgtatgcagatagcagtgaactagcttcagacactagtacaggagatgcctccttgcctggccctctcacacctgttgcagaagggcaagagattggaatgaatacagagacaagtggtacttctgctagggaaaaagagctctctcccccacctggcttaccttctaagataggcagcatttccaggcagtcatctctatcagaaaaaaaaattccagagccttctcctgtaacaaggagaaaggcatatgagaaagcagaaaaatcaaaggccaaggaacaaaagcactcagattctggaacttcagaggctagtctttcacctccttcttccccaccaagccggccccgtaatgaactgaatgtttttaatcgtcttactgtttctcagggaaacacatcagttcagcaggataagtctgatgaaagtgactcctctctctcggaggtacacagatcctccagaaggggcataatcaacccatttcctgcttcaaaaggaatcagagcttttccacttcagtgtattcacatagctgaagggcatacaaaagctgtgctctgtgtggattctactgatgatctcctcttcactggatcaaaagatcgtacttgtaaagtatggaatctggtgactgggcaggaaataatgtcactggggggtcatcccaacaatgtcgtgtctgtaaaatactgtaattataccagtttggtcttcactgtatcaacatcttatattaaggtgtgggatatcagagattcagcaaagtgcattcgaacactaacgtcttcaggtcaagttactcttggagatgcttgttctgcaagtaccagtcgaacagtagctattccttctggagagaaccagatcaatcaaattgccctaaacccaactggcaccttcctctatgctgcttctggaaatgctgtcaggatgtgggatcttaaaaggtttcagtctacaggaaagttaacaggacacctaggccctgttatgtgccttactgtggatcagatttccagtggacaagatctaatcatcactggctccaaggatcattacatcaaaatgtttgatgttacagaaggagctcttgggactgtgagtcccacccacaattttgaaccccctcattatgatggcatagaagcactaaccattcaaggggataacctatttagtgggtctagagataatggaatcaagaaatgggacttaactcaaaaagaccttcttcagcaagttccaaatgcacataaggattgggtctgtgccctgggagtggtgccagaccacccagttttgctcagtggctgcagagggggcattttgaaagtctggaacatggatacttttatgccagtgggagagatgaagggtcatgatagtcctatcaatgccatatgtgttaattccacccacatttttactgcagctgatgatcgaactgtgagaatttggaaggctcgcaatttgcaagatggtcagatctctgacacaggagatctgggggaagatattgccagtaattaaaca

SEQ ID NO: 146719 - DNA, 4866 bp, Homo sapiens
  Payload ID: 9026
  Gene Symbol: KIF21A
  Gene Name: kinesin family member 21A
  Uniprot ID: Q7Z4S6
  ENST ID: ENST00000541463
  CDS Start-End: 1-4866
atgttgggcgccccggacgagagctccgtgcgggtggctgtcagaataagaccacagcttgccaaagagaagattgaaggatgccatatttgtacatctgtcacaccaggagagcctcaggtcttcctagggaaagataaggcttttacttttgactatgtatttgacattgactcccagcaagagcagatctacattcaatgtatagaaaaactaattgaaggttgctttgaaggatacaatgctacagtttttgcttatggacaaactggagctggtaaaacatacacaatgggaacaggatttgatgttaacattgttgaggaagaactgggtattatttctcgagctgttaaacacctttttaagagtattgaagaaaaaaaacacatagcaattaaaaatgggcttcctgctccagattttaaagtgaatgcccaattcttagagctctataatgaagaggtccttgacttatttgataccactcgtgatattgatgcaaaaagtaaaaaatcaaatataagaattcatgaagattcaactggaggaatttatactgtgggcgttacaacacgtactgtgaatacagaatcagagatgatgcagtgtttgaagttgggtgctttatcccggacaactgccagtacccagatgaatgttcagagctctcgttcacatgccatttttaccattcatgtgtgtcaaaccagagtgtgtccccaaatagatgctgacaatgcaactgataataaaattatttctgaatcagcacagatgaatgaatttgaaaccctgactgcaaagttccattttgttgatctcgcaggatctgaaagactgaagcgtactggagctacaggcgagagggcaaaagaaggcatttctatcaactgtggacttttggcacttggcaatgtaataagtgccttgggagacaagagcaagagggccacacatgtcccctatagagattccaagctaacaagactactacaggattccctcgggggtaatagccaaacaatcatgatagcatgtgtcagcccttcagacagagactttatggaaacgttaaacaccctgaaatacgccaatcgagctagaaatatcaagaataaggtgatggtcaatcaggacagagctagtcagcaaatcaatgcacttcgtagtgaaatcacacgacttcagatggagctcatggagtacaaaacaggtaaaagaataattgacgaagagggtgtggaaagcatcaatgacatgtttcatgagaatgctatgctacagactgaaaataataacctgcgtgtaagaattaaagccatgcaagagacggttgatgcattgaggtccagaattacacagcttgttagtgatcaggccaaccatgttcttgccagagcaggtgaaggaaatgaggagattagtaatatgattcatagttatataaaagaaatcgaagatctcagggcaaaattattagaaagtgaagcagtgaatgagaaccttcgaaaaaacttgacaagagccacagcaagagcgccatatttcagcggatcatcaactttttctcctaccatactatcctcagacaaagaaaccattgaaattatagacctagcaaaaaaagatttagagaagttgaaaagaaaagaaaagaggaagaaaaaaagtgtggctggtaaagaggataatacagacactgaccaagagaagaaagaagaaaagggtgtttcggaaagagaaaacaatgaattagaagtggaagaaagtcaagaagtgagtgatcatgaggatgaagaagaggaggaggaggaggaggaagatgacattgatgggggtgaaagttctgatgaatcagattctgaatcagatgaaaaagccaattatcaagcagacttggcaaacattacttgtgaaattgcaattaagcaaaagctgattgatgaactagaaaacagccagaaaagactgcagactctgaaaaagcagtatgaagagaagctaatgatgctgcaacataaaattcgggatactcagcttgaaagagaccaggtgcttcaaaacttaggctcggtagaatcttactcagaagaaaaagcaaaaaaagttaggtctgaatatgaaaagaaactccaagccatgaacaaagaactgcagagacttcaagcagctcaaaaagaacatgcaaggttgcttaaaaatcagtctcagtatgaaaagcaattgaagaaattgcagcaggatgtgatggaaatgaaaaaaacaaaggttcgcctaatgaaacaaatgaaagaagaacaagagaaagccagactgactgagtctagaagaaacagagagattgctcagttgaaaaaggatcaacgtaaaagagatgttacggctcttcgtcggcaagtaagacccatgtcagataaagtggctgggaaagttactcggaagctgagttcatctgatgcacctgctcaggacacaggttccagtgcagctgctgtcgaaacagatgcatcaaggacaggagcccagcagaaaatgagaattcctgtggcgagagtccaggccttaccaacgccggcaacaaatggaaacaggaaaaaatatcagaggaaaggattgactggccgagtgtttatttccaagacagctcgcatgaagtggcagctccttgagcgcagggtcacagacatcatcatgcagaagatgaccatttccaacatggaggcagatatgaatagactcctcaagcaacgggaggaactcacaaaaagacgagagaaactttcaaaaagaagggagaagatagtcaaggagaatggagagggagataaaaatgtggctaatatcaatgaagagatggagtcactgactgctaatatcgattacatcaatgacagtatttctgattgtcaggccaacataatgcagatggaagaagcaaaggaagaaggtgagacattggatgttactgcagtcattaatgcctgcacccttacagaagcccgatacctgctagatcacttcctgtcaatgggcatcaataagggtcttcaggctgcccagaaagaggctcaaattaaagtactggaaggtcgactcaaacaaacagaaataaccagtgctacccaaaaccagctcttattccatatgttgaaagagaaggcagaattaaatcctgagctagatgctttactaggccatgctttacaagatctagatagcgtaccattagaaaatgtagaggatagtactgatgaggatgctcctttaaacagcccaggatcagaaggaagcacgctgtcttcagatctcatgaagctttgtggtgaagtgaaacctaagaacaaggcccgaaggagaaccaccactcagatggaattgctgtatgcagatagcagtgaactagcttcagacactagtacaggagatgcctccttgcctggccctctcacacctgttgcagaagggcaagagattggaatgaatacagagacaagtggtacttctgctagggaaaaagagctctctcccccacctggcttaccttctaagataggcagcatttccaggcagtcatctctatcagaaaaaaaaattccagagccttctcctgtaacaaggagaaaggcatatgagaaagcagaaaaatcaaaggccaaggaacaaaagcactcagattctggaacttcagaggctagtctttcacctccttcttccccaccaagccggccccgtaatgaactgaatgtttttaatcgtcttactgtttctcagggaaacacatcagttcagcaggataagggcataatcaacccatttcctgcttcaaaaggaatcagagcttttccacttcagtgtattcacatagctgaagggcatacaaaagctgtgctctgtgtggattctactgatgatctcctcttcactggatcaaaagatcgtacttgtaaagtatggaatctggtgactgggcaggaaataatgtcactggggggtcatcccaacaatgtcgtgtctgtaaaatactgtaattataccagtttggtcttcactgtatcaacatcttatattaaggtgtgggatatcagagattcagcaaagtgcattcgaacactaacgtcttcaggtcaagttactcttggagatgcttgttctgcaagtaccagtcgaacagtagctattccttctggagagaaccagatcaatcaaattgccctaaacccaactggcaccttcctctatgctgcttctggaaatgctgtcaggatgtgggatcttaaaaggtttcagtctacaggaaagttaacaggacacctaggccctgttatgtgccttactgtggatcagatttccagtggacaagatctaatcatcactggctccaaggatcattacatcaaaatgtttgatgttacagaaggagctcttgggactgtgagtcccacccacaattttgaaccccctcattatgatggcatagaagcactaaccattcaaggggataacctatttagtgggtctagagataatggaatcaagaaatgggacttaactcaaaaagaccttcttcagcaagttccaaatgcacataaggattgggtctgtgccctgggagtggtgccagaccacccagttttgctcagtggctgcagagggggcattttgaaagtctggaacatggatacttttatgccagtgggagagatgaagggtcatgatagtcctatcaatgccatatgtgttaattccacccacatttttactgcagctgatgatcgaactgtgagaatttggaaggctcgcaatttgcaagatggtcagatctctgacacaggagatctgggggaagatattgccagtaattaa

SEQ ID NO: 146720 - DNA, 5040 bp, Homo sapiens
  Payload ID: 9026
  Gene Symbol: KIF21A
  Gene Name: kinesin family member 21A
  Uniprot ID: Q7Z4S6
  ENST ID: ENST00000544797
  CDS Start-End: 90-5003
agcctactgcgcccgagtcccgcggccccagtggcgcctcagctctgcggtgccgaggcccaacggctcgatcgctgcccgccgccagcatgttgggcgccccggacgagagctccgtgcgggtggctgtcagaataagaccacagcttgccaaagagaagattgaaggatgccatatttgtacatctgtcacaccaggagagcctcaggtcttcctagggaaagataaggcttttacttttgactatgtatttgacattgactcccagcaagagcagatctacattcaatgtatagaaaaactaattgaaggttgctttgaaggatacaatgctacagtttttgcttatggacaaactggagctggtaaaacatacacaatgggaacaggatttgatgttaacattgttgaggaagaactgggtattatttctcgagctgttaaacacctttttaagagtattgaagaaaaaaaacacatagcaattaaaaatgggcttcctgctccagattttaaagtgaatgcccaattcttagagctctataatgaagaggtccttgacttatttgataccactcgtgatattgatgcaaaaagtaaaaaatcaaatataagaattcatgaagattcaactggaggaatttatactgtgggcgttacaacacgtactgtgaatacagaatcagagatgatgcagtgtttgaagttgggtgctttatcccggacaactgccagtacccagatgaatgttcagagctctcgttcacatgccatttttaccattcatgtgtgtcaaaccagagtgtgtccccaaatagatgctgacaatgcaactgataataaaattatttctgaatcagcacagatgaatgaatttgaaaccctgactgcaaagttccattttgttgatctcgcaggatctgaaagactgaagcgtactggagctacaggcgagagggcaaaagaaggcatttctatcaactgtggacttttggcacttggcaatgtaataagtgccttgggagacaagagcaagagggccacacatgtcccctatagagattccaagctaacaagactactacaggattccctcgggggtaatagccaaacaatcatgatagcatgtgtcagcccttcagacagagactttatggaaacgttaaacaccctgaaatacgccaatcgagctagaaatatcaagaataaggtgatggtcaatcaggacagagctagtcagcaaatcaatgcacttcgtagtgaaatcacacgacttcagatggagctcatggagtacaaaacaggtaaaagaataattgacgaagagggtgtggaaagcatcaatgacatgtttcatgagaatgctatgctacagactgaaaataataacctgcgtgtaagaattaaagccatgcaagagacggttgatgcattgaggtccagaattacacagcttgttagtgatcaggccaaccatgttcttgccagagcaggtgaaggaaatgaggagattagtaatatgattcatagttatataaaagaaatcgaagatctcagggcaaaattattagaaagtgaagcagtgaatgagaaccttcgaaaaaacttgacaagagccacagcaagagcgccatatttcagcggatcatcaactttttctcctaccatactatcctcagacaaagaaaccattgaaattatagacctagcaaaaaaagatttagagaagttgaaaagaaaagaaaagaggaagaaaaaaagtgtggctggtaaagaggataatacagacactgaccaagagaagaaagaagaaaagggtgtttcggaaagagaaaacaatgaattagaagtggaagaaagtcaagaagtgagtgatcatgaggatgaagaagaggaggaggaggaggaggaagatgacattgatgggggtgaaagttctgatgaatcagattctgaatcagatgaaaaagccaattatcaagcagacttggcaaacattacttgtgaaattgcaattaagcaaaagctgattgatgaactagaaaacagccagaaaagactgcagactctgaaaaagcagtatgaagagaagctaatgatgctgcaacataaaattcgggatactcagcttgaaagagaccaggtgcttcaaaacttaggctcggtagaatcttactcagaagaaaaagcaaaaaaagttaggtctgaatatgaaaagaaactccaagccatgaacaaagaactgcagagacttcaagcagctcaaaaagaacatgcaaggttgcttaaaaatcagtctcagtatgaaaagcaattgaagaaattgcagcaggatgtgatggaaatgaaaaaaacaaaggttcgcctaatgaaacaaatgaaagaagaacaagagaaagccagactgactgagtctagaagaaacagagagattgctcagttgaaaaaggatcaacgtaaaagagatcatcaacttagacttctggaagcccaaaaaagaaaccaagaagtggttctacgtcgcaaaactgaagaggttacggctcttcgtcggcaagtaagacccatgtcagataaagtggctgggaaagttactcggaagctgagttcatctgatgcacctgctcaggacacaggttccagtgcagctgctgtcgaaacagatgcatcaaggacaggagcccagcagaaaatgagaattcctgtggcgagagtccaggccttaccaacgccggcaacaaatggaaacaggaaaaaatatcagaggaaaggattgactggccgagtgtttatttccaagacagctcgcatgaagtggcagctccttgagcgcagggtcacagacatcatcatgcagaagatgaccatttccaacatggaggcagatatgaatagactcctcaagcaacgggaggaactcacaaaaagacgagagaaactttcaaaaagaagggagaagatagtcaaggagaatggagagggagataaaaatgtggctaatatcaatgaagagatggagtcactgactgctaatatcgattacatcaatgacagtatttctgattgtcaggccaacataatgcagatggaagaagcaaaggaagaaggtgagacattggatgttactgcagtcattaatgcctgcacccttacagaagcccgatacctgctagatcacttcctgtcaatgggcatcaataagggtcttcaggctgcccagaaagaggctcaaattaaagtactggaaggtcgactcaaacaaacagaaataaccagtgctacccaaaaccagctcttattccatatgttgaaagagaaggcagaattaaatcctgagctagatgctttactaggccatgctttacaagaaaatgtagaggatagtactgatgaggatgctcctttaaacagcccaggatcagaaggaagcacgctgtcttcagatctcatgaagctttgtggtgaagtgaaacctaagaacaaggcccgaaggagaaccaccactcagatggaattgctgtatgcagatagcagtgaactagcttcagacactagtacaggagatgcctccttgcctggccctctcacacctgttgcagaagggcaagagattggaatgaatacagagacaagtggtacttctgctagggaaaaagagctctctcccccacctggcttaccttctaagataggcagcatttccaggcagtcatctctatcagaaaaaaaaattccagagccttctcctgtaacaaggagaaaggcatatgagaaagcagaaaaatcaaaggccaaggaacaaaagcactcagattctggaacttcagaggctagtctttcacctccttcttccccaccaagccggccccgtaatgaactgaatgtttttaatcgtcttactgtttctcagggaaacacatcagttcagcaggataagggcataatcaacccatttcctgcttcaaaaggaatcagagcttttccacttcagtgtattcacatagctgaagggcatacaaaagctgtgctctgtgtggattctactgatgatctcctcttcactggatcaaaagatcgtacttgtaaagtatggaatctggtgactgggcaggaaataatgtcactggggggtcatcccaacaatgtcgtgtctgtaaaatactgtaattataccagtttggtcttcactgtatcaacatcttatattaaggtgtgggatatcagagattcagcaaagtgcattcgaacactaacgtcttcaggtcaagttactcttggagatgcttgttctgcaagtaccagtcgaacagtagctattccttctggagagaaccagatcaatcaaattgccctaaacccaactggcaccttcctctatgctgcttctggaaatgctgtcaggatgtgggatcttaaaaggtttcagtctacaggaaagttaacaggacacctaggccctgttatgtgccttactgtggatcagatttccagtggacaagatctaatcatcactggctccaaggatcattacatcaaaatgtttgatgttacagaaggagctcttgggactgtgagtcccacccacaattttgaaccccctcattatgatggcatagaagcactaaccattcaaggggataacctatttagtgggtctagagataatggaatcaagaaatgggacttaactcaaaaagaccttcttcagcaagttccaaatgcacataaggattgggtctgtgccctgggagtggtgccagaccacccagttttgctcagtggctgcagagggggcattttgaaagtctggaacatggatacttttatgccagtgggagagatgaagggtcatgatagtcctatcaatgccatatgtgttaattccacccacatttttactgcagctgatgatcgaactgtgagaatttggaaggctcgcaatttgcaagatggtcagatctctgacacaggagatctgggggaagatattgccagtaattaaacatgaatgaagataggttgtaaactgaatgctgtga

SEQ ID NO: 146721 - DNA, 593 bp, Homo sapiens
  Payload ID: 9026
  Gene Symbol: KIF21A
  Gene Name: kinesin family member 21A
  ENST ID: ENST00000551066
  CDS Start-End: 1-417
aaaaatgtggctaatatcaatgaagagatggagtcactgactgctaatatcgattacatcaatgacagtatttctgattgtcaggccaacataatgcagatggaagaagcaaaggaagaaggtgagacattggatgttactgcagtcattaatgcctgcacccttacagaagcccgatacctgctagatcacttcctgtcaatgggcatcaataagggtcttcaggctgcccagaaagaggctcaaattaaagtactggaaggtcgactcaaacaaacagaaataaccagtgctacccaaaaccagctcttattccatatgttgaaagagaaggcagaattaaatcctgagctagatgctttactaggccatgctttacaagatctagatagcgtaccattaggtaagtatgtttagctttctgtgtatcctacagctgcatgaattactaattgttcatgtacactaattgtggtacatcttattttaaagatttttattggcggtcaagtggtttttgcatgatcttttttgaaatgtatccatgcccacaaacacactaagtcttttattaaacattcctgattttaaaa

SEQ ID NO: 146722 - DNA, 4120 bp, Homo sapiens
  Payload ID: 9026
  Gene Symbol: KIF21A
  Gene Name: kinesin family member 21A
  ENST ID: ENST00000552961
  CDS Start-End: 1-2927
aaattgcaattaagcaaaagctgattgatgaactagaaaacagccagaaaagactgcagactctgaaaaagcagtatgaagagaagctaatgatgctgcaacataaaattcgggatactcagcttgaaagagaccaggtgcttcaaaacttaggctcggtagaatcttactcagaagaaaaagcaaaaaaagttaggtctgaatatgaaaagaaactccaagccatgaacaaagaactgcagagacttcaagcagctcaaaaagaacatgcaaggttgcttaaaaatcagtctcagtatgaaaagcaattgaagaaattgcagcaggatgtgatggaaatgaaaaaaacaaaggttcgcctaatgaaacaaatgaaagaagaacaagagaaagccagactgactgagtctagaagaaacagagagattgctcagttgaaaaaggatcaacgtaaaagagatcatcaacttagacttctggaagcccaaaaaagaaaccaagaagtggttctacgtcgcaaaactgaagaggttacggctcttcgtcggcaagtaagacccatgtcagataaagtggctgggaaagttactcggaagctgagttcatctgatgcacctgctcaggacacaggttccagtgcagctgctgtcgaaacagatgcatcaaggacaggagcccagcagaaaatgagaattcctgtggcgagagtccaggccttaccaacgccggcaacaaatggaaacaggaaaaaatatcagaggaaaggattgactggccgagtgtttatttccaagacagctcgcatgaagtggcagctccttgagcgcagggtcacagacatcatcatgcagaagatgaccatttccaacatggaggcagatatgaatagactcctcaagcaacgggaggaactcacaaaaagacgagagaaactttcaaaaagaagggagaagatagtcaaggagaatggagagggagataaaaatgtggctaatatcaatgaagagatggagtcactgactgctaatatcgattacatcaatgacagtatttctgattgtcaggccaacataatgcagatggaagaagcaaaggaagaaggtgagacattggatgttactgcagtcattaatgcctgcacccttacagaagcccgatacctgctagatcacttcctgtcaatgggcatcaataagggtcttcaggctgcccagaaagaggctcaaattaaagtactggaaggtcgactcaaacaaacagaaataaccagtgctacccaaaaccagctcttattccatatgttgaaagagaaggcagaattaaatcctgagctagatgctttactaggccatgctttacaagatctagatagcgtaccattagaaaatgtagaggatagtactgatgaggatgctcctttaaacagcccaggatcagaaggaagcacgctgtcttcagatctcatgaagctttgtggtgaagtgaaacctaagaacaaggcccgaaggagaaccaccactcagatggaattgctgtatgcagatagcagtgaactagcttcagacactagtacaggagatgcctccttgcctggccctctcacacctgttgcagaagggcaagagattggaatgaatacagagacaagtggtacttctgctagggaaaaagagctctctcccccacctggcttaccttctaagataggcagcatttccaggcagtcatctctatcagaaaaaaaaattccagagccttctcctgtaacaaggagaaaggcatatgagaaagcagaaaaatcaaaggccaaggaacaaaagcagtctgatgaaagtgactcctctctctcggaggtacacaggggcataatcaacccatttcctgcttcaaaaggaatcagagcttttccacttcagtgtattcacatagctgaagggcatacaaaagctgtgctctgtgtggattctactgatgatctcctcttcactggatcaaaagatcgtacttgtaaagtatggaatctggtgactgggcaggaaataatgtcactggggggtcatcccaacaatgtcgtgtctgtaaaatactgtaattataccagtttggtcttcactgtatcaacatcttatattaaggtgtgggatatcagagattcagcaaagtgcattcgaacactaacgtcttcaggtcaagttactcttggagatgcttgttctgcaagtaccagtcgaacagtagctattccttctggagagaaccagatcaatcaaattgccctaaacccaactggcaccttcctctatgctgcttctggaaatgctgtcaggatgtgggatcttaaaaggtttcagtctacaggaaagttaacaggacacctaggccctgttatgtgccttactgtggatcagatttccagtggacaagatctaatcatcactggctccaaggatcattacatcaaaatgtttgatgttacagaaggagctcttgggactgtgagtcccacccacaattttgaaccccctcattatgatggcatagaagcactaaccattcaaggggataacctatttagtgggtctagagataatggaatcaagaaatgggacttaactcaaaaagaccttcttcagcaagttccaaatgcacataaggattgggtctgtgccctgggagtggtgccagaccacccagttttgctcagtggctgcagagggggcattttgaaagtctggaacatggatacttttatgccagtgggagagatgaagggtcatgatagtcctatcaatgccatatgtgttaattccacccacatttttactgcagctgatgatcgaactgtgagaatttggaaggctcgcaatttgcaagatggtcagatctctgacacaggagatctgggggaagatattgccagtaattaaacatgaatgaagataggttgtaaactgaatgctgtgataatactctgtattctttatggaaaatgttgtcctgtacttactaggcaaaacgtatgaatcggattaactggaaaatatatctgaattcaactgctgactataaatggtattctaataaaattgtgtactatcctgtgtgcttagttttaagatcaaccaatagatatatatcctacaattgatatattgctttattcacacttttattgtggctgaatttttgtgcctatctataaaacacactttcaaattatttgaattaccaagacgtctgcttttgtgacagtcagaaaacacacctggaatacgatgcagcccaccattaactcattcatgtagtttattcaagtgatttatgtatttaaactaaatattgaaaatgttagtcaaattgtggtttgcttgtcaggtatttatatcagtctgtagtggattcccaaatttcaaagctcttttaatgtaatggacaaaaataagatatgagaatattattgatgaattttcataaggtggaattgatcttaatctactaacagagaagggtagacagtttgtgttaaatgttggcatttacttgtattgaccaaagttttgcagctctactatattctgtgctcaggactaaaatgctgttaatttttttttttttttccagtgctgtgcatatattctgtgatgggaaacattgttgatgtcctaacagaaatatattttgatctattttcctatggagttgtttctattatgaccatttaattttgtttttatttaatagtagtatttccttcccttttatctaattttttatatgctgctaaatatattttaaatatactatgtttgcgaaccttggtagctatgatgagagctattatcatctgtggtgggaaaagctatgtaaataggtagattgtatagagagactatcttgtgttgtgcctgtatgaatttttaaaagttgttgactggattttgcaaaaggatgtataatatttctgtctgctcagaatattaatttgtaaattctgcaagtttaatttttatgtagatggtataacatttgaaaatattgtcttatgtgattttttcccctgaaaatatttgcttgtaaatgaaaacttagctagggcttaaataaacatgttgctatgaaa

SEQ ID NO: 146723 - DNA, 3161 bp, Homo sapiens
  Payload ID: 9026
  Gene Symbol: KIF21A
  Gene Name: kinesin family member 21A
  ENST ID: ENST00000551264
  CDS Start-End: 1-1968
caacgggaggaactcacaaaaagacgagagaaactttcaaaaagaagggagaagatagtcaaggagaatggagagggagataaaaatgtggctaatatcaatgaagagatggagtcactgactgctaatatcgattacatcaatgacagtatttctgattgtcaggccaacataatgcagatggaagaagcaaaggaagaaggtgagacattggatgttactgcagtcattaatgcctgcacccttacagaagcccgatacctgctagatcacttcctgtcaatgggcatcaataagggtcttcaggctgcccagaaagaggctcaaattaaagtactggaaggtcgactcaaacaaacagaaataaccagtgctacccaaaaccagctcttattccatatgttgaaagagaaggcagaattaaatcctgagctagatgctttactaggccatgctttacaagaaaatgtagaggatagtactgatgaggatgctcctttaaacagcccaggatcagaaggaagcacgctgtcttcagatctcatgaagctttgtggtgaagtgaaacctaagaacaaggcccgaaggagaaccaccactcagatggaattgctgtatgcagatagcagtgaactagcttcagacactagtacaggagatgcctccttgcctggccctctcacacctgttgcagaagggcaagagattggaatgaatacagagacaagtggtacttctgctagggaaaaagagctctctcccccacctggcttaccttctaagataggcagcatttccaggcagtcatctctatcagaaaaaaaaattccagagccttctcctgtaacaaggagaaaggcatatgagaaagcagaaaaatcaaaggccaaggaacaaaagcagggcataatcaacccatttcctgcttcaaaaggaatcagagcttttccacttcagtgtattcacatagctgaagggcatacaaaagctgtgctctgtgtggattctactgatgatctcctcttcactggatcaaaagatcgtacttgtaaagtatggaatctggtgactgggcaggaaataatgtcactggggggtcatcccaacaatgtcgtgtctgtaaaatactgtaattataccagtttggtcttcactgtatcaacatcttatattaaggtgtgggatatcagagattcagcaaagtgcattcgaacactaacgtcttcaggtcaagttactcttggagatgcttgttctgcaagtaccagtcgaacagtagctattccttctggagagaaccagatcaatcaaattgccctaaacccaactggcaccttcctctatgctgcttctggaaatgctgtcaggatgtgggatcttaaaaggtttcagtctacaggaaagttaacaggacacctaggccctgttatgtgccttactgtggatcagatttccagtggacaagatctaatcatcactggctccaaggatcattacatcaaaatgtttgatgttacagaaggagctcttgggactgtgagtcccacccacaattttgaaccccctcattatgatggcatagaagcactaaccattcaaggggataacctatttagtgggtctagagataatggaatcaagaaatgggacttaactcaaaaagaccttcttcagcaagttccaaatgcacataaggattgggtctgtgccctgggagtggtgccagaccacccagttttgctcagtggctgcagagggggcattttgaaagtctggaacatggatacttttatgccagtgggagagatgaagggtcatgatagtcctatcaatgccatatgtgttaattccacccacatttttactgcagctgatgatcgaactgtgagaatttggaaggctcgcaatttgcaagatggtcagatctctgacacaggagatctgggggaagatattgccagtaattaaacatgaatgaagataggttgtaaactgaatgctgtgataatactctgtattctttatggaaaatgttgtcctgtacttactaggcaaaacgtatgaatcggattaactggaaaatatatctgaattcaactgctgactataaatggtattctaataaaattgtgtactatcctgtgtgcttagttttaagatcaaccaatagatatatatcctacaattgatatattgctttattcacacttttattgtggctgaatttttgtgcctatctataaaacacactttcaaattatttgaattaccaagacgtctgcttttgtgacagtcagaaaacacacctggaatacgatgcagcccaccattaactcattcatgtagtttattcaagtgatttatgtatttaaactaaatattgaaaatgttagtcaaattgtggtttgcttgtcaggtatttatatcagtctgtagtggattcccaaatttcaaagctcttttaatgtaatggacaaaaataagatatgagaatattattgatgaattttcataaggtggaattgatcttaatctactaacagagaagggtagacagtttgtgttaaatgttggcatttacttgtattgaccaaagttttgcagctctactatattctgtgctcaggactaaaatgctgttaatttttttttttttttccagtgctgtgcatatattctgtgatgggaaacattgttgatgtcctaacagaaatatattttgatctattttcctatggagttgtttctattatgaccatttaattttgtttttatttaatagtagtatttccttcccttttatctaattttttatatgctgctaaatatattttaaatatactatgtttgcgaaccttggtagctatgatgagagctattatcatctgtggtgggaaaagctatgtaaataggtagattgtatagagagactatcttgtgttgtgcctgtatgaatttttaaaagttgttgactggattttgcaaaaggatgtataatatttctgtctgctcagaatattaatttgtaaattctgcaagtttaatttttatgtagatggtataacatttgaaaatattgtcttatgtgattttttcccctgaaaatatttgcttgtaaatgaaaacttagctagggcttaaataaacatgttgctatgaaa

SEQ ID NO: 146724 - DNA, 3005 bp, Homo sapiens
  Payload ID: 9026
  Gene Symbol: KIF21A
  Gene Name: kinesin family member 21A
  ENST ID: ENST00000547108
  CDS Start-End: 1-1427
caaggttgcttaaaaatcagtctcagtatgaaaagcaattgaagaaattgcagcaggatgtgatggaaatgaaaaaaacaaaggttcgcctaatgaaacaaatgaaagaagaacaagagaaagccagactgactgagtctagaagaaacagagagattgctcagttgaaaaaggatcaacgtaaaagagatcatcaacttagacttctggaagcccaaaaaagaaaccaagaagtggttctacgtcgcaaaactgaagaggttacggctcttcgtcggcaagtaagacccatgtcagataaagtggctgggaaagttactcggaagctgagttcatctgatgcacctgctcaggacacaggttccagtgcagctgctgtcgaaacagatgcatcaaggacaggagcccagcagaaaatgagaattcctgtggcgagagtccaggccttaccaacgccggcaacaaatggaaacaggaaaaaatatcagaggaaaggattgactggccgagtgtttatttccaagacagctcgcatgaagtggcagctccttgagcgcagggtcacagacatcatcatgcagaagatgaccatttccaacatggaggcagatatgaatagactcctcaagcaacgggaggaactcacaaaaagacgagagaaactttcaaaaagaagggagaagatagtcaaggagaatggagagggagataaaaatgtggctaatatcaatgaagagatggagtcactgactgctaatatcgattacatcaatgacagtatttctgattgtcaggccaacataatgcagatggaagaagcaaaggaagaaggtgagacattggatgttactgcagtcattaatgcctgcacccttacagaagcccgatacctgctagatcacttcctgtcaatgggcatcaataagggtcttcaggctgcccagaaagaggctcaaattaaagtactggaaggtcgactcaaacaaacagaaataaccagtgctacccaaaaccagctcttattccatatgttgaaagagaaggcagaattaaatcctgagctagatgctttactaggccatgctttacaagaaaatgtagaggatagtactgatgaggatgctcctttaaacagcccaggatcagaaggaagcacgctgtcttcagatctcatgaagctttgtggtgaagtgaaacctaagaacaaggcccgaaggagaaccaccactcagatggaattgctgtatgcagatagcagtgaactagcttcagacactagtacaggagatgcctccttgcctggccctctcacacctgttgcagaagggcaagagattggaatgaatacagagacaagtggtacttctgctagggaaaaagagctctctcccccacctggcttaccttctaagataggcagcatgtaagtttggcccagctacactaacttcttttcttttggctttaaaaaaaaaagtatgcatgttgctaatttcttatttctattatttaaaatttatataaatttgatctctggttttcgaaataatttgctaggtgttgtctcccctaaggtattggagagttgaaataatttaagatgagatgtcctttgttgaattgctttgtcttgtctccaagttttaggatcattcttaagggttataatttttataaaggctgacttatgaattacagaaaatacatatatagaaatacctaaattaaagttatacctataaaaccattatataactattatgtataaacagaaagtttagactcttaaatttgctctaaattacctatatcctagttttaagagtcctgtcaggatagtaaatgtttgctgacttttaaagaaaaaagaaaataccaattacaagtttaatacattttgagctttcctaattttttaccttgaagcatattgcatattctgggatgagtgtatgccccaaaaatatttttattggtattattaaagatttgaaggaggaaatattctctttcctatgataatctgaacaaaaaaccttctattcaaaataaatcttgcatagactatttttaattattatcttgaggacaaagaaagattttcccacatagtcctgtgtgtgtatgcgtatgtgtatgtgtgtgtgtacatatgtgtaccatgtgtgcatgtgtgtgttttgatagttatattaatattagattagtcattcactggtaaagatttttaacgttatttttcaaactaatcctcacatgtgatctagcagataatttatggaatgaatacatctctgcactgaggaatattgcccccccaaaagtggcacacactatatgatctgtaaataatacaaaataacaaactttccaaacttgaatagccatttttcataatattcttcattttatgaggacatttccattgttttccattcagtatcccatctgctaccttttgttccagaattaattttaatgatggcagaactttcttgcatgtgcttgaggtggcctatgtaattaactgttggatctgctgttagagattgctaaccagaatagtttatggcttcattgcttttgtgataagatgagaatagaagaaatgcttttggtgaaggtagtgatgtagaactgaggtcagattttaggaactaaatgtgttaggtatttagtctgtcagatgagtgagacttttggaacttcaagactaaatctgtggcctggaatccagattcagttccaggcagtcatctctatcagaaaaaaaaattccagagccttctcctgtaacaaggagaaaggcatatgagaaagcagaaaaatcaaaggccaaggaacaaaagcagggcataatcaacccatttcctgcttcaaaaggaatcagagcttttccacttcagtgtattcacatagctgaagggcatacaaaagctgtgctctgtgtggattctactgatgatctcctcttcactggatcaaaaggtatcgtacttgtaaag

SEQ ID NO: 146725 - DNA, 871 bp, Homo sapiens
  Payload ID: 9026
  Gene Symbol: KIF21A
  Gene Name: kinesin family member 21A
  ENST ID: ENST00000552908
  CDS Start-End: 1-871
tatactgtgggcgttacaacacgtactgtgaatacagaatcagagtccttgtttcttcccctttttcagatgatgcagtgtttgaagttgggtgctttatcccggacaactgccagtacccagatgaatgttcagagctctcgttcacatgccatttttaccattcatgtgtgtcaaaccagagtgtgtccccaaatagatgctgacaatgcaactgataataaaattatttctgaatcagcacagatgaatgaatttgaaaccctgactgcaaagttccattttgttgatctcgcaggatctgaaagactgaagcgtactggagctacaggcgagagggcaaaagaaggcatttctatcaactgtggacttttggcacttggcaatgtaataagtgccttgggagacaagagcaagagggccacacatgtcccctatagagattccaagctaacaagactactacaggattccctcgggggtaatagccaaacaatcatgatagcatgtgtcagcccttcagacagagactttatggaaacgttaaacaccctgaaatacgccaatcgagctagaaatatcaagaataaggtgatggtcaatcaggacagagctagtcagcaaatcaatgcacttcgtagtgaaatcacacgacttcagatggagctcatggagtacaaaacaggtaaaagaataattgacgaagagggtgtggaaagcatcaatgacatgtttcatgagaatgctatgctacagactgaaaataataacctgcgtgtaagaattaaagccatgcaagagacggttgatgcattgaggtccagaattacacagcttgttagtgatcaggccaaccatgttcttgccagag

SEQ ID NO: 146726 - DNA, 9897 bp, Homo sapiens
  Payload ID: 9027
  Gene Symbol: KIF21B
  Gene Name: kinesin family member 21B
  Uniprot ID: O75037
  ENST ID: ENST00000332129
  CDS Start-End: 318-5192
gggaggtggctgccgggtgggaggtgtgtgcgcgtgtgccgcgccgtagggagcggcgggtcgcgccgccggctgtcagctagctccgcgccgccgcccgatggcgcgaggaggcgcgcgggcccagccccggggggccggccgcgggtgagcccctcggcctgccgcccgcgagcatgtcacctccagccgccgccgccgcagcctccgccagccgcgcccgcgcccccgcctcccgcagccgcagccgctgcctcgggcattggcccccagacccccgcctctgatccacgcccagaccctagctccagagggccatggccggccagggggactgctgcgtcaaggtggccgtcaggatccggccccagctgtcgaaggagaagattgagggctgtcacatctgtacctctgttaccccgggagagccccaggtcctgctggggaaggacaaggccttcacctatgactttgtcttcgacctggacacctggcaagaacagatctattccacctgtgtgagcaagctcatcgagggctgcttcgagggctataatgccacggtgctggcctatgggcagacgggggccgggaagacgtacaccatgggcactggctttgacatggcaacgtcggaggaggagcagggcatcatcccgagggccatcgcacacctctttgggggcattgccgagcgcaagcgccgggcacaggagcagggcgtggctggacctgagttcaaagtcagcgcccagtttctggagctctacaacgaggagatccttgacctgtttgacagcacccgtgaccctgacacccgccaccgcaggtccaacatcaagatccacgaggacgcaaacggtggcatctacaccactggcgtcacttctcgcctcatccactcccaggaggagctgatccagtgcctgaagcagggggccctgtcccgcaccacagccagcacccagatgaacgtgcagagctcacgctcccacgccatcttcaccatccacctgtgccagatgcgcatgtgcacccagcccgacctggtgaatgaggcggtgactgggcttcctgatggtacacctccctcgagtgagtatgagacactcactgctaagtttcactttgtggacctggccggctcagagcggctgaagcggacaggggctactggcgagcgggccaaggagggcatctccatcaactgtggcctgctggccttgggcaatgtgatcagcgccttaggggaccagagcaagaaggtggtgcacgttccctacagggactccaagctcactcggctcctccaggattcgctggggggcaacagccagaccatcatgatcgcctgtgtgagcccctcagaccgagatttcatggagaccctcaacacactcaaatatgccaatcgggcccgcaacatcaagaacaaggtggtagtgaaccaggacaagaccagccagcaaatcagtgcactgcgggctgagattgctcggctgcagatggagctgatggagtataaggcgggcaagcgagtgataggagaggatggcgctgagggctatagtgatctgttccgagagaatgccatgctacagaaggagaatggggccctgcggctgcgggtgaaagccatgcaggaggccatcgatgccatcaacaaccgcgtcacccagctcatgagccaggaggccaacctgctgctagccaaggccggcgatggcaatgaggccattggtgcgctgatccagaactacatccgggagatcgaggagctacggactaagcttctagagagtgaagccatgaacgagtccctgcgccgcagcctctcacgggcctcggctaggagcccctactccctgggtgcttctccagccgccccggccttcgggggcagccctgccagctccatggaggatgcctcggaggtgatccgcagggccaagcaggacctggagcggctaaagaagaaggaggtcaggcagcggaggaagagccccgagaaggaagccttcaaaaagagggcaaaactccaacaggagaacagcgaggagacggatgagaacgaggcggaggaggaggaggaagagcgagacgagagtggctgtgaggaggaggaagggcgcgaggatgaagatgaggactcgggcagtgaagagagcctggtggactcagactcagaccccgaggagaaggaggtgaacttccaggcggacctggccgacctgacttgtgagatcgaaatcaagcagaagctgatcgacgagctggagaacagccagcggcggttgcagacgctcaagcaccagtatgaggaaaagctgattctgctgcagaacaagatccgagacacacagctggagcgcgaccgtgtgctgcagaacctcagcaccatggagtgctatactgaggagaaggccaacaagatcaaggcagactatgagaagaggctgcgggagatgaaccgggacctgcagaagctgcaggccgcccagaaagagcacgcccggctgcttaagaaccagtcgcgctacgagagggagctgaagaagctacaggccgaggtggctgagatgaagaaggccaaggtggccctgatgaagcagatgcgtgaggagcaacagcggcggcggctagtggagaccaagaggaaccgggagatcgcacagctcaagaaggagcagcggcgacaggagtttcagatccgagctctggagtcccagaagcggcagcaggagatggtcctgaggaggaagacccaggaggtttctgcactgaggcgcctggccaagcccatgtctgagcgggtggcagggcgtgcaggactaaagccacccatgctggactctggggctgaggtgtcggccagcactacctcatctgaggctgaatcaggggcccgctctgtctccagcatcgtgcgccagtggaaccgcaaaatcaaccacttcttgggggaccatcctgcgcccactgtcaatggcacccgtcctgcccgaaagaagttccagaagaagggggccagccagagcttcagtaaggcggcaaggctcaagtggcagtccctggagcgacggatcattgacatcgtcatgcagagaatgaccattgtcaacctggaggctgacatggagcggctcatcaagaaaagggaggagctgttcctcctgcaggaggcactgcggaggaagcgggagcggctgcaggctgagagccccgaggaagagaaggggctgcaggagctggctgaggagatcgaggtgctggcagccaacattgactacatcaatgacggcatcaccgactgccaggccaccatcgtgcagctggaggagaccaaggaggagctggactccacagacacatccgtggtcatcagctcctgctccctggctgaagcccgcctcctgctagacaacttcctcaaggcatccattgacaaggggctgcaagtggcacaaaaggaagcccagatccggctgttggagggccgactgaggcagacggatatggcaggctcctcccagaaccatctgctcctggacgccctgcgtgagaaggctgaagctcaccccgagctgcaggccctcatctacaatgtgcagcaggagaatggctacgccagcacagatgaggagatctcagagttctctgagggcagcttctcccagtcattcaccatgaaaggctccaccagccatgacgatttcaagttcaagagcgagcccaaactgtctgcccaaatgaaagctgtgtcggctgagtgcctgggccccccactggatatctccaccaagaacatcaccaagtccctggcctccctcgttgagatcaaagaggacggagtgggcttctctgtccgagacccctattaccgggacagggtctcgcgcaccgtcagtctgcctacccggggcagcactttccctaggcaatctcgagccacagagacgtccccgctgacgagaaggaagtcctacgaccgagggcagcccattaggtccacagatgtgggattcacacccccatcatcccctcccactcggccccgcaatgaccgcaatgtcttctctcgtctcaccagtaatcagagccaggggtcagcgctggacaagggcatcatctccccggttggaggagccaagggtgcacggacggccccactgcagtgtgtctccatggccgaaggccacaccaagcccatcctctgcctggatgccacagatgagttgctattcacagggtccaaagaccgaagctgcaagatgtggaacttggttacgggacaggagatcgcagctctaaagggccaccccaacaacgtggtctccatcaagtactgcagccactcggggcttgtgttctccgtgtccacctcctacatcaaggtgtgggacatccgggactcagccaagtgcattcggactctcacgtcctcgggccaggtgatctcaggggatgcctgtgccgccacatccacccgtgccatcaccagtgctcagggcgagcatcagatcaaccagatcgccctcagcccttcgggcaccatgctgtacgccgcctcgggcaatgccgtccgcatctgggagcttagcaggttccagcctgtcggcaagctgactggccacatcggccctgtgatgtgcctgacggtcacccagacggccagccagcatgacctcgtggtgactggctccaaggaccactacgttaagatgttcgagctgggcgagtgtgtgacgggcaccatcggccccactcacaacttcgagcccccgcactacgatggcatcgagtgtctcgccatccagggagacatcctgttcagtggctcccgagataacggcatcaagaagtgggacctagaccagcaggagctcatccagcaaatccccaatgcgcacaaggactgggtgtgcgccctggccttcatcccgggccgccccatgctgctcagcgcctgccgtgcgggtgtcatcaaggtctggaacgtggacaacttcacacccatcggtgagatcaagggccacgacagtcccatcaatgccatctgcaccaatgccaagcatatcttcacagcctccagtgactgccgggtaaagttgtggaattacgtccctggactcaccccctgccttcctcgccgagtcctggccataaagggccgcgccaccaccctgccctgaccctccccaactctccctgtctcctctttcattcttcccctctttccttttccctctctttccccacttcgatctgagctgcttcttaacggtatgagattattttactccttcttcttcctttcccttcctgtcctgcctggcctagagaggtgccctgcctgtccctcctgcacccaccgtccttttccaagcatgaacagtgggacaggccccaggagatgggtgccagggagcagaagggggagccttcaggcctggacaaaacgaaacacccccccaaaaaaagaaaacccatgacaaagctcccctgggggcctctgagtgcacaggcctctccatctgcccagcaccccaccacctgcagtccacctccccgtaagccatgcttgcctcccagccccaaccacatttggggagtttggggaatccagttcatcctctacttttgggggcagccagccaagcccactgcaagagctgaccggcacccctccactttgtcctccaccccagtgacctgacggtgaagttctggagtgtccggcggttaccccacagcggcccaccctaggagtgaggtcagagggatgcccccggaccctcgaccccagcagcctggacaccatggaagggaagctgtgacccggccgatggggccagctgctctggggacagagggcgtggccccctctcctgccctcctccctctcccttggccttcccacaggacactgttccctcatccctcccctgcctctcaggagcctctgggtgagagagaggctggggaggaaattaagctgtgaagccaaagggcattatcccttcttgttcccctcctggcagtcgtggccacattgtctcctgctgaaccggctctgcccctttctcaggcctttggcccagtggtggagccctgtggggaggtgcagcagcctggccccatcccacccttccgaggagctggcctccccgcttctcccagcccagcctctagagccactgcacctgcctctgagcccaaaaagataagtcctcaggtagctaaggaaaccaggtgtgggcggctgggccttgcagctaacccttaaccctctggcaacccgcagatagccccaactggccccaacagttccctggggtcccttttggatggggccaaggtggagctgctagaaagattcctttggggagatggtcagaaatacttcagttatttattattttgttatttttattttttgctgttgcctcctggaaacggacttgaagtttcttcccctatattctttccctcagctcttgggggccagaaatcccaaagggagtccgctgccccggccctccagggccgcctcctctgtttgctttgcagaggagggaactgctccttcgactctgcagctcaggcctgtccccgacacagcccccagggagtcttctagctacccctggcctctaggccgcctgacgctcagtgccttcctccgttccggggcctggcacccgtgccgggcagccttacaccagccatgcccgcggcaccacatgtgtcttctcactcgcgaggtcttgtgcccagcgcccccgggaaggcgggggcgctcaccccacagcccaggccccggggttctgccccacagtcctgcgtgggccacgtaggaagcagcatgggggctgtgtctgctgggaggtggcttggatggggaggacagcccggcaccctgacccccgcccctccccagccctgcagtcccccactgggccggggagtctctccagcttctctctctctggttattcaggagacacattttcggccttaaaactggcatggagcgcaggccctcccttgcagaaaattatcaaggaagagggagttggcagagtttctctgccccggggctggggacgcggagctccggggaaattgttaaatcagtgttctggcgccccctgttgggggaactctggaattacaggagtgggccttgggggggactgagctccatccctctcccccgccccacccccacccaaagttgcccaccctgtttttccgttgcatcgctggtcttgtgcttcccgcttcagtctgggagccaagagccagccccacctcccttcagaggacgcagtgacttttggactttccagaggtggttctgtgtttctgcccttggctcctctccgtcttgggctggggcacttggagccctctccatgtggcgcccagtgttggggggaggcaggctccagtggaggctgagtgaggcctggtcccttccccgtgccctcctcggagctgccacagaggctaagacggctgtcctgctggtgctggccctgctggatgtggtattgaagtctggggcagctgatagcaggaaggagacccccttggatgctggtctcctgggacctgaacagtctgtcagcaatggctggaaatccttcttcctctggccaccccgggggtgccgggcaacccccttagctctaagatgtggccacaaatctcttcccactcctccccgccaacctgaacagaaagttttgaccttgcaacctgtaagaaagaatccgtccgcatgactgtttacaagcgatagaaacacgtaagactctgtccccttgagctcccacccccgggccggggatgccccacctggggtgactgcactgtagctgcaaggcgtgttcttgcacgaagtgtgatcttatggccctgcgagaggtgctcatcatcatgcccattttctgctgtttctgatgggtcagctacctcacggcggggccagctctgctgtcctggcaagtgtcattgactctctaaacttgaagtccttcaggagccctgagcccaacatccatgagacaccccgagttgtgcttcatgagagttggattctctgcccactctttcagggatgtccaaggtccatgttagggggcaggcccccagctccactcactgcacaagcaccctaaatgttggaagcacaaaatggttgtgatttgagcacaatggcagggtcccgcaggcagacttgacaggcccaggcccgggaggatccccccacgttggctctgtccaaagtgagattgggggtgcctgtgtctgggacagggggctgcccttgctcagaccaggccttggctcatggcttgtcctaattctgggactcgtcatcttacttcttgcccttctgtgcccatcttaagactggaggctgagccttgtcaggcccagccacatctttacgccatgggaccaggagtaaagcgctctctaaaccccgcaccccaaatctctaaacgcctgagttcaggctgagtcctagccctagtgagcctgaagagcttggactgattcccagtctcctgggtcaagccccactttgtgctttcgaagcttatgagcgggttccctggatagaaggagtcttccatccccactgcccttgggcctcttcagcatagtcctgtgccagggccctgtcctcactatcagtcagttcagtatttgctttcacgtgagtggcggactcttctgaagcagccagaactctcaaaggcagcgcatggagttgccttgcgagatttccaaggaaggaggaaagattaacaggcggagcctggcacacccaagcctttgaggtggtcagagtgccaccttcagccccttgggaagggacagcggtgggtctgggagtggcctcaccctggattcagcctaggaatctcttcaccctcagctgtccagccctgctgcctgtctggggatgtgtggcctgggcagagggcagtttaaagcacaaaaccacatggggaaaacacaaggttgcggggactttctcatgtgcctgatgtggtggagggagacaccagcaggtggctgcagtgacgttagggaacataacacttctttgccctgctagctctcagctctggggggcatcccccgatgtggtctgggctgggagcaggcatatcccctggttgttgcctgtgcctggtctgttcaccatcgtgtttgtgtgggcagagcctgccctgcaggagcagtgactttcttcccactgtgtgtcccggacctgtggtatgtgtccctttgccatcccaaacaggcaactgcttgctgctctccttgcttggcatagcctcctggtcagtggccaatgccccacaggccttcctgggcctggccctcctctcctgactcccagatccttccctgccctcttgtgtgcaaggacagattttgcagggaaagttctgtttcttctttgatacctttgttctgtcccctgccccatccccagcactcatgatcttgaagcccctatcacactctagttcagtcctgtgaaccatgtcctgagggccttgcagggaagtaggaaatagaaactcctccacaaagagccgaggatcagagaagacccctgagatgaatcagggccctgccctgcccaccaactcttttctagcaatcatgtcctgcccaggctgcaggcttcattaggctcctgctgtcctccatgatgtgactagcacaaggtgtatatatgttttgtacctctgccgatggctgtacatagtgtatgaaagttatttaagccccatgttgtacatttctgttcctagattggatgtgtgtgttctaagaagttgtcataaataaaacctgaatgaccaa

SEQ ID NO: 146727 - DNA, 5389 bp, Homo sapiens
  Payload ID: 9027
  Gene Symbol: KIF21B
  Gene Name: kinesin family member 21B
  Uniprot ID: O75037
  ENST ID: ENST00000360529
  CDS Start-End: 26-4858
gcccagaccctagctccagagggccatggccggccagggggactgctgcgtcaaggtggccgtcaggatccggccccagctgtcgaaggagaagattgagggctgtcacatctgtacctctgttaccccgggagagccccaggtcctgctggggaaggacaaggccttcacctatgactttgtcttcgacctggacacctggcaagaacagatctattccacctgtgtgagcaagctcatcgagggctgcttcgagggctataatgccacggtgctggcctatgggcagacgggggccgggaagacgtacaccatgggcactggctttgacatggcaacgtcggaggaggagcagggcatcatcccgagggccatcgcacacctctttgggggcattgccgagcgcaagcgccgggcacaggagcagggcgtggctggacctgagttcaaagtcagcgcccagtttctggagctctacaacgaggagatccttgacctgtttgacagcacccgtgaccctgacacccgccaccgcaggtccaacatcaagatccacgaggacgcaaacggtggcatctacaccactggcgtcacttctcgcctcatccactcccaggaggagctgatccagtgcctgaagcagggggccctgtcccgcaccacagccagcacccagatgaacgtgcagagctcacgctcccacgccatcttcaccatccacctgtgccagatgcgcatgtgcacccagcccgacctggtgaatgaggcggtgactgggcttcctgatggtacacctccctcgagtgagtatgagacactcactgctaagtttcactttgtggacctggccggctcagagcggctgaagcggacaggggctactggcgagcgggccaaggagggcatctccatcaactgtggcctgctggccttgggcaatgtgatcagcgccttaggggaccagagcaagaaggtggtgcacgttccctacagggactccaagctcactcggctcctccaggattcgctggggggcaacagccagaccatcatgatcgcctgtgtgagcccctcagaccgagatttcatggagaccctcaacacactcaaatatgccaatcgggcccgcaacatcaagaacaaggtggtagtgaaccaggacaagaccagccagcaaatcagtgcactgcgggctgagattgctcggctgcagatggagctgatggagtataaggcgggcaagcgagtgataggagaggatggcgctgagggctatagtgatctgttccgagagaatgccatgctacagaaggagaatggggccctgcggctgcgggtgaaagccatgcaggaggccatcgatgccatcaacaaccgcgtcacccagctcatgagccaggaggccaacctgctgctagccaaggccggcgatggcaatgaggccattggtgcgctgatccagaactacatccgggagatcgaggagctacggactaagcttctagagagtgaagccatgaacgagtccctgcgccgcagcctctcacgggcctcggctaggagcccctactccctgggtgcttctccagccgccccggccttcgggggcagccctgccagctccatggaggatgcctcggaggtgatccgcagggccaagcaggacctggagcggctaaagaagaaggaggtcaggcagcggaggaagagccccgagaaggaagccttcaaaaagagggcaaaactccaacaggagaacagcgaggagacggatgagaacgaggcggaggaggaggaggaagagcgagacgagagtggctgtgaggaggaggaagggcgcgaggatgaagatgaggactcgggcagtgaagagagcctggtggactcagactcagaccccgaggagaaggaggtgaacttccaggcggacctggccgacctgacttgtgagatcgaaatcaagcagaagctgatcgacgagctggagaacagccagcggcggttgcagacgctcaagcaccagtatgaggaaaagctgattctgctgcagaacaagatccgagacacacagctggagcgcgaccgtgtgctgcagaacctcagcaccatggagtgctatactgaggagaaggccaacaagatcaaggcagactatgagaagaggctgcgggagatgaaccgggacctgcagaagctgcaggccgcccagaaagagcacgcccggctgcttaagaaccagtcgcgctacgagagggagctgaagaagctacaggccgaggtggctgagatgaagaaggccaaggtggccctgatgaagcagatgcgtgaggagcaacagcggcggcggctagtggagaccaagaggaaccgggagatcgcacagctcaagaaggagcagcggcgacaggagtttcagatccgagctctggagtcccagaagcggcagcaggagatggtcctgaggaggaagacccaggaggtttctgcactgaggcgcctggccaagcccatgtctgagcgggtggcagggcgtgcaggactaaagccacccatgctggactctggggctgaggtgtcggccagcactacctcatctgaggctgaatcaggggcccgctctgtctccagcatcgtgcgccagtggaaccgcaaaatcaaccacttcttgggggaccatcctgcgcccactgtcaatggcacccgtcctgcccgaaagaagttccagaagaagggggccagccagagcttcagtaaggcggcaaggctcaagtggcagtccctggagcgacggatcattgacatcgtcatgcagagaatgaccattgtcaacctggaggctgacatggagcggctcatcaagaaaagggaggagctgttcctcctgcaggaggcactgcggaggaagcgggagcggctgcaggctgagagccccgaggaagagaaggggctgcaggagctggctgaggagatcgaggtgctggcagccaacattgactacatcaatgacggcatcaccgactgccaggccaccatcgtgcagctggaggagaccaaggaggagctggactccacagacacatccgtggtcatcagctcctgctccctggctgaagcccgcctcctgctagacaacttcctcaaggcatccattgacaaggggctgcaagtggcacaaaaggaagcccagatccggctgttggagggccgactgaggcagacggatatggcaggctcctcccagaaccatctgctcctggacgccctgcgtgagaaggctgaagctcaccccgagctgcaggccctcatctacaatgtgcagcaggagaatggctacgccagcacagatgaggagatctcagagttctctgagggcagcttctcccagtcattcaccatgaaaggctccaccagccatgacgatttcaagttcaagagcgagcccaaactgtctgcccaaatgaaagctgtgtcggctgagtgcctgggccccccactggatatctccaccaagaacatcaccaagtccctggcctccctcgttgagatcaaagaggacggagtgggcttctctgtccgagacccctattaccgggacagggtctcgcgcaccgtcagtctgcctacccggggcagcactttccctaggcaatctcgagccacagagacgtccccgctgacgagaaggaagtcctacgaccgagggcagcccattaggtccacagatgtgggattcacacccccatcatcccctcccactcggccccgcaatgaccgcaatgtcttctctcgtctcaccagtaatcagagccaggggtcagcgctggacaagggcatcatctccccggttggaggagccaagggtgcacggacggccccactgcagtgtgtctccatggccgaaggccacaccaagcccatcctctgcctggatgccacagatgagttgctattcacagggtccaaagaccgaagctgcaagatgtggaacttggttacgggacaggagatcgcagctctaaagggccaccccaacaacgtggtctccatcaagtactgcagccactcggggcttgtgttctccgtgtccacctcctacatcaaggtgtgggacatccgggactcagccaagtgcattcggactctcacgtcctcgggccaggtgatctcaggggatgcctgtgccgccacatccacccgtgccatcaccagtgctcagggcgagcatcagatcaaccagatcgccctcagcccttcgggcaccatgctgtacgccgcctcgggcaatgccgtccgcatctgggagcttagcaggttccagcctgtcggcaagctgactggccacatcggccctgtgatgtgcctgacggtcacccagacggccagccagcatgacctcgtggtgactggctccaaggaccactacgttaagatgttcgagctgggcgagtgtgtgacgggcaccatcggccccactcacaacttcgagcccccgcactacgatggcatcgagtgtctcgccatccagggagacatcctgttcagtggctcccgagataacggcatcaagaagtgggacctagaccagcaggagctcatccagcaaatccccaatgcgcacaaggactgggtgtgcgccctggccttcatcccgggccgccccatgctgctcagcgcctgccgtgcgggtgtcatcaaggtctggaacgtggacaacttcacacccatcggtgagatcaagggccacgacagtcccatcaatgccatctgcaccaatgccaagcatatcttcacagcctccagtgacctgacggtgaagttctggagtgtccggcggttaccccacagcggcccaccctaggagtgaggtcagagggatgcccccggaccctcgaccccagcagcctggacaccatggaagggaagctgtgacccggccgatggggccagctgctctggggacagagggcgtggccccctctcctgccctcctccctctcccttggccttcccacaggacactgttccctcatccctcccctgcctctcaggagcctctgggtgagagagaggctggggaggaaattaagctgtgaagccaaagggcattatcccttcttgttcccctcctggcagtcgtggccacattgtctcctgctgaaccggctctgcccctttctcaggcctttggcccagtggtggagccctgtggggaggtgcagcagcctggccccatcccacccttccgaggagctggcctccccgcttctcccagcccagcctctagagccactgcacctgcctctgagcccaaaaagataagtcctcaggtagctaaggaaaccaggtgtgggcggctgggccttgcagctaacccttaaccctctggcaa

SEQ ID NO: 146728 - DNA, 5519 bp, Homo sapiens
  Payload ID: 9027
  Gene Symbol: KIF21B
  Gene Name: kinesin family member 21B
  Uniprot ID: O75037
  ENST ID: ENST00000422435
  CDS Start-End: 318-5231
gggaggtggctgccgggtgggaggtgtgtgcgcgtgtgccgcgccgtagggagcggcgggtcgcgccgccggctgtcagctagctccgcgccgccgcccgatggcgcgaggaggcgcgcgggcccagccccggggggccggccgcgggtgagcccctcggcctgccgcccgcgagcatgtcacctccagccgccgccgccgcagcctccgccagccgcgcccgcgcccccgcctcccgcagccgcagccgctgcctcgggcattggcccccagacccccgcctctgatccacgcccagaccctagctccagagggccatggccggccagggggactgctgcgtcaaggtggccgtcaggatccggccccagctgtcgaaggagaagattgagggctgtcacatctgtacctctgttaccccgggagagccccaggtcctgctggggaaggacaaggccttcacctatgactttgtcttcgacctggacacctggcaagaacagatctattccacctgtgtgagcaagctcatcgagggctgcttcgagggctataatgccacggtgctggcctatgggcagacgggggccgggaagacgtacaccatgggcactggctttgacatggcaacgtcggaggaggagcagggcatcatcccgagggccatcgcacacctctttgggggcattgccgagcgcaagcgccgggcacaggagcagggcgtggctggacctgagttcaaagtcagcgcccagtttctggagctctacaacgaggagatccttgacctgtttgacagcacccgtgaccctgacacccgccaccgcaggtccaacatcaagatccacgaggacgcaaacggtggcatctacaccactggcgtcacttctcgcctcatccactcccaggaggagctgatccagtgcctgaagcagggggccctgtcccgcaccacagccagcacccagatgaacgtgcagagctcacgctcccacgccatcttcaccatccacctgtgccagatgcgcatgtgcacccagcccgacctggtgaatgaggcggtgactgggcttcctgatggtacacctccctcgagtgagtatgagacactcactgctaagtttcactttgtggacctggccggctcagagcggctgaagcggacaggggctactggcgagcgggccaaggagggcatctccatcaactgtggcctgctggccttgggcaatgtgatcagcgccttaggggaccagagcaagaaggtggtgcacgttccctacagggactccaagctcactcggctcctccaggattcgctggggggcaacagccagaccatcatgatcgcctgtgtgagcccctcagaccgagatttcatggagaccctcaacacactcaaatatgccaatcgggcccgcaacatcaagaacaaggtggtagtgaaccaggacaagaccagccagcaaatcagtgcactgcgggctgagattgctcggctgcagatggagctgatggagtataaggcgggcaagcgagtgataggagaggatggcgctgagggctatagtgatctgttccgagagaatgccatgctacagaaggagaatggggccctgcggctgcgggtgaaagccatgcaggaggccatcgatgccatcaacaaccgcgtcacccagctcatgagccaggaggccaacctgctgctagccaaggccggcgatggcaatgaggccattggtgcgctgatccagaactacatccgggagatcgaggagctacggactaagcttctagagagtgaagccatgaacgagtccctgcgccgcagcctctcacgggcctcggctaggagcccctactccctgggtgcttctccagccgccccggccttcgggggcagccctgccagctccatggaggatgcctcggaggtgatccgcagggccaagcaggacctggagcggctaaagaagaaggaggtcaggcagcggaggaagagccccgagaaggaagccttcaaaaagagggcaaaactccaacaggagaacagcgaggagacggatgagaacgaggcggaggaggaggaggaagagcgagacgagagtggctgtgaggaggaggaagggcgcgaggatgaagatgaggactcgggcagtgaagagagcctggtggactcagactcagaccccgaggagaaggaggtgaacttccaggcggacctggccgacctgacttgtgagatcgaaatcaagcagaagctgatcgacgagctggagaacagccagcggcggttgcagacgctcaagcaccagtatgaggaaaagctgattctgctgcagaacaagatccgagacacacagctggagcgcgaccgtgtgctgcagaacctcagcaccatggagtgctatactgaggagaaggccaacaagatcaaggcagactatgagaagaggctgcgggagatgaaccgggacctgcagaagctgcaggccgcccagaaagagcacgcccggctgcttaagaaccagtcgcgctacgagagggagctgaagaagctacaggccgaggtggctgagatgaagaaggccaaggtggccctgatgaagcagatgcgtgaggagcaacagcggcggcggctagtggagaccaagaggaaccgggagatcgcacagctcaagaaggagcagcggcgacaggagtttcagatccgagctctggagtcccagaagcggcagcaggagatggtcctgaggaggaagacccaggaggtttctgcactgaggcgcctggccaagcccatgtctgagcgggtggcagggcgtgcaggactaaagccacccatgctggactctggggctgaggtgtcggccagcactacctcatctgaggctgaatcaggggcccgctctgtctccagcatcgtgcgccagtggaaccgcaaaatcaaccacttcttgggggaccatcctgcgcccactgtcaatggcacccgtcctgcccgaaagaagttccagaagaagggggccagccagagcttcagtaaggcggcaaggctcaagtggcagtccctggagcgacggatcattgacatcgtcatgcagagaatgaccattgtcaacctggaggctgacatggagcggctcatcaagaaaagggaggagctgttcctcctgcaggaggcactgcggaggaagcgggagcggctgcaggctgagagccccgaggaagagaaggggctgcaggagctggctgaggagatcgaggtgctggcagccaacattgactacatcaatgacggcatcaccgactgccaggccaccatcgtgcagctggaggagaccaaggaggagctggactccacagacacatccgtggtcatcagctcctgctccctggctgaagcccgcctcctgctagacaacttcctcaaggcatccattgacaaggggctgcaagtggcacaaaaggaagcccagatccggctgttggagggccgactgaggcagacggatatggcaggctcctcccagaaccatctgctcctggacgccctgcgtgagaaggctgaagctcaccccgagctgcaggccctcatctacaatgtgcagcaggagaatggctacgccagcacagatgaggagatctcagagttctctgagggcagcttctcccagtcattcaccatgaaaggctccaccagccatgacgatttcaagttcaagagcgagcccaaactgtctgcccaaatgaaagctgtgtcggctgagtgcctgggccccccactggatatctccaccaagaacatcaccaagtccctggcctccctcgttgagatcaaagaggacggagtgggcttctctgtccgagacccctattaccgggacagggtctcgcgcaccgtcagtctgcctacccggggcagcactttccctaggcaatctcgagccacagagacgtccccgctgacgagaaggaagtcctacgaccgagggcagcccattaggtccacagatgtgggattcacacccccatcatcccctcccactcggccccgcaatgaccgcaatgtcttctctcgtctcaccagtaatcagagccaggggtcagcgctggacaagtctgatgacagcgactcctctttgtcggaggtcctgaggggcatcatctccccggttggaggagccaagggtgcacggacggccccactgcagtgtgtctccatggccgaaggccacaccaagcccatcctctgcctggatgccacagatgagttgctattcacagggtccaaagaccgaagctgcaagatgtggaacttggttacgggacaggagatcgcagctctaaagggccaccccaacaacgtggtctccatcaagtactgcagccactcggggcttgtgttctccgtgtccacctcctacatcaaggtgtgggacatccgggactcagccaagtgcattcggactctcacgtcctcgggccaggtgatctcaggggatgcctgtgccgccacatccacccgtgccatcaccagtgctcagggcgagcatcagatcaaccagatcgccctcagcccttcgggcaccatgctgtacgccgcctcgggcaatgccgtccgcatctgggagcttagcaggttccagcctgtcggcaagctgactggccacatcggccctgtgatgtgcctgacggtcacccagacggccagccagcatgacctcgtggtgactggctccaaggaccactacgttaagatgttcgagctgggcgagtgtgtgacgggcaccatcggccccactcacaacttcgagcccccgcactacgatggcatcgagtgtctcgccatccagggagacatcctgttcagtggctcccgagataacggcatcaagaagtgggacctagaccagcaggagctcatccagcaaatccccaatgcgcacaaggactgggtgtgcgccctggccttcatcccgggccgccccatgctgctcagcgcctgccgtgcgggtgtcatcaaggtctggaacgtggacaacttcacacccatcggtgagatcaagggccacgacagtcccatcaatgccatctgcaccaatgccaagcatatcttcacagcctccagtgactgccgggtaaagttgtggaattacgtccctggactcaccccctgccttcctcgccgagtcctggccataaagggccgcgccaccaccctgccctgaccctccccaactctccctgtctcctctttcattcttcccctctttccttttccctctctttccccacttcgatctgagctgcttcttaacggtatgagattattttactccttcttcttcctttcccttcctgtcctgcctggcctagagaggtgccctgcctgtccctcctgcacccaccgtccttttccaagcatgaacagtgggacaggccccaggagatgggtgccagggagcagaagggggagccttcaggcctggacaaaacgaaacacccccccaaaaaaa

SEQ ID NO: 146729 - DNA, 5428 bp, Homo sapiens
  Payload ID: 9027
  Gene Symbol: KIF21B
  Gene Name: kinesin family member 21B
  Uniprot ID: O75037
  ENST ID: ENST00000461742
  CDS Start-End: 26-4897
gcccagaccctagctccagagggccatggccggccagggggactgctgcgtcaaggtggccgtcaggatccggccccagctgtcgaaggagaagattgagggctgtcacatctgtacctctgttaccccgggagagccccaggtcctgctggggaaggacaaggccttcacctatgactttgtcttcgacctggacacctggcaagaacagatctattccacctgtgtgagcaagctcatcgagggctgcttcgagggctataatgccacggtgctggcctatgggcagacgggggccgggaagacgtacaccatgggcactggctttgacatggcaacgtcggaggaggagcagggcatcatcccgagggccatcgcacacctctttgggggcattgccgagcgcaagcgccgggcacaggagcagggcgtggctggacctgagttcaaagtcagcgcccagtttctggagctctacaacgaggagatccttgacctgtttgacagcacccgtgaccctgacacccgccaccgcaggtccaacatcaagatccacgaggacgcaaacggtggcatctacaccactggcgtcacttctcgcctcatccactcccaggaggagctgatccagtgcctgaagcagggggccctgtcccgcaccacagccagcacccagatgaacgtgcagagctcacgctcccacgccatcttcaccatccacctgtgccagatgcgcatgtgcacccagcccgacctggtgaatgaggcggtgactgggcttcctgatggtacacctccctcgagtgagtatgagacactcactgctaagtttcactttgtggacctggccggctcagagcggctgaagcggacaggggctactggcgagcgggccaaggagggcatctccatcaactgtggcctgctggccttgggcaatgtgatcagcgccttaggggaccagagcaagaaggtggtgcacgttccctacagggactccaagctcactcggctcctccaggattcgctggggggcaacagccagaccatcatgatcgcctgtgtgagcccctcagaccgagatttcatggagaccctcaacacactcaaatatgccaatcgggcccgcaacatcaagaacaaggtggtagtgaaccaggacaagaccagccagcaaatcagtgcactgcgggctgagattgctcggctgcagatggagctgatggagtataaggcgggcaagcgagtgataggagaggatggcgctgagggctatagtgatctgttccgagagaatgccatgctacagaaggagaatggggccctgcggctgcgggtgaaagccatgcaggaggccatcgatgccatcaacaaccgcgtcacccagctcatgagccaggaggccaacctgctgctagccaaggccggcgatggcaatgaggccattggtgcgctgatccagaactacatccgggagatcgaggagctacggactaagcttctagagagtgaagccatgaacgagtccctgcgccgcagcctctcacgggcctcggctaggagcccctactccctgggtgcttctccagccgccccggccttcgggggcagccctgccagctccatggaggatgcctcggaggtgatccgcagggccaagcaggacctggagcggctaaagaagaaggaggtcaggcagcggaggaagagccccgagaaggaagccttcaaaaagagggcaaaactccaacaggagaacagcgaggagacggatgagaacgaggcggaggaggaggaggaagagcgagacgagagtggctgtgaggaggaggaagggcgcgaggatgaagatgaggactcgggcagtgaagagagcctggtggactcagactcagaccccgaggagaaggaggtgaacttccaggcggacctggccgacctgacttgtgagatcgaaatcaagcagaagctgatcgacgagctggagaacagccagcggcggttgcagacgctcaagcaccagtatgaggaaaagctgattctgctgcagaacaagatccgagacacacagctggagcgcgaccgtgtgctgcagaacctcagcaccatggagtgctatactgaggagaaggccaacaagatcaaggcagactatgagaagaggctgcgggagatgaaccgggacctgcagaagctgcaggccgcccagaaagagcacgcccggctgcttaagaaccagtcgcgctacgagagggagctgaagaagctacaggccgaggtggctgagatgaagaaggccaaggtggccctgatgaagcagatgcgtgaggagcaacagcggcggcggctagtggagaccaagaggaaccgggagatcgcacagctcaagaaggagcagcggcgacaggagtttcagatccgagctctggagtcccagaagcggcagcaggagatggtcctgaggaggaagacccaggaggtttctgcactgaggcgcctggccaagcccatgtctgagcgggtggcagggcgtgcaggactaaagccacccatgctggactctggggctgaggtgtcggccagcactacctcatctgaggctgaatcaggggcccgctctgtctccagcatcgtgcgccagtggaaccgcaaaatcaaccacttcttgggggaccatcctgcgcccactgtcaatggcacccgtcctgcccgaaagaagttccagaagaagggggccagccagagcttcagtaaggcggcaaggctcaagtggcagtccctggagcgacggatcattgacatcgtcatgcagagaatgaccattgtcaacctggaggctgacatggagcggctcatcaagaaaagggaggagctgttcctcctgcaggaggcactgcggaggaagcgggagcggctgcaggctgagagccccgaggaagagaaggggctgcaggagctggctgaggagatcgaggtgctggcagccaacattgactacatcaatgacggcatcaccgactgccaggccaccatcgtgcagctggaggagaccaaggaggagctggactccacagacacatccgtggtcatcagctcctgctccctggctgaagcccgcctcctgctagacaacttcctcaaggcatccattgacaaggggctgcaagtggcacaaaaggaagcccagatccggctgttggagggccgactgaggcagacggatatggcaggctcctcccagaaccatctgctcctggacgccctgcgtgagaaggctgaagctcaccccgagctgcaggccctcatctacaatgtgcagcaggagaatggctacgccagcacagatgaggagatctcagagttctctgagggcagcttctcccagtcattcaccatgaaaggctccaccagccatgacgatttcaagttcaagagcgagcccaaactgtctgcccaaatgaaagctgtgtcggctgagtgcctgggccccccactggatatctccaccaagaacatcaccaagtccctggcctccctcgttgagatcaaagaggacggagtgggcttctctgtccgagacccctattaccgggacagggtctcgcgcaccgtcagtctgcctacccggggcagcactttccctaggcaatctcgagccacagagacgtccccgctgacgagaaggaagtcctacgaccgagggcagcccattaggtccacagatgtgggattcacacccccatcatcccctcccactcggccccgcaatgaccgcaatgtcttctctcgtctcaccagtaatcagagccaggggtcagcgctggacaagtctgatgacagcgactcctctttgtcggaggtcctgaggggcatcatctccccggttggaggagccaagggtgcacggacggccccactgcagtgtgtctccatggccgaaggccacaccaagcccatcctctgcctggatgccacagatgagttgctattcacagggtccaaagaccgaagctgcaagatgtggaacttggttacgggacaggagatcgcagctctaaagggccaccccaacaacgtggtctccatcaagtactgcagccactcggggcttgtgttctccgtgtccacctcctacatcaaggtgtgggacatccgggactcagccaagtgcattcggactctcacgtcctcgggccaggtgatctcaggggatgcctgtgccgccacatccacccgtgccatcaccagtgctcagggcgagcatcagatcaaccagatcgccctcagcccttcgggcaccatgctgtacgccgcctcgggcaatgccgtccgcatctgggagcttagcaggttccagcctgtcggcaagctgactggccacatcggccctgtgatgtgcctgacggtcacccagacggccagccagcatgacctcgtggtgactggctccaaggaccactacgttaagatgttcgagctgggcgagtgtgtgacgggcaccatcggccccactcacaacttcgagcccccgcactacgatggcatcgagtgtctcgccatccagggagacatcctgttcagtggctcccgagataacggcatcaagaagtgggacctagaccagcaggagctcatccagcaaatccccaatgcgcacaaggactgggtgtgcgccctggccttcatcccgggccgccccatgctgctcagcgcctgccgtgcgggtgtcatcaaggtctggaacgtggacaacttcacacccatcggtgagatcaagggccacgacagtcccatcaatgccatctgcaccaatgccaagcatatcttcacagcctccagtgacctgacggtgaagttctggagtgtccggcggttaccccacagcggcccaccctaggagtgaggtcagagggatgcccccggaccctcgaccccagcagcctggacaccatggaagggaagctgtgacccggccgatggggccagctgctctggggacagagggcgtggccccctctcctgccctcctccctctcccttggccttcccacaggacactgttccctcatccctcccctgcctctcaggagcctctgggtgagagagaggctggggaggaaattaagctgtgaagccaaagggcattatcccttcttgttcccctcctggcagtcgtggccacattgtctcctgctgaaccggctctgcccctttctcaggcctttggcccagtggtggagccctgtggggaggtgcagcagcctggccccatcccacccttccgaggagctggcctccccgcttctcccagcccagcctctagagccactgcacctgcctctgagcccaaaaagataagtcctcaggtagctaaggaaaccaggtgtgggcggctgggccttgcagctaacccttaaccctctggcaa

SEQ ID NO: 146730 - DNA, 2113 bp, Homo sapiens
  Payload ID: 9028
  Gene Symbol: KIF22
  Gene Name: kinesin family member 22
  Uniprot ID: Q14807
  ENST ID: ENST00000160827
  CDS Start-End: 41-2038
ggaattcgaatgggagaggcgggcccaaggagggagtggaatggccgcgggcggctcgacgcagcagaggcgacgcgagatggcggcagcttcagcggcggcgatctcaggagctggtcgctgtcggctaagcaagattggagctactcgtcgtccacctccagctcgcgtaagggtggctgtgcgactgcggccatttgtggatggaacagcgggagcaagtgatcccccctgtgtgcggggcatggacagctgctctctagagattgctaactggaggaaccaccaggagactctcaaataccagtttgatgccttctatggggagaggagtactcagcaggacatctatgcaggttcagtgcagcccatcctaaggcacttgctggaagggcagaatgccagtgtgcttgcctatggacccacaggagctgggaagacgcacacaatgctgggcagcccagagcaacctggggtgatcccgcgggctctcatggacctcctgcagctcacaagggaggagggtgccgagggccggccatgggccctttctgtcaccatgtcttacctagagatctaccaggagaaggtattagacctcctggaccctgcttcgggagacctggtaatccgagaagactgccgggggaatatcctgattccgggtctctcccagaagcccatcagtagctttgctgattttgagcggcacttcctgccagccagtcgaaatcggactgtaggagccacccggctcaaccagcgctcctcccgcagtcatgctgtgctcctggtcaaggtggaccagcgggaacgtttggccccatttcgccagcgagagggaaaactctacctgattgacttggctgggtcagaggacaaccggcgcacaggcaacaagggccttcggctaaaagagagtggagccatcaacacctccctgtttgtcctgggcaaagtggtagatgcgctgaatcagggcctccctcgtgtaccttatcgggacagcaagctcactcgcctattgcaggactctctgggtggctcagcccacagtatccttattgccaacattgcccctgagagacgcttctacctagacacagtctccgcactcaactttgctgccaggtccaaggaggtgatcaatcggccttttaccaatgagagcctgcagcctcatgccttgggacctgttaagctgtctcagaaagaattgcttggtccaccagaggcaaagagagcccgaggccctgaggaagaggagatcgggagccctgagcccatggcagctccagcctctgcctcccagaaactcagccccctacagaagctaagcagcatggacccggccatgctggagcgcctcctcagcttggaccgtctgcttgcctcccaggggagccagggggcccctctgttgagtaccccaaagcgagagcggatggtgctaatgaagacagtggaagagaaggacctagagattgagaggcttaagacgaagcaaaaagaactggaggccaagatgttggcccagaaggctgaggaaaaggagaaccattgtcccacaatgctccggcccctttcacatcgcacagtcacaggggcaaagcccctgaaaaaggctgtggtgatgcccctacagctaattcaggagcaggcagcatccccaaatgccgagatccacatcctgaagaataaaggccggaagagaaagctggagtccctggatgccctagagcctgaggagaaggctgaggactgctgggagctacagatcagcccggagctactggctcatgggcgccaaaaaatactggatctgctgaacgaaggctcagcccgagatctccgcagtcttcagcgcattggcccgaagaaggcccagctaatcgtgggctggcgggagctccacggccccttcagccaggtggaggacctggaacgcgtggagggcataacggggaaacagatggagtccttcctgaaggcaaacatcctgggtctcgccgccggccagcgctgtggcgcctcctgaccgtcgtctcctcactccgccttttcaaatttttgtataaccccgtgttgtgtaaatacagtttttgctccggtg

SEQ ID NO: 146731 - DNA, 2493 bp, Homo sapiens
  Payload ID: 9028
  Gene Symbol: KIF22
  Gene Name: kinesin family member 22
  Uniprot ID: Q14807
  ENST ID: ENST00000400751
  CDS Start-End: 626-2419
gtgtggggtcgcgagccggtcgccccgcctggctcctgccttctccctgtttcctgctctccccttgggtcagtagactcgggtctccggtccaggctcttggcttgaaccccgcgcactttttctttgtgagcttcggtttcttcgtctgtgaaacgggggtcatggcctcatccctggagatcacctgaataagcaagagaagagtggcggacgctctagccacgaggacgagaagaagggagccggaggcgtgtattgggaagggttctgtgtgggacatggtgtttgggtgcagagacatccctgagagatgcaagaggacgggctgaggaacagacccggctgctgctgggtttgagttggcagcgtaagatgctctgcgattacaggaaaacgaaataaaagactaaaatttcctttcactctagcatggaagtgaatgctattttagggttggaaaggctgttaggacacccaaaatcttgtatgagctggtcgctgtcggctaagcaagattggagctactcgtcgtccacctccagctcgcgtaagggtggctgtgcgactgcggccatttgtggatggaacagcgggagcaagtgatcccccctgtgtgcggggcatggacagctgctctctagagattgctaactggaggaaccaccaggagactctcaaataccagtttgatgccttctatggggagaggagtactcagcaggacatctatgcaggttcagtgcagcccatcctaaggcacttgctggaagggcagaatgccagtgtgcttgcctatggacccacaggagctgggaagacgcacacaatgctgggcagcccagagcaacctggggtgatcccgcgggctctcatggacctcctgcagctcacaagggaggagggtgccgagggccggccatgggccctttctgtcaccatgtcttacctagagatctaccaggagaaggtattagacctcctggaccctgcttcgggagacctggtaatccgagaagactgccgggggaatatcctgattccgggtctctcccagaagcccatcagtagctttgctgattttgagcggcacttcctgccagccagtcgaaatcggactgtaggagccacccggctcaaccagcgctcctcccgcagtcatgctgtgctcctggtcaaggtggaccagcgggaacgtttggccccatttcgccagcgagagggaaaactctacctgattgacttggctgggtcagaggacaaccggcgcacaggcaacaagggccttcggctaaaagagagtggagccatcaacacctccctgtttgtcctgggcaaagtggtagatgcgctgaatcagggcctccctcgtgtaccttatcgggacagcaagctcactcgcctattgcaggactctctgggtggctcagcccacagtatccttattgccaacattgcccctgagagacgcttctacctagacacagtctccgcactcaactttgctgccaggtccaaggaggtgatcaatcggccttttaccaatgagagcctgcagcctcatgccttgggacctgttaagctgtctcagaaagaattgcttggtccaccagaggcaaagagagcccgaggccctgaggaagaggagatcgggagccctgagcccatggcagctccagcctctgcctcccagaaactcagccccctacagaagctaagcagcatggacccggccatgctggagcgcctcctcagcttggaccgtctgcttgcctcccaggggagccagggggcccctctgttgagtaccccaaagcgagagcggatggtgctaatgaagacagtggaagagaaggacctagagattgagaggcttaagacgaagcaaaaagaactggaggccaagatgttggcccagaaggctgaggaaaaggagaaccattgtcccacaatgctccggcccctttcacatcgcacagtcacaggggcaaagcccctgaaaaaggctgtggtgatgcccctacagctaattcaggagcaggcagcatccccaaatgccgagatccacatcctgaagaataaaggccggaagagaaagctggagtccctggatgccctagagcctgaggagaaggctgaggactgctgggagctacagatcagcccggagctactggctcatgggcgccaaaaaatactggatctgctgaacgaaggctcagcccgagatctccgcagtcttcagcgcattggcccgaagaaggcccagctaatcgtgggctggcgggagctccacggccccttcagccaggtggaggacctggaacgcgtggagggcataacggggaaacagatggagtccttcctgaaggcaaacatcctgggtctcgccgccggccagcgctgtggcgcctcctgaccgtcgtctcctcactccgccttttcaaatttttgtataaccccgtgttgtgtaaatacagtttttgctccggt

SEQ ID NO: 146732 - DNA, 2505 bp, Homo sapiens
  Payload ID: 9028
  Gene Symbol: KIF22
  Gene Name: kinesin family member 22
  Uniprot ID: Q14807
  ENST ID: ENST00000561482
  CDS Start-End: 638-2431
gggaattcgaatgggagaggcgggcccaaggagggagtggaatggccgcgggcggctcgacgcagcagaggcgacgcgagatggcggcagcttcagcggcggcgatctcaggtacttgagcccggcctgggcaaggcgggtaccgacgtctggagtttagtgggagttatgtgtcggagtgtggtccaggctctgcgggttgtcgcggagaggcggccatggcgcaggggcggggagagggggacggtgagagtgtggggtcgcgagccggtcgccccgcctggctcctgccttctccctgtttcctgctctccccttgggtcagtagactcgggtctccggtccaggctcttggcttgaaccccgcgcactttttctttgtgagcttcggtttcttcgtctgtgaaacgggggtcatggcctcatccctggagatcacctgaataagcaagagaagagtggcggacgctctagccacgaggacgagaagaagggagccggaggagctggtcgctgtcggctaagcaagattggagctactcgtcgtccacctccagctcgcgtaagggtggctgtgcgactgcggccatttgtggatggaacagcgggagcaagtgatcccccctgtgtgcggggcatggacagctgctctctagagattgctaactggaggaaccaccaggagactctcaaataccagtttgatgccttctatggggagaggagtactcagcaggacatctatgcaggttcagtgcagcccatcctaaggcacttgctggaagggcagaatgccagtgtgcttgcctatggacccacaggagctgggaagacgcacacaatgctgggcagcccagagcaacctggggtgatcccgcgggctctcatggacctcctgcagctcacaagggaggagggtgccgagggccggccatgggccctttctgtcaccatgtcttacctagagatctaccaggagaaggtattagacctcctggaccctgcttcgggagacctggtaatccgagaagactgccgggggaatatcctgattccgggtctctcccagaagcccatcagtagctttgctgattttgagcggcacttcctgccagccagtcgaaatcggactgtaggagccacccggctcaaccagcgctcctcccgcagtcatgctgtgctcctggtcaaggtggaccagcgggaacgtttggccccatttcgccagcgagagggaaaactctacctgattgacttggctgggtcagaggacaaccggcgcacaggcaacaagggccttcggctaaaagagagtggagccatcaacacctccctgtttgtcctgggcaaagtggtagatgcgctgaatcagggcctccctcgtgtaccttatcgggacagcaagctcactcgcctattgcaggactctctgggtggctcagcccacagtatccttattgccaacattgcccctgagagacgcttctacctagacacagtctccgcactcaactttgctgccaggtccaaggaggtgatcaatcggccttttaccaatgagagcctgcagcctcatgccttgggacctgttaagctgtctcagaaagaattgcttggtccaccagaggcaaagagagcccgaggccctgaggaagaggagatcgggagccctgagcccatggcagctccagcctctgcctcccagaaactcagccccctacagaagctaagcagcatggacccggccatgctggagcgcctcctcagcttggaccgtctgcttgcctcccaggggagccagggggcccctctgttgagtaccccaaagcgagagcggatggtgctaatgaagacagtggaagagaaggacctagagattgagaggcttaagacgaagcaaaaagaactggaggccaagatgttggcccagaaggctgaggaaaaggagaaccattgtcccacaatgctccggcccctttcacatcgcacagtcacaggggcaaagcccctgaaaaaggctgtggtgatgcccctacagctaattcaggagcaggcagcatccccaaatgccgagatccacatcctgaagaataaaggccggaagagaaagctggagtccctggatgccctagagcctgaggagaaggctgaggactgctgggagctacagatcagcccggagctactggctcatgggcgccaaaaaatactggatctgctgaacgaaggctcagcccgagatctccgcagtcttcagcgcattggcccgaagaaggcccagctaatcgtgggctggcgggagctccacggccccttcagccaggtggaggacctggaacgcgtggagggcataacggggaaacagatggagtccttcctgaaggcaaacatcctgggtctcgccgccggccagcgctgtggcgcctcctgaccgtcgtctcctcactccgccttttcaaatttttgtataaccccgtgttgtgtaaatacagtttttgctccggt

SEQ ID NO: 146733 - DNA, 562 bp, Homo sapiens
  Payload ID: 9028
  Gene Symbol: KIF22
  Gene Name: kinesin family member 22
  ENST ID: ENST00000570173
  CDS Start-End: 7-276
agtggaatggccgcgggcggctcgacgcagcagaggcgacgcgagatggcggcagcttcagcggcggcgatctcaggagctggtcgctgtcggctaagcaagattggagctactcgtcgtccacctccagctcgcgtaagggtggctgtgcgactgcggccatttgtggatggaacagcgggagcaagtgatcccccctgtgtgcggggcatggacagctgctctctagagattgctaactggaggaaccaccaggagactctcaaataccagtaaggtttgatgccttctatggggagaggagtactcagcaggacatctatgcaggttcagtgcagcccatcctaaggcacttgctggaagggcagaatgccagtgtgcttgcctatggacccacaggagctgggaagacgcacacaatgctgggcagcccagagcaacctggggtgatcccgcgggctctcatggacctcctgcagctcacaagggaggagggtgccgagggccggccatgggccctttctgtcaccatgtcttacctagagatctaccaggagaaggt

SEQ ID NO: 146734 - DNA, 2020 bp, Homo sapiens
  Payload ID: 9028
  Gene Symbol: KIF22
  Gene Name: kinesin family member 22
  ENST ID: ENST00000569382
  CDS Start-End: 142-1977
cctccaggagctggtcgctgtcggctaagcaagattggagctactcgtcgtccacctccagctcgcgtaagggtggctgtgcgactgcggccatttgtggatggaacagcgggagcaagtgatcccccctgtgtgcggggcatggacagctgctctctagagattgctaactggaggaaccaccaggagactctcaaataccagtttgatgccttctatggggagaggagtactcagcaggacatctatgcaggttcagtgcagcccatcctaaggcacttgctggaagggcagaatgccagtgtgcttgcctatggacccacaggagctgggaagacgcacacaatgctgggcagcccagagcaacctggggtgatcccgcgggctctcatggacctcctgcagctcacaagggaggagggtgccgagggccggccatgggccctttctgtcaccatgtcttacctagagatctaccaggagaaggtattagacctcctggaccctgcttcgggagacctggtaatccgagaagactgccgggggaatatcctgattccgggtctctcccagaagcccatcagtagctttgctgattttgagcggcacttcctgccagccagtcgaaatcggactgtaggagccacccggctcaaccagcgctcctcccgcagtcatgctgtgctcctggtcaaggtggaccagcgggaacgtttggccccatttcgccagcgagagggaaaactctacctgattgacttggctgggtcagaggacaaccggcgcacaggcaacaagggccttcggctaaaagagagtggagccatcaacacctccctgtttgtcctgggcaaagtggtagatgcgctgaatcagggcctccctcgtgtaccttatcgggacagcaagctcactcgcctattgcaggactctctgggtggctcagcccacagtatccttattgccaacattgcccctgagagacgcttctacctagacacagtctccgcactcaactttgctgccaggtccaaggaggtgatcaatcggccttttaccaatgagagcctgcagcctcatgccttgggacctgttaagctgtctcagaaagaattgcttggtccaccagaggcaaagagagcccgaggccctgaggaagaggagatcgggagccctgagcccatggcagctccagcctctgcctcccagaaactcagccccctacagaagctaagcagcatggacccggccatgctggagcgcctcctcagcttggaccgtctgcttgcctcccaggggagccagggggcccctctgttgagtaccccaaagcgagagcggatggtgctaatgaagacagtggaagagaaggacctagagattgagaggcttaagacgaagcaaaaagaactggaggccaagatgttggcccagaaggctgaggaaaaggagaaccattgtcccacaatgctccggcccctttcacatcgcacagtcacaggggcaaagcccctgaaaaaggctgtggtgatgcccctacagctaattcaggagcaggcagcatccccaaatgccgagatccacatcctgaagaataaaggccggaagagaaaggtgaaagtagctgggggcttaggctacacctggagcccagaactggagtccctggatgccctagagcctgaggagaaggctgaggactgctgggagctacagatcagcccggagctactggctcatgggcgccaaaaaatactggatctgctgaacgaaggctcagcccgagatctccgcagtcttcagcgcattggcccgaagaaggcccagctaatcgtgggctggcgggagctccacggccccttcagccaggtggaggacctggaacgcgtggagggcataacggggaaacagatggagtccttcctgaaggcaaacatcctgggtctcgccgccggccagcgctgtggcgcctcctgaccgtcgtctcctcactccgccttttcaaatttttgtataaccc

SEQ ID NO: 146735 - DNA, 834 bp, Homo sapiens
  Payload ID: 9028
  Gene Symbol: KIF22
  Gene Name: kinesin family member 22
  ENST ID: ENST00000569636
  CDS Start-End: 280-834
agaggcgggcccaaggagggagtggaatggccgcgggcggctcgacgcagcagaggcgacgcgagatggcggcagcttcagcggcggcgatctcagcaaatacttcttgagggcctactctgcgccaggtgttggggttagaaaggagctggtcgctgtcggctaagcaagattggagctactcgtcgtccacctccagctcgcgtaagggtggctgtgcgactgcggccatttgtggatggaacagcgggagcaagtgatcccccctgtgtgcggggcatggacagctgctctctagagattgctaactggaggaaccaccaggagactctcaaataccagtttgatgccttctatggggagaggagtactcagcaggacatctatgcaggttcagtgcagcccatcctaaggcacttgctggaagggcagaatgccagtgtgcttgcctatggacccacaggagctgggaagacgcacacaatgctgggcagcccagagcaacctggggtgatcccgcgggctctcatggacctcctgcagctcacaagggaggagggtgccgagggccggccatgggccctttctgtcaccatgtcttacctagagatctaccaggagaaggtattagacctcctggaccctgcttcgggagacctggtaatccgagaagactgccgggggaatatcctgattccgggtctctcccagaagcccatcagtagctttgctgattttgagcggcacttcctgccagccagtcgaaatcggactgtaggagccacccggctcaaccagcgctcctcccgcagtcatgctgtgctcctggtcaag

SEQ ID NO: 146736 - DNA, 781 bp, Homo sapiens
  Payload ID: 9028
  Gene Symbol: KIF22
  Gene Name: kinesin family member 22
  ENST ID: ENST00000568312
  CDS Start-End: 1-219
gctgaggaaaaggagaaccattgtcccacaatgctccggcccctttcacatcgcacagtcacaggggcaaagcccctgaaaaaggctgtggtgatgcccctacagctaattcaggagcaggcagcatccccaaatgccgagatccacatcctgaagaataaaggccggaagagaaagcaactccatgagaagggtgctaatattaccactgggtactgagtagtacctctctttcactagttgcataataagaattaacccagagagtgacctgagggcgggattttggacacacttgacaagagaggaagaggctggagcgcaggaggtagctggtgctgggctcctagtcttggcagaggagcccaaagcacttggctgccctgcgtgtcactcatctccctttgcctcccagctggagtccctggatgccctagagcctgaggagaaggctgaggactgctgggagctacagatcagcccggagctactggctcatgggcgccaaaaaatactggatctgctgaacgaaggctcagcccgagatctccgcagtcttcagcgcattggcccgaagaaggcccagctaatcgtgggctggcgggagctccacggccccttcagccaggtggaggacctggaacgcgtggagggcataacggggaaacagatggagtccttcctgaaggcaaacatcctgggtctcgccgccggccagcgctgtggcgcctcctgaccgtcgtctcctcactccgccttttcaaatttttgtataaccccg

SEQ ID NO: 146737 - DNA, 3713 bp, Homo sapiens
  Payload ID: 9029
  Gene Symbol: KIF23
  Gene Name: kinesin family member 23
  Uniprot ID: Q02241
  ENST ID: ENST00000260363
  CDS Start-End: 221-3103
ttccgcggaggtcctgcctctccctgcggacgggcgctgattggcccgtttgaaatgcgccaggcgggagctcacctgggctcttagcgtcgccgccggcttcgcagagcaccgcgccttagccgcgaagttctagttcttgctgccggtcctaacgtcccgcagtcttcgccagccagccgtcccgcatgcgcgtttgggcggcgtggagcctgctgccatgaagtcagcgagagctaagacaccccggaaacctaccgtgaaaaaagggtcccaaacgaaccttaaagacccagttggggtatactgtagggtgcgcccactgggctttcctgatcaagagtgttgcatagaagtgatcaataatacaactgttcagcttcatactcctgagggctacagactcaaccgaaatggagactataaggagactcagtattcatttaaacaagtatttggcactcacaccacccagaaggaactctttgatgttgtggctaatcccttggtcaatgacctcattcatggcaaaaatggtcttctttttacatatggtgtgacgggaagtggaaaaactcacacaatgactggttctccaggggaaggagggctgcttcctcgttgtttggacatgatctttaacagtatagggtcatttcaagctaaacgatatgttttcaaatctaatgataggaatagtatggatatacagtgtgaggttgatgccttattagaacgtcagaaaagagaagctatgcccaatccaaagacttcttctagcaaacgacaagtagatccagagtttgcagatatgataactgtacaagaattctgcaaagcagaagaggttgatgaagatagtgtctatggtgtatttgtctcttatattgaaatatataataattacatatatgatctattggaagaggtgccgtttgatcccataaaacccaaacctccacaatctaaattgcttcgtgaagataagaaccataacatgtatgttgcaggatgtacagaagttgaagtgaaatctactgaggaggcttttgaagttttctggagaggccagaaaaagagacgtattgctaatacccatttgaatcgtgagtccagccgttcccatagcgtgttcaacattaaattagttcaggctcccttggatgcagatggagacaatgtcttacaggaaaaagaacaaatcactataagtcagttgtccttggtagatcttgctggaagtgaaagaactaaccggaccagagcagaagggaacagattacgtgaagctggtaatattaatcagtcactaatgacgctaagaacatgtatggatgtcctaagagagaaccaaatgtatggaactaacaagatggttccatatcgagattcaaagttaacccatctgttcaagaactactttgatggggaaggaaaagtgcggatgatcgtgtgtgtgaaccccaaggctgaagattatgaagaaaacttgcaagtcatgagatttgcggaagtgactcaagaagttgaagtagcaagacctgtagacaaggcaatatgtggtttaacgcctgggaggagatacagaaaccagcctcgaggtccagttggaaatgaaccattggttactgacgtggttttgcagagttttccacctttgccatcatgcgaaattttggatatcaacgatgagcagacacttccaaggctgattgaagccttagagaaacgacataacttacgacaaatgatgattgatgagtttaacaaacaatctaatgcttttaaagctttgttacaagaatttgacaatgctgttttaagtaaagaaaaccacatgcaagggaaactaaatgaaaaggagaagatgatctcaggacagaaattggaaatagaacgactggaaaagaaaaacaaaactttagaatataagattgagattttagagaaaacaactactatctatgaggaagataaacgcaatttgcaacaggaacttgaaactcagaaccagaaacttcagcgacagttttctgacaaacgcagattagaagccaggttgcaaggcatggtgacagaaacgacaatgaagtgggagaaagaatgtgagcgtagagtggcagccaaacagctggagatgcagaataaactctgggttaaagatgaaaagctgaaacaactgaaggctattgttaccgaacctaaaactgagaagccagagagaccctctcgggagcgagatcgagaaaaagttactcaaagatctgtttctccatcacctgtgcctctttctagtaactatattgctcagatttccaacggccagcaactcatgagccagccacagctacataggcgctctaactcttgcagcagcatttctgtagcttcctgtatttcggaatgggagcagaaaattcctacgtacaacacacctctcaaagtcacatctattgcaaggcgtaggcagcaggagccaggacaaagcaaaacttgtatcgtgtcagacagaaggcgagggatgtactggactgaaggcagggaggtggttcctacattcagaaatgagatagaaatagaagaggatcattgcggcaggttactctttcaacctgatcagaacgcaccaccaattcgtctccgacacagacgatcacgctctgcaggagacagatgggtagatcataagcccgcctctaacatgcaaactgaaacagtcatgcagccacatgtccctcatgccatcacagtatctgttgcaaatgaaaaggcactagctaagtgtgagaagtacatgctgacccaccaggaactagcctccgatggggagattgaaactaaactaattaagggtgatatttataaaacaaggggtggtggacaatctgttcagtttactgatattgagactttaaagcaagaatcaccaaatggtagtcgaaaacgaagatcttccacagtagcacctgcccaaccagatggtgcagagtctgaatggaccgatgtagaaacaaggtgttctgtggctgtggagatgagagcaggatcccagctgggacctggatatcagcatcacgcacaacccaagcgcaaaaagccatgaactgacagtcccagtactgaaagaacattttcatttgtgtggatgatttctcgaaagccatgccagaagcagtcttccaggtcatcttgtagaactccagctttgttgaaaatcacggacctcagctacatcatacactgacccagagcaaagctttccctatggttccaaagacaactagtattcaacaaaccttgtatagtatatgttttgccatatttaatattaatagcagaggaagactccttttttcatcactgtatgaattttttataatgtttttttaaaatatatttcatgtatacttataaactaattcacacaagtgtttgtcttagatgattaaggaagactatatctagatcatgtctgattttttattgtgacttctccagccctggtctgaatttcttaaggttttataaacaaatgctgctatttattagctgcaagaatgcactttagaactatttgacaattcagactttcaaaataaagatgtaaatgactggccaataataaccattttaggaaggtgttttgaattctgtatgtatatattcactttctgacatttagatatgccaaaagaattaaaatcaaaagcact

SEQ ID NO: 146738 - DNA, 3351 bp, Homo sapiens
  Payload ID: 9029
  Gene Symbol: KIF23
  Gene Name: kinesin family member 23
  Uniprot ID: Q02241
  ENST ID: ENST00000352331
  CDS Start-End: 163-2733
gccaggcgggagctcacctgggctcttagcgtcgccgccggcttcgcagagcaccgcgccttagccgcgaagttctagttcttgctgccggtcctaacgtcccgcagtcttcgccagccagccgtcccgcatgcgcgtttgggcggcgtggagcctgctgccatgaagtcagcgagagctaagacaccccggaaacctaccgtgaaaaaagggtcccaaacgaaccttaaagacccagttggggtatactgtagggtgcgcccactgggctttcctgatcaagagtgttgcatagaagtgatcaataatacaactgttcagcttcatactcctgagggctacagactcaaccgaaatggagactataaggagactcagtattcatttaaacaagtatttggcactcacaccacccagaaggaactctttgatgttgtggctaatcccttggtcaatgacctcattcatggcaaaaatggtcttctttttacatatggtgtgacgggaagtggaaaaactcacacaatgactggttctccaggggaaggagggctgcttcctcgttgtttggacatgatctttaacagtatagggtcatttcaagctaaacgatatgttttcaaatctaatgataggaatagtatggatatacagtgtgaggttgatgccttattagaacgtcagaaaagagaagctatgcccaatccaaagacttcttctagcaaacgacaagtagatccagagtttgcagatatgataactgtacaagaattctgcaaagcagaagaggttgatgaagatagtgtctatggtgtatttgtctcttatattgaaatatataataattacatatatgatctattggaagaggtgccgtttgatcccataaaacccaaacctccacaatctaaattgcttcgtgaagataagaaccataacatgtatgttgcaggatgtacagaagttgaagtgaaatctactgaggaggcttttgaagttttctggagaggccagaaaaagagacgtattgctaatacccatttgaatcgtgagtccagccgttcccatagcgtgttcaacattaaattagttcaggctcccttggatgcagatggagacaatgtcttacaggaaaaagaacaaatcactataagtcagttgtccttggtagatcttgctggaagtgaaagaactaaccggaccagagcagaagggaacagattacgtgaagctggtaatattaatcagtcactaatgacgctaagaacatgtatggatgtcctaagagagaaccaaatgtatggaactaacaagatggttccatatcgagattcaaagttaacccatctgttcaagaactactttgatggggaaggaaaagtgcggatgatcgtgtgtgtgaaccccaaggctgaagattatgaagaaaacttgcaagtcatgagatttgcggaagtgactcaagaagttgaagtagcaagacctgtagacaaggcaatatgtggtttaacgcctgggaggagatacagaaaccagcctcgaggtccagttggaaatgaaccattggttactgacgtggttttgcagagttttccacctttgccatcatgcgaaattttggatatcaacgatgagcagacacttccaaggctgattgaagccttagagaaacgacataacttacgacaaatgatgattgatgagtttaacaaacaatctaatgcttttaaagctttgttacaagaatttgacaatgctgttttaagtaaagaaaaccacatgcaagggaaactaaatgaaaaggagaagatgatctcaggacagaaattggaaatagaacgactggaaaagaaaaacaaaactttagaatataagattgagattttagagaaaacaactactatctatgaggaagataaacgcaatttgcaacaggaacttgaaactcagaaccagaaacttcagcgacagttttctgacaaacgcagattagaagccaggttgcaaggcatggtgacagaaacgacaatgaagtgggagaaagaatgtgagcgtagagtggcagccaaacagctggagatgcagaataaactctgggttaaagatgaaaagctgaaacaactgaaggctattgttaccgaacctaaaactgagaagccagagagaccctctcgggagcgagatcgagaaaaagttactcaaagatctgtttctccatcacctgtgcctttactctttcaacctgatcagaacgcaccaccaattcgtctccgacacagacgatcacgctctgcaggagacagatgggtagatcataagcccgcctctaacatgcaaactgaaacagtcatgcagccacatgtccctcatgccatcacagtatctgttgcaaatgaaaaggcactagctaagtgtgagaagtacatgctgacccaccaggaactagcctccgatggggagattgaaactaaactaattaagggtgatatttataaaacaaggggtggtggacaatctgttcagtttactgatattgagactttaaagcaagaatcaccaaatggtagtcgaaaacgaagatcttccacagtagcacctgcccaaccagatggtgcagagtctgaatggaccgatgtagaaacaaggtgttctgtggctgtggagatgagagcaggatcccagctgggacctggatatcagcatcacgcacaacccaagcgcaaaaagccatgaactgacagtcccagtactgaaagaacattttcatttgtgtggatgatttctcgaaagccatgccagaagcagtcttccaggtcatcttgtagaactccagctttgttgaaaatcacggacctcagctacatcatacactgacccagagcaaagctttccctatggttccaaagacaactagtattcaacaaaccttgtatagtatatgttttgccatatttaatattaatagcagaggaagactccttttttcatcactgtatgaattttttataatgtttttttaaaatatatttcatgtatacttataaactaattcacacaagtgtttgtcttagatgattaaggaagactatatctagatcatgtctgattttttattgtgacttctccagccctggtctgaatttcttaaggttttataaacaaatgctgctatttattagctgcaagaatgcactttagaactatttgacaattcagactttcaaaataaagatgtaaatgactggccaataataaccattttaggaaggtgttttgaattctgtatgtatatattcactttctgacatttagatatgccaaaagaattaaaatcaaaagcactaagaaata

SEQ ID NO: 146739 - DNA, 3357 bp, Homo sapiens
  Payload ID: 9029
  Gene Symbol: KIF23
  Gene Name: kinesin family member 23
  ENST ID: ENST00000395392
  CDS Start-End: 174-3032
gtttgaaatgcgccaggcgggagctcacctgggctcttagcgtcgccgccggcttcgcagagcaccgcgccttagccgcgaagttctagttcttgctgccggtcctaacgtcccgcagtcttcgccagccagccgtcccgcatgcgcgtttgggcggcgtggagcctgctgccatgaagtcagcgagagctaagacaccccggaaacctaccgtgaaaaaagggtcccaaacgaaccttaaagacccagttggggtatactgtagggtgcgcccactgggctttcctgatcaagagtgttgcatagaagtgatcaataatacaactgttcagcttcatactcctgagggctacagactcaaccgaaatggagactataaggagactcagtattcatttaaacaagtatttggcactcacaccacccagaaggaactctttgatgttgtggctaatcccttggtcaatgacctcattcatggcaaaaatggtcttctttttacatatggtgtgacgggaagtggaaaaactcacacaatgactggttctccaggggaaggagggctgcttcctcgttgtttggacatgatctttaacagtatagggtcatttcaagctaaacgatatgttttcaaatctaatgataggaatagtatggatatacagtgtgaggttgatgccttattagaacgtcagaaaagagaagctatgcccaatccaaagacttcttctagcaaacgacaagtagatccagagtttgcagatatgataactgtacaagaattctgcaaagcagaagaggttgatgaagatagtgtctatggtgtatttgtctcttatattgaaatatataataattacatatatgatctattggaagaggtgccgtttgatcccataaaacccaaacctccacaatctaaattgcttcgtgaagataagaaccataacatgtatgttgcaggatgtacagaagttgaagtgaaatctactgaggaggcttttgaagttttctggagaggccagaaaaagagacgtattgctaatacccatttgaatcgtgagtccagccgttcccatagcgtgttcaacattaaattagttcaggctcccttggatgcagatggagacaatgtcttacaggaaaaagaacaaatcactataagtcagttgtccttggtagatcttgctggaagtgaaagaactaaccggaccagagcagaagggaacagattacgtgaagctggtaatattaatcagtcactaatgacgctaagaacatgtatggatgtcctaagagagaaccaaatgtatggaactaacaagatggttccatatcgagattcaaagttaacccatctgttcaagaactactttgatggggaaggaaaagtgcggatgatcgtgtgtgtgaaccccaaggctgaagattatgaagaaaacttgcaagtcatgagatttgcggaagtgactcaagaagttgaagtagcaagacctgtagacaaggcaatatgtggtttaacgcctgggaggagatacagaaaccagcctcgaggtccagttggaaatgaaccattggttactgacgtggttttgcagagttttccacctttgccatcatgcgaaattttggatatcaacgatgagcagacacttccaaggctgattgaagccttagagaaacgacataacttacgacaaatgatgattgatgagtttaacaaacaatctaatgcttttaaagctttgttacaagaatttgacaatgctgttttaagtaaagaaaaccacatgcaagggaaactaaatgaaaaggagaagatgatctcaggacagaaattggaaatagaacgactggaaaagaaaaacaaaactttagaatataagattgagattttagagaaaacaactactatctatgaggaagataaacgcaatttgcaacaggaacttgaaactcagaaccagaaacttcagcgacagttttctgacaaacgcagattagaagccaggttgcaaggcatggtgacagaaacgacaatgaagtgggagaaagaatgtgagcgtagagtggcagccaaacagctggagatgcagaataaactctgggttaaagatgaaaagctgaaacaactgaaggctattgttaccgaacctaaaactgagaagccagagagaccctctcgggagcgagatcgagaaaaagttactcaaagatctgtttctccatcacctgtgcctctttctagtaactatattgctcagatttccaacggccagcaactcatgagccagccacagctacataggcgctctaactcttgcagcagcatttctgtagcttcctgtatttcggaatgggagcagaaaattcctacgtacaacacacctctcaaagtcacatctattgcaaggcgtaggcagcaggagccaggacaaagcaaaacttgtatcgtgtcagacagaaggcgagggatgtactggactgaaggcagggaggtggttcctacattcagaaatgagatagaaatagaagaggatcattgcggcaggaacgcaccaccaattcgtctccgacacagacgatcacgctctgcaggagacagatgggtagatcataagcccgcctctaacatgcaaactgaaacagtcatgcagccacatgtccctcatgccatcacagtatctgttgcaaatgaaaaggcactagctaagtgtgagaagtacatgctgacccaccaggaactagcctccgatggggagattgaaactaaactaattaagggtgatatttataaaacaaggggtggtggacaatctgttcagtttactgatattgagactttaaagcaagaatcaccaaatggtcgaaaacgaagatcttccacagtagcacctgcccaaccagatggtgcagagtctgaatggaccgatgtagaaacaaggtgttctgtggctgtggagatgagagcaggatcccagctgggacctggatatcagcatcacgcacaacccaagcgcaaaaagccatgaactgacagtcccagtactgaaagaacattttcatttgtgtggatgatttctcgaaagccatgccagaagcagtcttccaggtcatcttgtagaactccagctttgttgaaaatcacggacctcagctacatcatacactgacccagagcaaagctttccctatggttccaaagacaactagtattcaacaaaccttgtatagtatatgttttgccatatttaatattaatagcagaggaagactccttttttcatcactgtatgaattttttataatgtttttttaaaatatatttcatgtatacttataaactaattcacacaa

SEQ ID NO: 146740 - DNA, 1081 bp, Homo sapiens
  Payload ID: 9029
  Gene Symbol: KIF23
  Gene Name: kinesin family member 23
  ENST ID: ENST00000559283
  CDS Start-End: 279-1081
tcctgcctcagcccccctagtagctgggattagaggcacacgccaccatgcccggctaatttgtatttttagtagagacggggtttcaccatgttggccaggctggtcttgagttcctgatctcaggtgatccgcctgcctcggcctcccaaagtgctgggattatagctgtgagccaccatgcccggctgggatcatttacttttaaaatggacttataacgtatacaattgaacttttctttttttagacgacaagtagatccagagtttgcagatatgataactgtacaagaattctgcaaagcagaagaggttgatgaagatagtgtctatggtgtatttgtctcttatattgaaatatataataattacatatatgatctattggaagaggtgccgtttgatcccataaaacccaaacctccacaatctaaattgcttcgtgaagataagaaccataacatgtatgttgcaggatgtacagaagttgaagtgaaatctactgaggaggcttttgaagttttctggagaggccagaaaaagagacgtattgctaatacccatttgaatcgtgagtccagccgttcccatagcgtgttcaacattaaattagttcaggctcccttggatgcagatggagacaatgtcttacaggaaaaagaacaaatcactataagtcagttgtccttggtagatcttgctggaagtgaaagaactaaccggaccagagcagaagggaacagattacgtgaagctggtaatattaatcagtcactaatgacgctaagaacatgtatggatgtcctaagagagaaccaaatgtatggaactaacaagatggttccatatcgagattcaaagttaacccatctgttcaagaactactttgatggggaaggaaaagtgcggatgatcgtgtgtgtgaaccccaaggctgaagattatgaagaaaacttggtaattttaatatttgcggaagtgactcaagaagttgaagtagcaagacctgtagacaaggcaatatgtggtttaacgcctgggaggagatacagaaaccagcctcgaggtccagttggaaa

SEQ ID NO: 146741 - DNA, 2296 bp, Homo sapiens
  Payload ID: 9029
  Gene Symbol: KIF23
  Gene Name: kinesin family member 23
  Uniprot ID: Q02241
  ENST ID: ENST00000558585
  CDS Start-End: 164-2185
aaacgatcctcctgcctcagcccccctagtagctgggattagaggcacacgccaccatgcccggctaatttgtatttttagtagagacggggtttcaccatgttggccaggctggtcttgagttcctgatctcagacgacaagtagatccagagtttgcagatatgataactgtacaagaattctgcaaagcagaagaggttgatgaagatagtgtctatggtgtatttgtctcttatattgaaatatataataattacatatatgatctattggaagaggtgccgtttgatcccataaaacccaagtggaacagttgcagcacacccatgaggaacacagattttgtacctccacaatctaaattgcttcgtgaagataagaaccataacatgtatgttgcaggatgtacagaagttgaagtgaaatctactgaggaggcttttgaagttttctggagaggccagaaaaagagacgtattgctaatacccatttgaatcgtgagtccagccgttcccatagcgtgttcaacattaaattagttcaggctcccttggatgcagatggagacaatgtcttacaggaaaaagaacaaatcactataagtcagttgtccttggtagatcttgctggaagtgaaagaactaaccggaccagagcagaagggaacagattacgtgaagctggtaatattaatcagtcactaatgacgctaagaacatgtatggatgtcctaagagagaaccaaatgtatggaactaacaagatggttccatatcgagattcaaagttaacccatctgttcaagaactactttgatggggaaggaaaagtgcggatgatcgtgtgtgtgaaccccaaggctgaagattatgaagaaaacttgcaagtcatgagatttgcggaagtgactcaagaagttgaagtagcaagacctgtagacaaggcaatatgtggtttaacgcctgggaggagatacagaaaccagcctcgaggtccagttggaaatgaaccattggttactgacgtggttttgcagagttttccacctttgccatcatgcgaaattttggatatcaacgatgagcagacacttccaaggctgattgaagccttagagaaacgacataacttacgacaaatgatgattgatgagtttaacaaacaatctaatgcttttaaagctttgttacaagaatttgacaatgctgttttaagtaaagaaaaccacatgcaagggaaactaaatgaaaaggagaagatgatctcaggacagaaattggaaatagaacgactggaaaagaaaaacaaaactttagaatataagattgagattttagagaaaacaactactatctatgaggaagataaacgcaatttgcaacaggaacttgaaactcagaaccagaaacttcagcgacagttttctgacaaacgcagattagaagccaggttgcaaggcatggtgacagaaacgacaatgaagtgggagaaagaatgtgagcgtagagtggcagccaaacagctggagatgcagaataaactctgggttaaagatgaaaagctgaaacaactgaaggctattgttaccgaacctaaaactgagaagccagagagaccctctcgggagcgagatcgagaaaaagttactcaaagatctgtttctccatcacctgtgcctttactctttcaacctgatcagaacgcaccaccaattcgtctccgacacagacgatcacgctctgcaggagacagatgggtagatcataagcccgcctctaacatgcaaactgaaacagtcatgcagccacatgtccctcatgccatcacagtatctgttgcaaatgaaaaggcactagctaagtgtgagaagtacatgctgacccaccaggaactagcctccgatggggagattgaaactaaactaattaagggtgatatttataaaacaaggggtggtggacaatctgttcagtttactgatattgagactttaaagcaagaatcaccaaatggtagtcgaaaacgaagatcttccacagtagcacctgcccaaccagatggtgcagagtctgaatggaccgatgtagaaacaaggtgttctgtggctgtggagatgagagcaggatcccagctgggacctggatatcagcatcacgcacaacccaagcgcaaaaagccatgaactgacagtcccagtactgaaagaacattttcatttgtgtggatgatttctcgaaagccatgccagaagcagtcttccaggtcatcttgtagaactccagctttgttgaaa

SEQ ID NO: 146742 - DNA, 3411 bp, Homo sapiens
  Payload ID: 9029
  Gene Symbol: KIF23
  Gene Name: kinesin family member 23
  Uniprot ID: Q02241
  ENST ID: ENST00000559279
  CDS Start-End: 221-2791
ttccgcggaggtcctgcctctccctgcggacgggcgctgattggcccgtttgaaatgcgccaggcgggagctcacctgggctcttagcgtcgccgccggcttcgcagagcaccgcgccttagccgcgaagttctagttcttgctgccggtcctaacgtcccgcagtcttcgccagccagccgtcccgcatgcgcgtttgggcggcgtggagcctgctgccatgaagtcagcgagagctaagacaccccggaaacctaccgtgaaaaaagggtcccaaacgaaccttaaagacccagttggggtatactgtagggtgcgcccactgggctttcctgatcaagagtgttgcatagaagtgatcaataatacaactgttcagcttcatactcctgagggctacagactcaaccgaaatggagactataaggagactcagtattcatttaaacaagtatttggcactcacaccacccagaaggaactctttgatgttgtggctaatcccttggtcaatgacctcattcatggcaaaaatggtcttctttttacatatggtgtgacgggaagtggaaaaactcacacaatgactggttctccaggggaaggagggctgcttcctcgttgtttggacatgatctttaacagtatagggtcatttcaagctaaacgatatgttttcaaatctaatgataggaatagtatggatatacagtgtgaggttgatgccttattagaacgtcagaaaagagaagctatgcccaatccaaagacttcttctagcaaacgacaagtagatccagagtttgcagatatgataactgtacaagaattctgcaaagcagaagaggttgatgaagatagtgtctatggtgtatttgtctcttatattgaaatatataataattacatatatgatctattggaagaggtgccgtttgatcccataaaacccaaacctccacaatctaaattgcttcgtgaagataagaaccataacatgtatgttgcaggatgtacagaagttgaagtgaaatctactgaggaggcttttgaagttttctggagaggccagaaaaagagacgtattgctaatacccatttgaatcgtgagtccagccgttcccatagcgtgttcaacattaaattagttcaggctcccttggatgcagatggagacaatgtcttacaggaaaaagaacaaatcactataagtcagttgtccttggtagatcttgctggaagtgaaagaactaaccggaccagagcagaagggaacagattacgtgaagctggtaatattaatcagtcactaatgacgctaagaacatgtatggatgtcctaagagagaaccaaatgtatggaactaacaagatggttccatatcgagattcaaagttaacccatctgttcaagaactactttgatggggaaggaaaagtgcggatgatcgtgtgtgtgaaccccaaggctgaagattatgaagaaaacttgcaagtcatgagatttgcggaagtgactcaagaagttgaagtagcaagacctgtagacaaggcaatatgtggtttaacgcctgggaggagatacagaaaccagcctcgaggtccagttggaaatgaaccattggttactgacgtggttttgcagagttttccacctttgccatcatgcgaaattttggatatcaacgatgagcagacacttccaaggctgattgaagccttagagaaacgacataacttacgacaaatgatgattgatgagtttaacaaacaatctaatgcttttaaagctttgttacaagaatttgacaatgctgttttaagtaaagaaaaccacatgcaagggaaactaaatgaaaaggagaagatgatctcaggacagaaattggaaatagaacgactggaaaagaaaaacaaaactttagaatataagattgagattttagagaaaacaactactatctatgaggaagataaacgcaatttgcaacaggaacttgaaactcagaaccagaaacttcagcgacagttttctgacaaacgcagattagaagccaggttgcaaggcatggtgacagaaacgacaatgaagtgggagaaagaatgtgagcgtagagtggcagccaaacagctggagatgcagaataaactctgggttaaagatgaaaagctgaaacaactgaaggctattgttaccgaacctaaaactgagaagccagagagaccctctcgggagcgagatcgagaaaaagttactcaaagatctgtttctccatcacctgtgcctttactctttcaacctgatcagaacgcaccaccaattcgtctccgacacagacgatcacgctctgcaggagacagatgggtagatcataagcccgcctctaacatgcaaactgaaacagtcatgcagccacatgtccctcatgccatcacagtatctgttgcaaatgaaaaggcactagctaagtgtgagaagtacatgctgacccaccaggaactagcctccgatggggagattgaaactaaactaattaagggtgatatttataaaacaaggggtggtggacaatctgttcagtttactgatattgagactttaaagcaagaatcaccaaatggtagtcgaaaacgaagatcttccacagtagcacctgcccaaccagatggtgcagagtctgaatggaccgatgtagaaacaaggtgttctgtggctgtggagatgagagcaggatcccagctgggacctggatatcagcatcacgcacaacccaagcgcaaaaagccatgaactgacagtcccagtactgaaagaacattttcatttgtgtggatgatttctcgaaagccatgccagaagcagtcttccaggtcatcttgtagaactccagctttgttgaaaatcacggacctcagctacatcatacactgacccagagcaaagctttccctatggttccaaagacaactagtattcaacaaaccttgtatagtatatgttttgccatatttaatattaatagcagaggaagactccttttttcatcactgtatgaattttttataatgtttttttaaaatatatttcatgtatacttataaactaattcacacaagtgtttgtcttagatgattaaggaagactatatctagatcatgtctgattttttattgtgacttctccagccctggtctgaatttcttaaggttttataaacaaatgctgctatttattagctgcaagaatgcactttagaactatttgacaattcagactttcaaaataaagatgtaaatgactggccaataataaccattttaggaaggtgttttgaattctgtatgtatatattcactttctgacatttagatatgccaaaagaattaaaatcaaaagcactaagaaataca

SEQ ID NO: 146743 - DNA, 1656 bp, Homo sapiens
  Payload ID: 9029
  Gene Symbol: KIF23
  Gene Name: kinesin family member 23
  ENST ID: ENST00000558346
  CDS Start-End: 118-1233
gcagagcaccgcgccttagccgcgaagttctagttcttgctgccggtcctaacgtcccgcagtcttcgccagccagccgtcccgcatgcgcgtttgggcggcgtggagcctgctgccatgaagtcagcgagagctaagacaccccggaaacctaccgtgaaaaaagggtcccaaacgaaccttaaagacccagttggggtatactgtagggtgcgcccactgggctttcctgatcaagagtgttgcatagaagtgatcaataatacaactgttcagcttcatactcctgagggctacagactcaaccgaaatggagactataaggagactcagtattcatttaaacaagtatttggcactcacaccacccagaaggaactctttgatgttgtggctaatcccttggtcaatgacctcattcatggcaaaaatggtcttctttttacatatggtgtgacgggaagtggaaaaactcacacaatgactggttctccaggggaaggagggctgcttcctcgttgtttggacatgatctttaacagtatagggtcatttcaagctaaacgatatgttttcaaatctaatgataggaatagtatggatatacagtgtgaggttgatgccttattagaacgtcagaaaagagaagctatgcccaatccaaagacttcttctagcaaacgacaagtagatccagagtttgcagatatgataactgtacaagaattctgcaaagcagaagaggttgatgaagatagtgtctatggtgtatttgtctcttatattgaaatatataataattacatatatgatctattggaagaggtgccgtttgatcccataaaacccaagtggaacagttgcagcacacccatgaggaacacagattttgtacctccacaatctaaattgcttcgtgaagataagaaccataacatgtatgttgcaggatgtacagaagttgaagtgaaatctactgaggaggcttttgaagttttctggagaggccagaaaaagagacgtattgctaatacccatttgaatcgtgagtccagccgttcccatagcgtgttcaacattaaattagttcaggctcccttggatgcagatggagacaatgtcttacagttttgggaagctggatatcgaatcttagagcctgaattttgctgtgaaaaaagtttgcaaatctttaaaaatccctttggtagaagtgataaaataagactgtgattttttctctctggcgactccttctgaaaaagaacaaatcactataagtcagttgtccttggtagatcttgctggaagtgaaagaactaaccggaccagagcagaagggaacagattacgtgaagctggtaatattaatcagtcactaatgacgctaagaacatgtatggatgtcctaagagagaaccaaatgtatggaactaacaagatggttccatatcgagattcaaagttaacccatctgttcaagaactactttgatggggaaggaaaagtgcggatgatcgtgtgtgtgaaccccaaggctgaagattatgaagaaaacttgcaagtcatgagatttgcggaagtgactcaagaagttgaagtagcaagacctgtagacaaggcaatatgtggtttaacgcctgggaggagatacag

SEQ ID NO: 146744 - DNA, 2743 bp, Homo sapiens
  Payload ID: 9029
  Gene Symbol: KIF23
  Gene Name: kinesin family member 23
  ENST ID: ENST00000561089
  CDS Start-End: 142-471
gctcttagcgtcgccgccggcttcgcagagcaccgcgccttagccgcgaagttctagttcttgctgccggtcctaacgtcccgcagtcttcgccagccagccgtcccgcatgcgcgtttgggcggcgtggagcctgctgccatgaagtcagcgagagctaagacaccccggaaacctaccgtgaaaaaagggtcccaaacgaaccttaaagacccagttggggtatactgtagggtgcgcccactgggctttcctgatcaagagtgttgcatagaagtgatcaataatacaactgttcagcttcatactcctgagggctacagactcaaccgaaatggagactataaggagactcagtattcatttaaacaagtatttggcactcacaccacccagaaggaactctttgatgttgtggctaatcccttggtcaatgacctcattcatggcaaaaatggttttcaaatctaatgataggaatagtatggatatacagtgtgaggttgatgccttattagaacgtcagaaaagagaagctatgcccaatccaaagacttcttctagcaaacgacaagtagatccagagtttgcagatatgataactgtacaagaattctgcaaagcagaagaggttgatgaagatagtgtctatggtgtatttgtctcttatattgaaatatataataattacatatatgatctattggaagaggtgccgtttgatcccataaaacccaaacctccacaatctaaattgcttcgtgaagataagaaccataacatgtatgttgcaggatgtacagaagttgaagtgaaatctactgaggaggcttttgaagttttctggagaggccagaaaaagagacgtattgctaatacccatttgaatcgtgagtccagccgttcccatagcgtgttcaacattaaattagttcaggctcccttggatgcagatggagacaatgtcttacaggaaaaagaacaaatcactataagtcagttgtccttggtagatcttgctggaagtgaaagaactaaccggaccagagcagaagggaacagattacgtgaagctggtaatattaatcagtcactaatgacgctaagaacatgtatggatgtcctaagagagaaccaaatgtatggaactaacaagatggttccatatcgagattcaaagttaacccatctgttcaagaactactttgatggggaaggaaaagtgcggatgatcgtgtgtgtgaaccccaaggctgaagattatgaagaaaacttgcaagtcatgagatttgcggaagtgactcaagaagttgaagtagcaagacctgtagacaaggcaatatgtggtttaacgcctgggaggagatacagaaaccagcctcgaggtccagttggaaatgaaccattggttactgacgtggttttgcagagttttccacctttgccatcatgcgaaattttggatatcaacgatgagcagacacttccaaggctgattgaagccttagagaaacgacataacttacgacaaatgatgattgatgagtttaacaaacaatctaatgcttttaaagctttgttacaagaatttgacaatgctgttttaagtaaagaaaaccacatgcaagggaaactaaatgaaaaggagaagatgatctcaggacagaaattggaaatagaacgactggaaaagaaaaacaaaactttagaatataagattgagattttagagaaaacaactactatctatgaggaagataaacgcaatttgcaacaggaacttgaaactcagaaccagaaacttcagcgacagttttctgacaaacgcagattagaagccaggttgcaaggcatggtgacagaaacgacaatgaagtgggagaaagaatgtgagcgtagagtggcagccaaacagctggagatgcagaataaactctgggttaaagatgaaaagctgaaacaactgaaggctattgttaccgaacctaaaactgagaagccagagagaccctctcgggagcgagatcgagaaaaagttactcaaagatctgtttctccatcacctgtgcctctttctagtaactatattgctcagatttccaacggccagcaactcatgagccagccacagctacataggcgctctaactcttgcagcagcatttctgtagcttcctgtatttcggaatgggagcagaaaattcctacgtacaacacacctctcaaagtcacatctattgcaaggcgtaggcagcaggagccaggacaaagcaaaacttgtatcgtgtcagacagaaggcgagggatgtactggactgaaggcagggaggtggttcctacattcagaaatgagatagaaatagaagaggatcattgcggcaggggtgatatttataaaacaaggggtggtggacaatctgttcagtttactgatattgagactttaaagcaagaatcaccaaatggtagtcgaaaacgaagatcttccacagtagcacctgcccaaccagatggtgcagagtctgaatggaccgatgtagaaacaaggtgttctgtggctgtggagatgagagcaggatcccagctgggacctggatatcagcatcacgcacaacccaagcgcaaaaagccatgaactgacagtcccagtactgaaagaacattttcatttgtgtggatgatttctcgaaagccatgccagaagcagtcttccaggtcatcttgtagaactccagctttgttg

SEQ ID NO: 146745 - DNA, 6226 bp, Homo sapiens
  Payload ID: 9030
  Gene Symbol: KIF24
  Gene Name: kinesin family member 24
  Uniprot ID: Q5T7B8
  ENST ID: ENST00000379166
  CDS Start-End: 121-4227
gacgggactgttaggttgcgggctttggggctcactcccgacggcattgtcttctcctcttctcagacagggcagaccgaggagtttggaccgagagtttatagaaacctattcaccaaaatggcatcctggttatatgaatgtctttgtgaagctgaacttgcacagtattattctcatttcactgcccttggccttcagaaaatagatgaattagccaagattacaatgaaggactactccaaattaggagtccatgacatgaacgaccgcaaacgtctcttccaacttatcaaaattattaagattatgcaagaagaagataaagcagtcagtatcccagagcgtcatcttcagacaagcagcctgcgcatcaaatctcaggaattaagatctggccctcgcagacagctgaattttgattctcctgctgacaataaagacagaaatgccagcaatgatgggtttgaaatgtgcagtttatcagatttctctgcaaatgaacagaagtccacttacctaaaagtgctagaacacatgctaccagatgattcccagtaccatacaaaaacaggaattctgaatgccacagctggtgattcctatgtgcaaacagaaatcagcacttcactcttttcaccaaattacctttctgcaatactgggggattgtgatattcccattattcaaagaatctctcatgtttcagggtataactatggaatccctcattcttgtatcagacagaacacttcagagaaacagaatccttggactgagatggagaaaatcagagtttgtgttcgaaaacgccccctgggcatgagggaggtacgtcgtggagaaattaatattattactgtagaagacaaagaaactctacttgtgcatgagaagaaagaagcagttgacctcactcaatatattctgcagcatgttttttattttgatgaagtctttggtgaggcgtgcaccaatcaggatgtatacatgaagactactcacccacttattcagcatattttcaatggaggcaatgccacttgctttgcttatggacagacaggtgctggaaagacctacaccatgataggaactcatgagaacccaggattgtatgctctagctgccaaagatatcttcaggcaactagaagtgtcccagccaagaaagcacctctttgtgtggatcagcttctatgaaatttactgtggacagctttatgacctcctaaatagaagaaaaaggctctttgcaagagaagatagcaagcacatggtgcagatagtgggactgcaagagcttcaggtggacagtgtggagctcctcttagaggtgatcttaaagggcagcaaggagcgcagcactggggccactggagttaatgcagactcctcccgctcccatgccgtcatccaaattcagatcaaagattcagccaagaggacatttggcaggatctcttttattgacttggctggcagtgaaagagcagcagatgcaagggactcagatagacagacaaagatggaaggtgcagaaataaatcagagtctactggctctgaaggaatgtatccgagcactggatcaggaacacacccatactcccttcaggcaaagcaaactaactcaggtcctgaaggactctttcatcggcaatgccaaaacctgcatgatcgccaacatctcaccaagccacgtggccactgaacacactctcaacaccttgcgctatgctgaccgggtcaaagaactaaagaaaggcattaagtgttgcacttcagttaccagtcgaaatcggacatctggaaactcctctccaaaacgaattcagagctcccctggggctttgtcagaggacaaatgttctcccaaaaaagtcaagctgggatttcagcagtcactcacagtggcagcccctggttccacgagagggaaggtccatcctctgaccagccacccacccaacattccttttacttctgcacctaaggtctctggtaaaaggggtggctccagagggagtccttcacaagagtgggtcattcatgctagccctgtgaaaggaactgtgcgctctggacatgtggccaaaaaaaagccagaagagtcagcaccattgtgctctgagaaaaatcgaatgggcaacaaaactgtccttgggtgggaaagcagggcctcaggcccaggagaaggcctagtgcgtggtaagctgtccaccaagtgcaagaaagtgcagacagtgcagccagtacagaagcagcttgtgtctcgagttgagctctcctttggcaacgcccaccacagggctgagtacagtcaagacagccagaggggcacgcctgctaggcctgcctctgaagcttggacaaacatcccgccacatcagaaggagagggaggaacatctgcgtttctatcaccagcagttccaacagccacctctcctccaacagaagttaaaataccaaccactgaaaaggtctttacgccagtacaggcccccagagggtcagctcacgaatgagactccgcctctgttccactcttactctgaaaaccatgatggagcccaagtagaggaacttgatgacagtgatttcagtgaagattctttttcacacatctctagtcagagggccacaaagcaaaggaacaccctggagaatagcgaagactcattcttcctgcaccagacgtggggacagggtcctgagaagcaggtggcagaaagacagcagagtctgttttctagccccaggacaggtgacaagaaagatctaactaaaagctgggtggactccagggaccccataaaccacagaagagcagcactcgatcacagctgcagcccaagtaaggggcccgtggactggagcagagagaactctacttcctcagggccttctcccagagacagcctggcagagaagccatactgttcacaggtagatttcatatatagacaggaaagaggtggaggctcttcctttgatctcagaaaggatgcctcccaaagtgaggtttctggggagaatgagggcaacttgccatccccagaggaagatggtttcactatctcattgtcccacgttgcagttcctggatccccagaccaaagagacacagtcaccacacctctgagagaagtcagtgcagacggcccaatccaggtgaccagcactgtgaaaaacggtcatgctgtcccaggagaggatcctagggggcagttaggcacgcatgctgaatatgcttctggactcatgtctcccctcaccatgtccctcctggagaacccagacaacgaagggtctcctccctcggagcagctggtccaggatggggctacgcacagtctagtggcagagagcacagggggcccagttgtgagccacacagtgccatctggtgatcaagaggcagccttgccagtgtcttcagcaactaggcacctgtggctgtcctcatctccccctgataataagcctggtggtgatcttccagctctgtccccatcacccatccgtcagcacccagctgacaagctgcccagcagggaggcagacctaggagaggcctgccagagcagagagactgtacttttctcccacgaacacatgggtagtgagcagtatgatgctgatgcagaggagacggggctggatggctcctggggtttcccaggaaagcccttcaccaccatacatatgggggtaccccattctggacctacactcaccccacgaacaggaagtagtgatgtggctgaccagctctgggcccaggagagaaaacatcctacaaggcttggttggcaggagtttggtttgtccacagaccccatcaagttgccctgcaacagtgaaaatgtcacatggctcaaacccaggccgatctcaaggtgcttagcaaggccaagttctcccttggttcccagctgctctcccaagactgcagggacactccgtcagcccaccctggagcaagcgcagcaggtggtcatccgagcacaccaggaacagctggatgaaatggctgagctcggcttcaaggaggagacgctgatgagccagctggcttctaatgattttgaagattttgtgacccagctggatgaaatcatggttctgaaatccaagtgtatccagagtctgaggagccagctgcagctctatctcacctgccacgggcccaccgcagcccctgagggaacagtgccgtcttagagccagaccctgtgccgagatggtgggggccctgcaggagtctgtgctgggctctcaggctggaggagcctctgccaggtcctccctgcacacaccagaacccacacgctggtcctgcctatgctagcgtcaccccagccccacgtggcttcagataggtcccagcttctccctcagggacaggcccctgtccctcagttccatgcacaggagtgcctccaagggtgggccaggccgaagaacctaatgcctttcccttgtgcctagagaatatgattaactaaccccttgcctgtgggaatatatttgggtctaataaccctgaagtttctaagtttggggatcagaggatggggtggtcagtggtagcctagaggtcagaggtcacaagacagagaagacaacatgctgagaccagaggcttcaccagctgaattctgtgcctaacttagaagactaaacactggcccaaacttaaccattggtgctagggggacaggggtggggtgagctctgccccatcagcccttggagattgatttggggatttagaggcgtttttgaaaatgtaaatagcataaaccttgacttgatgtgtcactgacagcagcagatgtgagacaggccttatatttacagctcccttcccttcctgcaatccagtgttgaggcagaagagggtgcctgtgtcacacatcaatttttctcctgacttttgctcgggtgaaaggcctctgtacaatgcccgatactctcatgcttccatggcagctcctggctcctatctgggacacctcactacccagccccctcatggaatagtccatctcctagcctggccttcatccagttcaccctgcccagccaccctgcctctcaggggtctgtgttgggaaccttggcagttgaacagagtgctctgttcaacagtctgaggcctctgaaacagaattcacacacaaaccttcagccaagttctgcctgctgtgtatctttttagcaggaagcagctcaggacagggaagacaaagtagcctccaggtgccaattactttaaagccactctgggtcaaatggagattcatgagtcacggccttggcccgaacgcccattactatgtgagcctttatttccttcagataaaggataactttttacggttttaaaaggagggcttaattaaaaggccaagaagagggttaaatggctctcttgagacactagcagcctggtccagtcaccctttgtcagcctgacagtgcctcatctgaccgccagggggcatccttattggtgcttcccggctgcagggcactgcggcccctccctcacatgatcactaaaaaccttcaaagacccagtctagccaaaagctcaagtgggacaatggcacagtattaaggtcaaggacaaaaacttacttactttaggaatgaaccctattctatcatcatatacaacagcaccactgagagctggtgaaacagtttaaatcccatcctctgcttgtggcaaatgatgcataaatgcctgctgctcacagtaaaagggcttcttcctcttttactgggtgatccccctgaaggcccagcctatcccaactccacagtcaggaaggcctacgtccttggtccacagacggagctgggccaggtttaaaagactcagtctaggcttgcctttgcaaaccaaaaacgaggacaggtctgaagtgggaagaaagctccgaaatagaaaacggttaggtcctattctatccccagcaaatctaagcaagaaatctctttatacaccacatggcccccccactcccataaaacagccttggtaataaagaagttatcacaccaagacataccttttagatttttattagtagttctctctgaagaatcaaaatagttagttagcaaattattttagattcaagactgtatatcctttgtatttagatctttaatgatgtacaacataatacaaaacaaaccagagagactg

SEQ ID NO: 146746 - DNA, 5729 bp, Homo sapiens
  Payload ID: 9030
  Gene Symbol: KIF24
  Gene Name: kinesin family member 24
  Uniprot ID: Q5T7B8
  ENST ID: ENST00000379174
  CDS Start-End: 26-3730
agtttatagaaacctattcaccaaaatggcatcctggttatatgaatgtctttgtgaagctgaacttgcacagtattattctcatttcactgcccttggccttcagaaaatagatgaattagccaagattacaatgaaggactactccaaattaggagtccatgacatgaacgaccgcaaacgtctcttccaacttatcaaaattattaagattatgcaagaagaagataaagcagtcagtatcccagagcgtcatcttcagacaagcagcctgcgcatcaaatctcaggaattaagatctggccctcgcagacagctgaattttgattctcctgctgacaataaagacagaaatgccagcaatgatgggtttgaaatgtgcagtttatcagatttctctgcaaatgaacagaagtccacttacctaaaagtgctagaacacatgctaccagatgattcccagtaccatacaaaaacaggaattctgaatgccacagctggtgattcctatgtgcaaacagaaatcagcacttcactcttttcaccaaattacctttctgcaatactgggggattgtgatattcccattattcaaagaatctctcatgtttcagggtataactatggaatccctcattcttgtatcagacagaacacttcagagaaacagaatccttggactgagatggagaaaatcagagtttgtgttcgaaaacgccccctgggcatgagggaggtacgtcgtggagaaattaatattattactgtagaagacaaagaaactctacttgtgcatgagaagaaagaagcagttgacctcactcaatatattctgcaggtgatcttaaagggcagcaaggagcgcagcactggggccactggagttaatgcagactcctcccgctcccatgccgtcatccaaattcagatcaaagattcagccaagaggacatttggcaggatctcttttattgacttggctggcagtgaaagagcagcagatgcaagggactcagatagacagacaaagatggaaggtgcagaaataaatcagagtctactggctctgaaggaatgtatccgagcactggatcaggaacacacccatactcccttcaggcaaagcaaactaactcaggtcctgaaggactctttcatcggcaatgccaaaacctgcatgatcgccaacatctcaccaagccacgtggccactgaacacactctcaacaccttgcgctatgctgaccgggtcaaagaactaaagaaaggcattaagtgttgcacttcagttaccagtcgaaatcggacatctggaaactcctctccaaaacgaattcagagctcccctggggctttgtcagaggacaaatgttctcccaaaaaagtcaagctgggatttcagcagtcactcacagtggcagcccctggttccacgagagggaaggtccatcctctgaccagccacccacccaacattccttttacttctgcacctaaggtctctggtaaaaggggtggctccagagggagtccttcacaagagtgggtcattcatgctagccctgtgaaaggaactgtgcgctctggacatgtggccaaaaaaaagccagaagagtcagcaccattgtgctctgagaaaaatcgaatgggcaacaaaactgtccttgggtgggaaagcagggcctcaggcccaggagaaggcctagtgcgtggtaagctgtccaccaagtgcaagaaagtgcagacagtgcagccagtacagaagcagcttgtgtctcgagttgagctctcctttggcaacgcccaccacagggctgagtacagtcaagacagccagaggggcacgcctgctaggcctgcctctgaagcttggacaaacatcccgccacatcagaaggagagggaggaacatctgcgtttctatcaccagcagttccaacagccacctctcctccaacagaagttaaaataccaaccactgaaaaggtctttacgccagtacaggcccccagagggtcagctcacgaatgagactccgcctctgttccactcttactctgaaaaccatgatggagcccaagtagaggaacttgatgacagtgatttcagtgaagattctttttcacacatctctagtcagagggccacaaagcaaaggaacaccctggagaatagcgaagactcattcttcctgcaccagacgtggggacagggtcctgagaagcaggtggcagaaagacagcagagtctgttttctagccccaggacaggtgacaagaaagatctaactaaaagctgggtggactccagggaccccataaaccacagaagagcagcactcgatcacagctgcagcccaagtaaggggcccgtggactggagcagagagaactctacttcctcagggccttctcccagagacagcctggcagagaagccatactgttcacaggtagatttcatatatagacaggaaagaggtggaggctcttcctttgatctcagaaaggatgcctcccaaagtgaggtttctggggagaatgagggcaacttgccatccccagaggaagatggtttcactatctcattgtcccacgttgcagttcctggatccccagaccaaagagacacagtcaccacacctctgagagaagtcagtgcagacggcccaatccaggtgaccagcactgtgaaaaacggtcatgctgtcccaggagaggatcctagggggcagttaggcacgcatgctgaatatgcttctggactcatgtctcccctcaccatgtccctcctggagaacccagacaacgaagggtctcctccctcggagcagctggtccaggatggggctacgcacagtctagtggcagagagcacagggggcccagttgtgagccacacagtgccatctggtgatcaagaggcagccttgccagtgtcttcagcaactaggcacctgtggctgtcctcatctccccctgataataagcctggtggtgatcttccagctctgtccccatcacccatccgtcagcacccagctgacaagctgcccagcagggaggcagacctaggagaggcctgccagagcagagagactgtacttttctcccacgaacacatgggtagtgagcagtatgatgctgatgcagaggagacggggctggatggctcctggggtttcccaggaaagcccttcaccaccatacatatgggggtaccccattctggacctacactcaccccacgaacaggaagtagtgatgtggctgaccagctctgggcccaggagagaaaacatcctacaaggcttggttggcaggagtttggtttgtccacagaccccatcaagttgccctgcaacagtgaaaatgtcacatggctcaaacccaggccgatctcaaggtgcttagcaaggccaagttctcccttggttcccagctgctctcccaagactgcagggacactccgtcagcccaccctggagcaagcgcagcaggtggtcatccgagcacaccaggaacagctggatgaaatggctgagctcggcttcaaggaggagacgctgatgagccagctggcttctaatgattttgaagattttgtgacccagctggatgaaatcatggttctgaaatccaagtgtatccagagtctgaggagccagctgcagctctatctcacctgccacgggcccaccgcagcccctgagggaacagtgccgtcttagagccagaccctgtgccgagatggtgggggccctgcaggagtctgtgctgggctctcaggctggaggagcctctgccaggtcctccctgcacacaccagaacccacacgctggtcctgcctatgctagcgtcaccccagccccacgtggcttcagataggtcccagcttctccctcagggacaggcccctgtccctcagttccatgcacaggagtgcctccaagggtgggccaggccgaagaacctaatgcctttcccttgtgcctagagaatatgattaactaaccccttgcctgtgggaatatatttgggtctaataaccctgaagtttctaagtttggggatcagaggatggggtggtcagtggtagcctagaggtcagaggtcacaagacagagaagacaacatgctgagaccagaggcttcaccagctgaattctgtgcctaacttagaagactaaacactggcccaaacttaaccattggtgctagggggacaggggtggggtgagctctgccccatcagcccttggagattgatttggggatttagaggcgtttttgaaaatgtaaatagcataaaccttgacttgatgtgtcactgacagcagcagatgtgagacaggccttatatttacagctcccttcccttcctgcaatccagtgttgaggcagaagagggtgcctgtgtcacacatcaatttttctcctgacttttgctcgggtgaaaggcctctgtacaatgcccgatactctcatgcttccatggcagctcctggctcctatctgggacacctcactacccagccccctcatggaatagtccatctcctagcctggccttcatccagttcaccctgcccagccaccctgcctctcaggggtctgtgttgggaaccttggcagttgaacagagtgctctgttcaacagtctgaggcctctgaaacagaattcacacacaaaccttcagccaagttctgcctgctgtgtatctttttagcaggaagcagctcaggacagggaagacaaagtagcctccaggtgccaattactttaaagccactctgggtcaaatggagattcatgagtcacggccttggcccgaacgcccattactatgtgagcctttatttccttcagataaaggataactttttacggttttaaaaggagggcttaattaaaaggccaagaagagggttaaatggctctcttgagacactagcagcctggtccagtcaccctttgtcagcctgacagtgcctcatctgaccgccagggggcatccttattggtgcttcccggctgcagggcactgcggcccctccctcacatgatcactaaaaaccttcaaagacccagtctagccaaaagctcaagtgggacaatggcacagtattaaggtcaaggacaaaaacttacttactttaggaatgaaccctattctatcatcatatacaacagcaccactgagagctggtgaaacagtttaaatcccatcctctgcttgtggcaaatgatgcataaatgcctgctgctcacagtaaaagggcttcttcctcttttactgggtgatccccctgaaggcccagcctatcccaactccacagtcaggaaggcctacgtccttggtccacagacggagctgggccaggtttaaaagactcagtctaggcttgcctttgcaaaccaaaaacgaggacaggtctgaagtgggaagaaagctccgaaatagaaaacggttaggtcctattctatccccagcaaatctaagcaagaaatctctttatacaccacatggcccccccactcccataaaacagccttggtaataaagaagttatcacaccaagacataccttttagatttttattagtagttctctctgaagaatcaaaatagttagttagcaaattattttagattcaagactgtatatcctttgtatttagatctttaatgatgtacaacataatacaaaacaaaccagagagactg

SEQ ID NO: 146747 - DNA, 6131 bp, Homo sapiens
  Payload ID: 9030
  Gene Symbol: KIF24
  Gene Name: kinesin family member 24
  Uniprot ID: Q5T7B8
  ENST ID: ENST00000402558
  CDS Start-End: 26-4132
agtttatagaaacctattcaccaaaatggcatcctggttatatgaatgtctttgtgaagctgaacttgcacagtattattctcatttcactgcccttggccttcagaaaatagatgaattagccaagattacaatgaaggactactccaaattaggagtccatgacatgaacgaccgcaaacgtctcttccaacttatcaaaattattaagattatgcaagaagaagataaagcagtcagtatcccagagcgtcatcttcagacaagcagcctgcgcatcaaatctcaggaattaagatctggccctcgcagacagctgaattttgattctcctgctgacaataaagacagaaatgccagcaatgatgggtttgaaatgtgcagtttatcagatttctctgcaaatgaacagaagtccacttacctaaaagtgctagaacacatgctaccagatgattcccagtaccatacaaaaacaggaattctgaatgccacagctggtgattcctatgtgcaaacagaaatcagcacttcactcttttcaccaaattacctttctgcaatactgggggattgtgatattcccattattcaaagaatctctcatgtttcagggtataactatggaatccctcattcttgtatcagacagaacacttcagagaaacagaatccttggactgagatggagaaaatcagagtttgtgttcgaaaacgccccctgggcatgagggaggtacgtcgtggagaaattaatattattactgtagaagacaaagaaactctacttgtgcatgagaagaaagaagcagttgacctcactcaatatattctgcagcatgttttttattttgatgaagtctttggtgaggcgtgcaccaatcaggatgtatacatgaagactactcacccacttattcagcatattttcaatggaggcaatgccacttgctttgcttatggacagacaggtgctggaaagacctacaccatgataggaactcatgagaacccaggattgtatgctctagctgccaaagatatcttcaggcaactagaagtgtcccagccaagaaagcacctctttgtgtggatcagcttctatgaaatttactgtggacagctttatgacctcctaaatagaagaaaaaggctctttgcaagagaagatagcaagcacatggtgcagatagtgggactgcaagagcttcaggtggacagtgtggagctcctcttagaggtgatcttaaagggcagcaaggagcgcagcactggggccactggagttaatgcagactcctcccgctcccatgccgtcatccaaattcagatcaaagattcagccaagaggacatttggcaggatctcttttattgacttggctggcagtgaaagagcagcagatgcaagggactcagatagacagacaaagatggaaggtgcagaaataaatcagagtctactggctctgaaggaatgtatccgagcactggatcaggaacacacccatactcccttcaggcaaagcaaactaactcaggtcctgaaggactctttcatcggcaatgccaaaacctgcatgatcgccaacatctcaccaagccacgtggccactgaacacactctcaacaccttgcgctatgctgaccgggtcaaagaactaaagaaaggcattaagtgttgcacttcagttaccagtcgaaatcggacatctggaaactcctctccaaaacgaattcagagctcccctggggctttgtcagaggacaaatgttctcccaaaaaagtcaagctgggatttcagcagtcactcacagtggcagcccctggttccacgagagggaaggtccatcctctgaccagccacccacccaacattccttttacttctgcacctaaggtctctggtaaaaggggtggctccagagggagtccttcacaagagtgggtcattcatgctagccctgtgaaaggaactgtgcgctctggacatgtggccaaaaaaaagccagaagagtcagcaccattgtgctctgagaaaaatcgaatgggcaacaaaactgtccttgggtgggaaagcagggcctcaggcccaggagaaggcctagtgcgtggtaagctgtccaccaagtgcaagaaagtgcagacagtgcagccagtacagaagcagcttgtgtctcgagttgagctctcctttggcaacgcccaccacagggctgagtacagtcaagacagccagaggggcacgcctgctaggcctgcctctgaagcttggacaaacatcccgccacatcagaaggagagggaggaacatctgcgtttctatcaccagcagttccaacagccacctctcctccaacagaagttaaaataccaaccactgaaaaggtctttacgccagtacaggcccccagagggtcagctcacgaatgagactccgcctctgttccactcttactctgaaaaccatgatggagcccaagtagaggaacttgatgacagtgatttcagtgaagattctttttcacacatctctagtcagagggccacaaagcaaaggaacaccctggagaatagcgaagactcattcttcctgcaccagacgtggggacagggtcctgagaagcaggtggcagaaagacagcagagtctgttttctagccccaggacaggtgacaagaaagatctaactaaaagctgggtggactccagggaccccataaaccacagaagagcagcactcgatcacagctgcagcccaagtaaggggcccgtggactggagcagagagaactctacttcctcagggccttctcccagagacagcctggcagagaagccatactgttcacaggtagatttcatatatagacaggaaagaggtggaggctcttcctttgatctcagaaaggatgcctcccaaagtgaggtttctggggagaatgagggcaacttgccatccccagaggaagatggtttcactatctcattgtcccacgttgcagttcctggatccccagaccaaagagacacagtcaccacacctctgagagaagtcagtgcagacggcccaatccaggtgaccagcactgtgaaaaacggtcatgctgtcccaggagaggatcctagggggcagttaggcacgcatgctgaatatgcttctggactcatgtctcccctcaccatgtccctcctggagaacccagacaacgaagggtctcctccctcggagcagctggtccaggatggggctacgcacagtctagtggcagagagcacagggggcccagttgtgagccacacagtgccatctggtgatcaagaggcagccttgccagtgtcttcagcaactaggcacctgtggctgtcctcatctccccctgataataagcctggtggtgatcttccagctctgtccccatcacccatccgtcagcacccagctgacaagctgcccagcagggaggcagacctaggagaggcctgccagagcagagagactgtacttttctcccacgaacacatgggtagtgagcagtatgatgctgatgcagaggagacggggctggatggctcctggggtttcccaggaaagcccttcaccaccatacatatgggggtaccccattctggacctacactcaccccacgaacaggaagtagtgatgtggctgaccagctctgggcccaggagagaaaacatcctacaaggcttggttggcaggagtttggtttgtccacagaccccatcaagttgccctgcaacagtgaaaatgtcacatggctcaaacccaggccgatctcaaggtgcttagcaaggccaagttctcccttggttcccagctgctctcccaagactgcagggacactccgtcagcccaccctggagcaagcgcagcaggtggtcatccgagcacaccaggaacagctggatgaaatggctgagctcggcttcaaggaggagacgctgatgagccagctggcttctaatgattttgaagattttgtgacccagctggatgaaatcatggttctgaaatccaagtgtatccagagtctgaggagccagctgcagctctatctcacctgccacgggcccaccgcagcccctgagggaacagtgccgtcttagagccagaccctgtgccgagatggtgggggccctgcaggagtctgtgctgggctctcaggctggaggagcctctgccaggtcctccctgcacacaccagaacccacacgctggtcctgcctatgctagcgtcaccccagccccacgtggcttcagataggtcccagcttctccctcagggacaggcccctgtccctcagttccatgcacaggagtgcctccaagggtgggccaggccgaagaacctaatgcctttcccttgtgcctagagaatatgattaactaaccccttgcctgtgggaatatatttgggtctaataaccctgaagtttctaagtttggggatcagaggatggggtggtcagtggtagcctagaggtcagaggtcacaagacagagaagacaacatgctgagaccagaggcttcaccagctgaattctgtgcctaacttagaagactaaacactggcccaaacttaaccattggtgctagggggacaggggtggggtgagctctgccccatcagcccttggagattgatttggggatttagaggcgtttttgaaaatgtaaatagcataaaccttgacttgatgtgtcactgacagcagcagatgtgagacaggccttatatttacagctcccttcccttcctgcaatccagtgttgaggcagaagagggtgcctgtgtcacacatcaatttttctcctgacttttgctcgggtgaaaggcctctgtacaatgcccgatactctcatgcttccatggcagctcctggctcctatctgggacacctcactacccagccccctcatggaatagtccatctcctagcctggccttcatccagttcaccctgcccagccaccctgcctctcaggggtctgtgttgggaaccttggcagttgaacagagtgctctgttcaacagtctgaggcctctgaaacagaattcacacacaaaccttcagccaagttctgcctgctgtgtatctttttagcaggaagcagctcaggacagggaagacaaagtagcctccaggtgccaattactttaaagccactctgggtcaaatggagattcatgagtcacggccttggcccgaacgcccattactatgtgagcctttatttccttcagataaaggataactttttacggttttaaaaggagggcttaattaaaaggccaagaagagggttaaatggctctcttgagacactagcagcctggtccagtcaccctttgtcagcctgacagtgcctcatctgaccgccagggggcatccttattggtgcttcccggctgcagggcactgcggcccctccctcacatgatcactaaaaaccttcaaagacccagtctagccaaaagctcaagtgggacaatggcacagtattaaggtcaaggacaaaaacttacttactttaggaatgaaccctattctatcatcatatacaacagcaccactgagagctggtgaaacagtttaaatcccatcctctgcttgtggcaaatgatgcataaatgcctgctgctcacagtaaaagggcttcttcctcttttactgggtgatccccctgaaggcccagcctatcccaactccacagtcaggaaggcctacgtccttggtccacagacggagctgggccaggtttaaaagactcagtctaggcttgcctttgcaaaccaaaaacgaggacaggtctgaagtgggaagaaagctccgaaatagaaaacggttaggtcctattctatccccagcaaatctaagcaagaaatctctttatacaccacatggcccccccactcccataaaacagccttggtaataaagaagttatcacaccaagacataccttttagatttttattagtagttctctctgaagaatcaaaatagttagttagcaaattattttagattcaagactgtatatcctttgtatttagatctttaatgatgtacaacataatacaaaacaaaccagagagactg

SEQ ID NO: 146748 - DNA, 1326 bp, Homo sapiens
  Payload ID: 9031
  Gene Symbol: KIF25
  Gene Name: kinesin family member 25
  Uniprot ID: Q9UIL4
  ENST ID: ENST00000351261
  CDS Start-End: 235-1233
ggttggtggggcttgtgtttaattaacgcagcacacaaagtcttatgacgtcgttttactcttttctctcaggaaacaattctggtgaaatgtgatcgtcctggccaccctctgattgataagacatatcattttgaaagatatactggccttcccagctgacatggacctcaggtcagcttcagcgtgagaagcaggccaggcctgggtctggagccgtcctggccttcccagatgacatggacctcaggtcagcttcagcgtgagaagcaggccaggcctgggtctggagccgtcctggccttcccagatgacaaggacctcagggtttatggtccagcagagtctcagagcgcggtctttggagatgtgtgccccctactcacttctctcttggatgggtacaatgtttgtgttatggcgtatggacagacgggcagcggaaagagctataccatgctgggacgccattcggacgacggccctgttctgccgcttgacccacagagtgacttaggaattatccctagagtggctgaggagctcttcaggctcattttggaaaatacctcaagaagcccaaaggttgaagtctccatagtggaagtttacaataatgacatttttgaccttctggccaaagacagcattgcagcagtgtcgggggtcaagcgtgaggtggtgacagccaaggatggacggacagaggttgcgctgctggcctctgaggctgtcggcagcgcctcgaaactgatggagctcgttcatggaggtctgcagctcagggcgaagcaccccaccctggtgcacgcggattcctccaggtctcacctgataattacggtgactctaaccacagcctcctgctctgacagcactgcagaccaagcctgcagtgccaccctccccagggagcaaacagaggcaggaagggcaggaaggagccgcagagcttctcaaggggccttggctccacagctggttcctgggaaccccgcagggcatgcggagcaggtgcaggctcgactacagctcgtggactcggccggcagcgagtgcgttggaggcgatgcgaagttactggtgattctctgcatttctcccagccagaggcacctggcacagacgttgcagggcctgggtttcgggatccgagctcggcaagtccagcgaggccctgcccgaaagaagccgcccagctcccaaacggaggggaagaggaggccggattgaatgcattaacaagtttttctcctaaaactgtgtttcttgtccttgctttataatgcatatgtgcttagaaataaacaggtttcacgtggactc

SEQ ID NO: 146749 - DNA, 1510 bp, Homo sapiens
  Payload ID: 9031
  Gene Symbol: KIF25
  Gene Name: kinesin family member 25
  Uniprot ID: Q9UIL4
  ENST ID: ENST00000354419
  CDS Start-End: 263-1417
ttgtttacaaaaacaggcggcaggctggggttggtggggcttgtgtttaattaacgcagcacacaaagtcttatgacgtcgttttactcttttctctcaggaaacaattctggtgaaatgtgatcgtcctggccaccctctgattgataagacatatcattttgaaagatatactggccttcccagctgacatggacctcaggtcagcttcagcgtgagaagcaggccaggcctgggtctggagccgtcctggccttcccagatgacatggacctcaggtcagcttcagcgtgagaagcaggccaggcctgggtctggagccgtcctggccttcccagatgacaaggacctcagggtttatggtccagcagagtctcagagcgcggtctttggagatgtgtgccccctactcacttctctcttggatgggtacaatgtttgtgttatggcgtatggacagacgggcagcggaaagagctataccatgctgggacgccattcggacgacggccctgttctgccgcttgacccacagagtgacttaggaattatccctagagtggctgaggagctcttcaggctcattttggaaaatacctcaagaagcccaaaggttgaagtctccatagtggaagtttacaataatgacatttttgaccttctggccaaagacagcattgcagcagtgtcgggggtcaagcgtgaggtggtgacagccaaggatggacggacagaggttgcgctgctggcctctgaggctgtcggcagcgcctcgaaactgatggagctcgttcatggaggtctgcagctcagggcgaagcaccccaccctggtgcacgcggattcctccaggtctcacctgataattacggtgactctaaccacagcctcctgctctgacagcactgcagaccaagcctgcagtgccaccctccccagggagcaaacagaggcaggaagggcaggaaggagccgcagagcttctcaaggggccttggctccacagctggttcctgggaaccccgcagggcatgcggagcaggtgcaggctcgactacagctcgtggactcggccggcagcgagtgcgttggtgtgtctggagtgaccgggttggccctgagggagatggcgtgcatcagccgcagccttgcggccctggcaggcgtcctgggggctttgttggagcaccgtggccatgccccgtaccggaacagcaggctcacccacctccttcaggactgcctcggaggcgatgcgaagttactggtgattctctgcatttctcccagccagaggcacctggcacagacgttgcagggcctgggtttcgggatccgagctcggcaagtccagcgaggccctgcccgaaagaagccgcccagctcccaaacggaggggaagaggaggccggattgaatgcattaacaagtttttctcctaaaactgtgtttcttgtccttgctttataatgcatatgtgcttagaaataaacaggtttcacgtggactc

SEQ ID NO: 146750 - DNA, 1613 bp, Homo sapiens
  Payload ID: 9031
  Gene Symbol: KIF25
  Gene Name: kinesin family member 25
  Uniprot ID: Q9UIL4
  ENST ID: ENST00000443060
  CDS Start-End: 392-1546
gggtctttcgaagtggagacaggtgctgcagatctcacggccgcgtctcaggagctggtgcccggtgcacgttcagtgggggatgctccgcagtgcaggctcgcgcccgggttgacacgcagacctcttgatcattgcaggagctgaaacgaaatatcagagttcactgtcggattcgtcctttgttgccttttgatagtgaatccgacgatccagttttgcagagcaggaaacaattctggtgaaatgtgatcgtcctggccaccctctgattgataagacatatcattttgaaagatatactggccttcccagctgacatggacctcaggtcagcttcagcgtgagaagcaggccaggcctgggtctggagccgtcctggccttcccagatgacatggacctcaggtcagcttcagcgtgagaagcaggccaggcctgggtctggagccgtcctggccttcccagatgacaaggacctcagggtttatggtccagcagagtctcagagcgcggtctttggagatgtgtgccccctactcacttctctcttggatgggtacaatgtttgtgttatggcgtatggacagacgggcagcggaaagagctataccatgctgggacgccattcggacgacggccctgttctgccgcttgacccacagagtgacttaggaattatccctagagtggctgaggagctcttcaggctcattttggaaaatacctcaagaagcccaaaggttgaagtctccatagtggaagtttacaataatgacatttttgaccttctggccaaagacagcattgcagcagtgtcgggggtcaagcgtgaggtggtgacagccaaggatggacggacagaggttgcgctgctggcctctgaggctgtcggcagcgcctcgaaactgatggagctcgttcatggaggtctgcagctcagggcgaagcaccccaccctggtgcacgcggattcctccaggtctcacctgataattacggtgactctaaccacagcctcctgctctgacagcactgcagaccaagcctgcagtgccaccctccccagggagcaaacagaggcaggaagggcaggaaggagccgcagagcttctcaaggggccttggctccacagctggttcctgggaaccccgcagggcatgcggagcaggtgcaggctcgactacagctcgtggactcggccggcagcgagtgcgttggtgtgtctggagtgaccgggttggccctgagggagatggcgtgcatcagccgcagccttgcggccctggcaggcgtcctgggggctttgttggagcaccgtggccatgccccgtaccggaacagcaggctcacccacctccttcaggactgcctcggaggcgatgcgaagttactggtgattctctgcatttctcccagccagaggcacctggcacagacgttgcagggcctgggtttcgggatccgagctcggcaagtccagcgaggccctgcccgaaagaagccgcccagctcccaaacggaggggaagaggaggccggattgaatgcattaacaagtttttctcctaaaactgtgtttcttgtccttgctttataatgcatatgtgctta

SEQ ID NO: 146751 - DNA, 440 bp, Homo sapiens
  Payload ID: 9031
  Gene Symbol: KIF25
  Gene Name: kinesin family member 25
  ENST ID: ENST00000496008
  CDS Start-End: 1-44
gaattatccctagagtggctgaggagctcttcagggcacagtgatttgcggcactggaatccctcagtcagagtctcagaatctctgctcttccaagtgagtggccccgggcaaggccgtactctccctacacctcaccttcgtcgtttgcagaaacgagaatcggagcagacacggaccgtgtcctccctcatcacatccacacacgacctggagaggggtgcactgggccagggctgggggtgagcttgggtgttcgtgactcaagttgcaaacggccctctgcccaaaatgatacaaaaccacaatgacatcagtgctgatatcagagatagtttacaggaaccctttaccctgaaaaggactactcttagattgctgaagtcaccagataagccatttcctgtcgttttaaagtaaataaaatgctactgcctgga

SEQ ID NO: 146752 - DNA, 6714 bp, Homo sapiens
  Payload ID: 9032
  Gene Symbol: KIF26A
  Gene Name: kinesin family member 26A
  ENST ID: ENST00000315264
  CDS Start-End: 379-5610
caggtggccgagggcggcccggcccgcgagccgccgccgctgctggaggtgtccccccgaaagaggctacccgccgggcccgaccaggacccatgcggcagccgccctgctcccgaaggcgccggggccggcccagagcagggccactcggccggcggaggcggctggtgccgccactgccacacgaagctggtggagctcaagcgacaggcgtggaagctggtcagcgggcccgggaccaccctccgggatccttgcctctctgccctgcttctcgacaagctaccagcacctggggccctgccagcctgtcgcccagaggccgagcgccgctgtgacgtctgcgccacacacctgcagcagctcacacgggaggccatgcacctgctgcaggcccctgccagccatgaggaccttgacgccccccatggaggccccagcctcgcaccccccagcaccacgaccagctcgagggacacgccaggaccagcgggtcctgcagggaggcagccaggacgagctgggccagacaggaccaaggggctggcctggtcccccgggcccagtgtccaggtgtctgtagcacctgcgggtcttggaggggcgctgagcacggtcaccatccaggcccagcagtgcctggagggcatgtggagtgtctcgcgggtcaacagcttcctcccgccggcgtgcctggccgaggcagcggtggcggccgtggcggtggcagacacggtccgagaatgcccccccgtggccggccctgatggcttgtcgaaggcctggggccgtggtggagtctgcacgtcagccctggtcacccccaccccgggctcggtggggggctccacaggcccctcagctgcagcctccttcttcataagggctatgcagaagctcagcctggcctccaagaggaagaagccccacccgccaccgcctccagccacccgcggcacctccacctaccccaccgacttcagcggggtcctgcagctgtggccgcccccggcgcccccctgcctgctcagggccgcctccaagaccaaggacaaccctggcagcatcgggaaggtgaaggttatgctgcggatctggcccgcacagggggcccagcgctcggccgaggccatgtccttcctgaaggtggaccctcggaagaagcaggtgatcctctacgatcccgccgccggtcccccaggcagcgcaggcccccggcgagccgccactgctgcagttcccaagatgtttgccttcgatgccgtcttcccccaggactccgagcaggccgaagtctgctcggggaccgtggccgacgtgctccagtcggtggtcagtggggctgatggctgcattttttcctttggccacatgagcctgggcaagtcgtacaccatgatcgggaaggacagctcaccccagagcctgggcatcgtgccctgcgccatctcctggctcttcaggctcatcgaggagcgcagggagaggacgggcacccgcttctccgtccgggtctcagccgtggaggtgtgcgggcgcgaccagagcctgcgggacctgctggccgaggtggcccctggcagcctccaggacacccagtctccgggagtgtacctgcgggaggaccccgtgtgtggggcgcagctccagaaccaaagcgagctgcgggcacccacggccgagaaggcggctttctacctggatgcggccctggcggcccgcagcaccagccgagcgggctgtggcgaggacgcccgacgcagctcccacatgttgttcacgctgcacgtctaccagtaccgcatggagaagtgcggccggggaggaatgtccggaggccgcagccgcctgcacctcatcgacctgggcagctgtgaggcggcggctggcagggccggggaggctgctgggggtcccctgtgtctgtccctgtcggccctgggcagcgtcatcttggccctggtcaacggagccaagcatgtgccgtatcgggaccacaggctcaccatgctgctgcgtgaatccctggccaccgctggctgccgcaccaccatgatcgcccacgtgtcggatgcgccagcccagcacgcagagacactcagcaccgtgcagctcgccgcccgcatccaccgcctgcgcaggaagaaggccaagtacgcctccagctcctctggcggggagagctcctgtgaggaaggccgggcccgtcggcccccgcacctgcggcccttccacccacgcactgtggccctggaccccgaccgcacgcctccctgcctgcccggtgaccccgattactcctccagcagcgagcagtcctgtgacacggtcatctacgtggggcccggtggggcggcgctgtcagaccgggagctcaccgacaacgaaggtccgcctgacttcgtgcccatcatccctgccctgagccgccaccggccctccaagggtccccgagacgcagaccacttccgctgcagcaccttcgcggagctgcaggagcggctggaatgcatggacggcaacgagggtccctcaggaggtccaggtggcaccgacggagctcaggccagccccgcccgagggggccggaagccctcgccaccagaggctgcatcccccaggaaggccgtgggcaccccgatggctgccagcacccctcgaggcagttctggtccagacacccaccagggtacccctgagccctgcaaggccattgtctggggtgaccagagagaggacagcagcgcttggcctgagctgctggtcccggaaaaggctgcagtgagtggaggcaggaggccactgcccagcccggctcccccacctcctcagttgctggaagcctgcagagccccagaagagcctgggggagggggcactgatggagtggcacggacccctcccgtgggcatgagtgggcaggtggctgggtccccgatgcttcctggggccacctgcccccgcctggctgctggcagtcgctgtccggagcggggcctgctcaccaccacagtgaccctgcagcggccagtggagctcaacggcgaggacgagctggtgttcacggtggtggaggagctgtccctgggggcgcttgccggagctgggcggcccaccagcctggctagcttcgacagtgactgctccctgcgggccctggcctcggggtcccggccagtcagcatcatcagcagcatcaatgatgagtttgacgcctacacctctcaggcccctgagggggggcccctggagggggcagcctgggccggcagcagtcacggctcctccatcagctcctggctcagcgaggtcagcgtctgcactgccgacagccgtgaccccacgccgcagccccgcttcagccccgactcgctggcagggcttgaccctgggggcccccctgccctggatggttccctgggggatggaagctctgggttcctggggccagacagacctgacagtcctgggccaacctggggtccgtgccctggggaagtggctgcagtggccccatcccgacccggcagggagccccaggccgggccctcgcggtgggcatccgcagcccagaccatccactccagcctcccccggaaaccgaggactgcctctgccaccacccgtgtgggctgtgctcgcctgggccagagcccacctggccgtggaggcctgtttgaggacccatggctgctccgggtaggggagtgtgatacccaggcagcttctgctggcagggcccccagccccacacttggctccccccggctgcctgaggcccaggtgatgctagcctgtgcccagagagtggtggacgggtgtgaggtggcagccagggcggcccgcaggccagaggctgtggctcggatcccaccgctgcggaggggtgccaccacgctgggtgtgacaacgccagctgtgtcctggggagatgctcccacggaggtggtggcctgctcggggagcctgaaggcctcccccaccagcaagaagggtctggctcccaaggcgggcttcctcccgaggcccagtggggcggcccccccggccccacccacgcggaagtccagcctggagcagaggagcagcccggcctcggcccctccgcatgctgtgaacccggcgcgggtcggggctgctgctgtccttcgaggggaggaggagcccagacccagcagccgggctgaccactctgtccccagggccacgtccagcctgaaggcccgggccagcaaggtagaagcagcacaccgtcttgccggacacgcgtctctggagcggtacgaaggcctggcgcacagcagcagcaagggccgggaagcccctgggcggcctccccgggctgtacccaagctgggtgtgccaccctccagccccacacacggtccagctcccgcctgtaggagcggcgcagccaaggctgtgggggcccccaagccccctgttggtggaggcaagggccgtggcctagtggctggtgggtcgcgggctctggggccttcggtgaagctgtctacggcctctgtgacgggcaggagccctggcggccctgtggccggtcccagagcagccccacgggccgggcccagtgtcggggcgaaggctggccggggtaccgtcatgggcacaaagcaggcgctccgggctgctcacagccgcgtccatgagctgtcagccagtggagccccgggccgaggtggctcctcgtggggctcggcggactcagacagcggccatgacagcggcgtgaacgtgggggaggagcggccacccacgggcccggccctgccctccccctacagcaaggtgaccgccccacggcggccccagcgctacagcagcggccatggcagcgacaacagcagcgtgctgagtggagagctgccgcccgccatgggccgcaccgcccttttccaccacagcggtggcagcagtggctatgagagcctgcggcgcgacagcgaggccaccggcagcgcctcctccgcccctgactccatgagcgagagtggggctgcctccccaggcgcccgcacccgcagcctcaagtcccccaagaagagggccacaggtctgcagcggcggcgcctgattcccgccccactgcccgacaccactgccctgggccgtaagcccagcctccccgggcagtgggtggacctgcccccgcccctggctggctccctgaaggagccgttcgagatcaaggtgtacgagatcgatgacgtggagcgccttcagcggccccgccccaccccgagggaggcccccacccagggtctggcgtgcgtcagtacaaggctgcggctggcggagcgcaggcagcagcggctgcgggaggtgcaggccaagcacaagcacctgtgtgaggagctggccgagacccagggccggctgatgctggagcctggccgctggctggagcagtttgaggtggacccggagctggagcccgagtcggccgagtacctggcggccctggagcgagccacggcggccctggagcagtgcgtgaacctgtgcaaggcgcacgtcatgatggtcacctgcttcgacatcagcgttgcagccagtgctgccatcccggggccgcaggaggtggacgtctgaggctgggcgccggacaagaggagggggcgtgcagcgggctggaggacgggacgtgggacggagcgaggatgtggtgggggctgcggggggaggatgcggaggggtttctgtgcaggacgggagtctcagagaggagacggagtgtgggggagggagggccggccacgcggtggacagagcgagggtgccagggtgaccagaagaccgtcaccacccgacagcaacgcaagtgcctttgaccttgatttggacttttctcccttttgcatttggtgctacagacttgagacaccagcagaagttgtgttcagcccggccccgctgcgcctgtccgggccggggctggcgccggttgtgtttgtgtccaccttgccttctttgcagccaagcagtttttgtggagtggagtgggacttacctgcacgccccaggggtctttcaggattcaggatgacttttcttttacaatggtttcctctcggcagagcccgggttgtgggggatctgtgtggggttctcaacgcagatccatcctggggtctcccgggcagggatggctgacctcgagtcccctcccttcccgagaacccgctctgtcccgagggcagctaacaagggctgagccccaggtacaggttgcctcttccacggcaggaatttttaccaaaaccacaagcaaaaaacaaaacagaccaccacgaccaacaacaaagatggggggtagggttttgtaaaggttctgttaggttcatatttttatatcattttgcccataaatgcggaatttgccgtgggaatttgaagacaaatgatctatgtttttatggttttctagggaaggtgttctgggggccgggctctctccagctgtgggaggcctgctccctctggggggcaccctgggcagggtgggggggccttgggaggcgcttcttgccaaatgcagacgaggggtgagcctgccagcgtttgcgacgtccccgcacgacaggctcatactttctgaggatcgtgcatagcataggacgtctgaacctttgtacaaatgtgtagatgacatcttgctacagcttttatttgtgaattaaagatgcatcgatggtt

SEQ ID NO: 146753 - DNA, 5649 bp, Homo sapiens
  Payload ID: 9032
  Gene Symbol: KIF26A
  Gene Name: kinesin family member 26A
  Uniprot ID: Q9ULI4
  ENST ID: ENST00000423312
  CDS Start-End: 1-5649
atggtcggccgcggcgtccctctgtgcgctgcgcagcccgcggtggccgagggcggcccggcccgcgagccgccgccgctgctggaggtgtccccccgaaagaggctacccgccgggcccgaccaggacccatgcggcagccgccctgctcccgaaggcgccggggccggcccagagcagggccactcggccggcggaggcggctggtgccgccactgccacacgaagctggtggagctcaagcgacaggcgtggaagctggtcagcgggcccgggaccaccctccgggatccttgcctctctgccctgcttctcgacaagctaccagcacctggggccctgccagcctgtcgcccagaggccgagcgccgctgtgacgtctgcgccacacacctgcagcagctcacacgggaggccatgcacctgctgcaggcccctgccagccatgaggaccttgacgccccccatggaggccccagcctcgcaccccccagcaccacgaccagctcgagggacacgccaggaccagcgggtcctgcagggaggcagccaggacgagctgggccagacaggaccaaggggctggcctggtcccccgggcccagtgtccaggtgtctgtagcacctgcgggtcttggaggggcgctgagcacggtcaccatccaggcccagcagtgcctggagggcatgtggagtgtctcgcgggtcaacagcttcctcccgccggcgtgcctggccgaggcagcggtggcggccgtggcggtggcagacacggtccgagaatgcccccccgtggccggccctgatggcttgtcgaaggcctggggccgtggtggagtctgcacgtcagccctggtcacccccaccccgggctcggtggggggctccacaggcccctcagctgcagcctccttcttcataagggctatgcagaagctcagcctggcctccaagaggaagaagccccacccgccaccgcctccagccacccgcggcacctccacctaccccaccgacttcagcggggtcctgcagctgtggccgcccccggcgcccccctgcctgctcagggccgcctccaagaccaaggacaaccctggcagcatcgggaaggtgaaggttatgctgcggatctggcccgcacagggggcccagcgctcggccgaggccatgtccttcctgaaggtggaccctcggaagaagcaggtgatcctctacgatcccgccgccggtcccccaggcagcgcaggcccccggcgagccgccactgctgcagttcccaagatgtttgccttcgatgccgtcttcccccaggactccgagcaggccgaagtctgctcggggaccgtggccgacgtgctccagtcggtggtcagtggggctgatggctgcattttttcctttggccacatgagcctgggcaagtcgtacaccatgatcgggaaggacagctcaccccagagcctgggcatcgtgccctgcgccatctcctggctcttcaggctcatcgaggagcgcagggagaggacgggcacccgcttctccgtccgggtctcagccgtggaggtgtgcgggcgcgaccagagcctgcgggacctgctggccgaggtggcccctggcagcctccaggacacccagtctccgggagtgtacctgcgggaggaccccgtgtgtggggcgcagctccagaaccaaagcgagctgcgggcacccacggccgagaaggcggctttctacctggatgcggccctggcggcccgcagcaccagccgagcgggctgtggcgaggacgcccgacgcagctcccacatgttgttcacgctgcacgtctaccagtaccgcatggagaagtgcggccggggaggaatgtccggaggccgcagccgcctgcacctcatcgacctgggcagctgtgaggcggcggctggcagggccggggaggctgctgggggtcccctgtgtctgtccctgtcggccctgggcagcgtcatcttggccctggtcaacggagccaagcatgtgccgtatcgggaccacaggctcaccatgctgctgcgtgaatccctggccaccgctggctgccgcaccaccatgatcgcccacgtgtcggatgcgccagcccagcacgcagagacactcagcaccgtgcagctcgccgcccgcatccaccgcctgcgcaggaagaaggccaagtacgcctccagctcctctggcggggagagctcctgtgaggaaggccgggcccgtcggcccccgcacctgcggcccttccacccacgcactgtggccctggaccccgaccgcacgcctccctgcctgcccggtgaccccgattactcctccagcagcgagcagtcctgtgacacggtcatctacgtggggcccggtggggcggcgctgtcagaccgggagctcaccgacaacgaaggtccgcctgacttcgtgcccatcatccctgccctgagccgccaccggccctccaagggtccccgagacgcagaccacttccgctgcagcaccttcgcggagctgcaggagcggctggaatgcatggacggcaacgagggtccctcaggaggtccaggtggcaccgacggagctcaggccagccccgcccgagggggccggaagccctcgccaccagaggctgcatcccccaggaaggccgtgggcaccccgatggctgccagcacccctcgaggcagttctggtccagacacccaccagggtacccctgagccctgcaaggccattgtctggggtgaccagagagaggacagcagcgcttggcctgagctgctggtcccggaaaaggctgcagtgagtggaggcaggaggccactgcccagcccggctcccccacctcctcagttgctggaagcctgcagagccccagaagagcctgggggagggggcactgatggagtggcacggacccctcccgtgggcatgagtgggcaggtggctgggtccccgatgcttcctggggccacctgcccccgcctggctgctggcagtcgctgtccggagcggggcctgctcaccaccacagtgaccctgcagcggccagtggagctcaacggcgaggacgagctggtgttcacggtggtggaggagctgtccctgggggcgcttgccggagctgggcggcccaccagcctggctagcttcgacagtgactgctccctgcgggccctggcctcggggtcccggccagtcagcatcatcagcagcatcaatgatgagtttgacgcctacacctctcaggcccctgagggggggcccctggagggggcagcctgggccggcagcagtcacggctcctccatcagctcctggctcagcgaggtcagcgtctgcactgccgacagccgtgaccccacgccgcagccccgcttcagccccgactcgctggcagggcttgaccctgggggcccccctgccctggatggttccctgggggatggaagctctgggttcctggggccagacagacctgacagtcctgggccaacctggggtccgtgccctggggaagtggctgcagtggccccatcccgacccggcagggagccccaggccgggccctcgcggtgggcatccgcagcccagaccatccactccagcctcccccggaaaccgaggactgcctctgccaccacccgtgtgggctgtgctcgcctgggccagagcccacctggccgtggaggcctgtttgaggacccatggctgctccgggtaggggagtgtgatacccaggcagcttctgctggcagggcccccagccccacacttggctccccccggctgcctgaggcccaggtgatgctagcctgtgcccagagagtggtggacgggtgtgaggtggcagccagggcggcccgcaggccagaggctgtggctcggatcccaccgctgcggaggggtgccaccacgctgggtgtgacaacgccagctgtgtcctggggagatgctcccacggaggtggtggcctgctcggggagcctgaaggcctcccccaccagcaagaagggtctggctcccaaggcgggcttcctcccgaggcccagtggggcggcccccccggccccacccacgcggaagtccagcctggagcagaggagcagcccggcctcggcccctccgcatgctgtgaacccggcgcgggtcggggctgctgctgtccttcgaggggaggaggagcccagacccagcagccgggctgaccactctgtccccagggccacgtccagcctgaaggcccgggccagcaaggtagaagcagcacaccgtcttgccggacacgcgtctctggagcggtacgaaggcctggcgcacagcagcagcaagggccgggaagcccctgggcggcctccccgggctgtacccaagctgggtgtgccaccctccagccccacacacggtccagctcccgcctgtaggagcggcgcagccaaggctgtgggggcccccaagccccctgttggtggaggcaagggccgtggcctagtggctggtgggtcgcgggctctggggccttcggtgaagctgtctacggcctctgtgacgggcaggagccctggcggccctgtggccggtcccagagcagccccacgggccgggcccagtgtcggggcgaaggctggccggggtaccgtcatgggcacaaagcaggcgctccgggctgctcacagccgcgtccatgagctgtcagccagtggagccccgggccgaggtggctcctcgtggggctcggcggactcagacagcggccatgacagcggcgtgaacgtgggggaggagcggccacccacgggcccggccctgccctccccctacagcaaggtgaccgccccacggcggccccagcgctacagcagcggccatggcagcgacaacagcagcgtgctgagtggagagctgccgcccgccatgggccgcaccgcccttttccaccacagcggtggcagcagtggctatgagagcctgcggcgcgacagcgaggccaccggcagcgcctcctccgcccctgactccatgagcgagagtggggctgcctccccaggcgcccgcacccgcagcctcaagtcccccaagaagagggccacaggtctgcagcggcggcgcctgattcccgccccactgcccgacaccactgccctgggccgtaagcccagcctccccgggcagtgggtggacctgcccccgcccctggctggctccctgaaggagccgttcgagatcaaggtgtacgagatcgatgacgtggagcgccttcagcggccccgccccaccccgagggaggcccccacccagggtctggcgtgcgtcagtacaaggctgcggctggcggagcgcaggcagcagcggctgcgggaggtgcaggccaagcacaagcacctgtgtgaggagctggccgagacccagggccggctgatgctggagcctggccgctggctggagcagtttgaggtggacccggagctggagcccgagtcggccgagtacctggcggccctggagcgagccacggcggccctggagcagtgcgtgaacctgtgcaaggcgcacgtcatgatggtcacctgcttcgacatcagcgttgcagccagtgctgccatcccggggccgcaggaggtggacgtctga

SEQ ID NO: 146754 - DNA, 12113 bp, Homo sapiens
  Payload ID: 9033
  Gene Symbol: KIF26B
  Gene Name: kinesin family member 26B
  ENST ID: ENST00000366518
  CDS Start-End: 105-5288
tcctgagatggccccagatctgcaagagacatttgagagaagctatttattagcagacgtgaagaaatggattctgcacttgattatttagccatgacttatcaatgatgatggattggaaagcagtagctgcccagaagttaaatctgtcttctaaaaagaagaaacatcggccttccacttcttccgctgccgaaccaccgctctttgcaaccagcttcagtgggattctgcagacctcccctcccccagccccaccctgcctgctgagggctgtcaacaaggtgaaggacaccccggggctgggcaaggtgaaagtcatgcttcgcatctgttccaccttggctcgagatacttcagaatccagctctttcttaaaggtggacccacggaagaagcagatcaccttgtacgatcccctgacttgtggaggtcaaaatgccttccaaaagagaggcaaccaggttcctccaaagatgtttgccttcgatgcagtttttccacaagacgcttctcaggctgaagtgtgtgcaggcaccgtggcagaggtgatccagtctgtggtcaacggggcagatggctgcgtgttctgtttcggccacgccaaactgggaaaatcctacaccatgatcggaaaggatgattccatgcagaacctgggcatcattccctgtgccatctcttggctcttcaagctcataaacgaacgcaaggaaaagaccggcgcccgtttctcagtccgggtttccgccgtggaagtgtgggggaaggaggagaacctgcgggacctgctgtcggaggtggccacgggcagcctgcaggacggccagtccccgggcgtgtacctctgtgaggaccccatctgcggcacgcagctgcagaaccagagcgagctgcgggcccccaccgcagagaaggctgcctttttcctggatgccgccattgcctcccgcaggagccaccaacaggactgtgatgaggacgaccaccgcaactcacacgtgttcttcacactgcacatctaccagtaccggatggagaagagcgggaaagggggaatgtctggaggtcgcagccgcctgcatctcattgatctcggcagctgtgtgaaagctcttagcaaaaatcgagaaggaggctcagggctgtgtctctcgctgtctgctctgggcaatgtcatcctggctctcgtcaatggcagcaaacacattccatacaaagagagcaagctcgccatgttgctgcgggagtctctggggaacatgaactgccgtaccaccatgatcgcgcacatctcggccgcggtcgggagctacgcggagaccctgtccaccatccagattgcatcgagagtcttgaggatgaagaaaaagaagacgaagtacacatccagctcgtccggcggggagagctcctgcgaagaaggccgcatgcgcaggcccacccagctgagacccttccacaccagggccacggtggaccctgacttccccatcgctcacctgtccagcgaccccgactactcctccagcagcgagcagtcctgcgacaccgtcatctacatcgggcccaacggcacggccctctctgacaaggagctcaccgacaacgagggccccccagactttgtccctatcgtgccagccctgcagaagacccggggcgacagccggcccgcagaggcaggagaggctgcagccggcaagtcagaaagggactgcctgaagtgcaacacgtttgccgagctgcaggagaggctggactgcatcgacggcagcgaggagcccagcagctttcctttcgaagaactgcctgctcagtttgggccagagcaggcaagcagaggcccccggttaagccaagcagcgggggcaagcccactctctgagtctgataaggaagataatgggtccgaaggtcagctgaccaacagagaaggccctgaactcccagcctccaagatgcagaggagtcactcacctgtgcccgccgcggcacccgcccacagccccagcccggcctcacccaggagcgtcccgggcagcagtagccagcacagcgcctccccactcgtgcagagccccagcctccagagcagccgggagagcctcaactcctgcggcttcgtggaaggcaagcccaggcccatgggctccccccggctgggcatcgccagcctgtccaagacctcggagtacaagccacccagctctccttcccagagatgcaaagtctacacccagaagggggtcctgccgtctcccgccccactgcctccctcgagcaaggattccggcgtggcgtctagggagtccttgctgcagcccgaggtgcgtacgcccccggttggaatgagcccccaggttttgaaaaaatccatgtctgctgggagcgaagggttcccggaaactcctgtcgatgatgagcagcaggcagctactccttcagagtccaagaaggagatcctgagcaccacgatggtgacggtgcagcagccactggagctgaacggtgaggacgagctggtgttcacgctggtggaggagctgaccatcagcggggtcctggacagcggccgccccaccagcatcatcagcttcaacagcgactgctctgcacgggccctggcctcgggctcgcggcccgtcagcatcatcagcagcatcagcgaggacctggagtgctactccagcacggcccccgtctccgaggtcagcatcacacagttcttgcccctcccgaagatgagcctggatgagaaggcccaggacgcagggagcagacgctcttccatcagctcctggctgagcgagatgagcgcgggcagtgagggtgagcagtcgtgccacagtttcatagcccagacgtgttttgggcacggggaggcaatggcagaacctgtggcctcggagtttgtcagcagcctccagaacaccgctgtggtgtgcagagagaagcccaaggccagccccgacaacttgctcatcctgtctgagatgggagatgactctttcaacaaagcagcccccatcaaaggctgcaaaatatccacagtgagcaaggccatggtcaccatctccaacacggccaatctgagcagctgcgaggggtacatccccatgaagaccaatatcacagtttacccctgcattgccatgagcccccggaacatccaagagccggaggcccccaccgccacccccaaagcaggccccacattagcccagtcccgggagagtaaggaaaacagtgcaaagaaagagatgaaatttgaggacccgtggctgaaacgagaagaggaagtgaaaaaagagacggctcatcccaatgaagaagggatgatgaggtgtgagactgccacgggcccctcgaatgctgagaccagagcagagcaggagcaggacggaaagcccagtccgggagacaggctcagcagcagcagcggagaggtgtcggcctccccggtcactgacaacttcaggagggtcgtggatgggtgtgagatggccctgcccggtttggccacccagagccccgtgcatcccaacaaaagcgtcaagtccagcagccttcccagggcctttcagaaggccagccggcaggaggagccggacagcctctcctattactgcgctgctgagaccaacggggtgggtgcagcctcgggcaccccgccctccaaggctaccctggaggggaaggtggcttcccccaagcactgtgttctggctcggcccaaagggactccccctctgccccctgtccgaaagtccagcctggaccagaagaaccgggccagccctcagcacagtgccagcggcagcggcaccagcagccccctgaaccaaccagccgccttcccggcgggcctcccagacgagcctagcggcaagacgaaggacgccagcagcagcagcaagctcttcagtgccaagctggagcagctggccagcagaagcaactcgctgggcagggcgacagtcagccactacgaatgcctctccctggagcgggccgagagcctgtcctccgtgagctcccggctgcacgcgggcaaggacggcaccatgccccgcgcggggaggagcctgggccgcagcgccgggacctcgccccccagctccggggcctcgcccaaggccggccagtccaagatctccgccgtgagcagactcctcctggccagccccagagcgcgcggcccgtccgcctccaccaccaaaaccctcagcttctccaccaagtccctgccgcaggcggtgggccagggctccagctcgccccccggtgggaagcacacgccctggtccacgcagtccctcagcaggaacaggagctcgggcctggcctccaagcttcccctgcgggccgtcagcgggcgcatctcggagctgctgcagggtggcgcgggcgcccggggcttgcagctgcgggccgggcccgaggcggaggcgcgcgggggggccctggccgaggacgagcccgcggccgcgcacctgctcccgtcgccctacagcaagatcacgcccccgcggaggccccaccgctgcagcagcggccacggcagcgacaacagcagcgtgctgagcggggagctcccgccggccatggggaagacggccctgttctaccacagcggcggcagcagcggctacgagagcgtgatgcgggacagcgaggccaccggcagcgcgtcctcggcgcaggactccacgagcgagaacagcagctccgtgggcggcaggtgccggagcctcaagaccccgaagaaacgctccaatccaggttctcagagacggaggcttatcccagcactatccctggacacctcttcccctgtgagaaaaccccccaacagcacaggcgtccgctgggtggatggccccttgcggagcagcccgaggggccttggggaaccctttgagattaaagtctatgaaatcgatgacgtggagcgcctgcagcggcgacgagggggtgccagcaaggaggccatgtgcttcaatgcaaagctgaagattctggaacaccgccagcagaggatcgccgaggtccgcgcgaagtacgagtggctgatgaaggagctggaggcgaccaaacagtatctgatgctggatcccaacaagtggctcagtgaatttgacttggagcaggtttgggagctggattccctggagtacctggaggcactggagtgtgtgacggagcgcctggagagccgtgtcaacttctgcaaggcccatctcatgatgatcacctgcttcgacatcacctccaggcgccggtagatgagccagacccttgtcctagtggtcccccgctccccaggacttcagagatgttgcacgcccctaggccctctgtgctggggcatcaaagacaatgaatgaggatgaaggttggtggcaagtctggagcgggcgttgagcggaaggcgagttttcttttgttttctgtaggaaaggtgcaaacgtcaaacaccgtggaaggagaaaaggatgggaagcccgaggggtgtccaagccctgtgagactgaaaaagcactttgaggaaccttaaagaccttgtttgtacataagaactgctagcaaaagagacctcactcttctcttgctttcgtgagaaaggaggggcgtggatgtaggattgctgtggaaagcgaacacaaaacaacccagaatgactgattaagtgccttgcaaatctttattattatccaaacatttatgttcatactttcttgtgtacagatggtgctagtcaagatgaaaacaacaaaacaaacaagaaaaacattttggaaatgtattcacagctctttttctcttggtgttttatcctatttctgacttgctgtttctaagtaagttgtgtttgtagagctatttcttaatcagtattgcttatgaataaatattacctgtcttttatggttattctggtgaggccactcaaacagagagacttccctcggcacgagccagtgtgtgtgtttccaaagtaggtttggagcagcaggtgacctcgatgccacatcccaacaagcagcgtggtcaggtagacccagaaggttgattgtggggcaggtgctttagagaacaggtgaggagacggcacctgcagcacaggggaggaggagtcctttgcgacctgggccctccctgctcctgggaggtgggccgtatgttctgtagaccgtttgcccccctcaagtcctccacacatgtggttccttgacccacaaatccacagtttgcgtggccctcaaaattcatattcatttttattccaaaaagtcttgaacgaaagctggaaccaattcaccagagccatatttctttctttagtattttctagtgttgtgttgtagattgattaaagtgggtttttccccagctgagagaccttctcaggcttgttcagagacttcaactgtattggattagaagaaggattcttgagactgtacatcttgtctgttgtccagagtacaaggatttcagctctcctgtgtcccaaagcctctatgccaagaagggacaggcttgtcctctcagtctttgctcctgcccaaaggcagagagagcttcccctccataactcacacgaccctggataggcagaacatagctgaagactatggatgtccaggtcttggctcccaacaactcaggacctcaaattcagatgttcctccctataacaattcccttaggaattatgatacccattttagtgattgatagaaacctggggtacagagtggtcaagggatttccctgataaaagctgtggtgctgatgatagtgcagcccagaatctaagagtccctgcagccttcgcatcgaggatggtacttaggcgtgtgcagagcacgcttcccttttgccctcaaatgcagcatatcttcatgagcctatttatttccaagctaggctgtctttattaaccaacaactcagccccagccactccccaagcggggaaaaaaacactacgtttcttggtcagtgtacctctggacactgcagcccacacagctggctgaactcggtaaatgggaaccgaagtcttgtgagcttcacatgacctgatcctttgttatcagaacagggttcaggtggccctgttggctcatgtgctttggaagccagctccctgggtcacgagtctggctttgcactttccataagagtctgcttctatgcaaaggtgcaaacaggagacatgcccaaatctgctggctgaacaggctaaactacagtgagaggctgctctggcatggctcgttcttccttctgtgtatctcccaagtctgacaagtgtgttgccctgggaagcaggacctccctgagctccttaaccttgaccccattctgcaggacagtcgcatgctctgggctcgcctctggcctcaaagcacttgtgtaagtgggcttgcttaacagtaatatccttggaggcttctggacccaaagggaagccaatccttcgagtttgccattgggctgctggttgctggtttcaaacatatagttcatgaaaagtctttaattggagattttcaaaggtgaatattctgtttttgttggaaagaaactcatctgatgagtcatcgatgagtttggctttcgcccctgccacatcctcccctgaggttccttccatgctgcactgccttcctttagccagtgacagagcctggtgcccttcctggactgaaaccgatggaatccttccgaggggagtggcattcggcttgcctcctgcctaaatctgcttttatccatttgtagcaactttatgctgtaacaaaaggcggaaggaaaccaagagttctcttagcaagtcagactccttcccaagatggcaatcacagaacacctcgcaggatctcgcaggccacggtgaaggagaatgctttatgttgatgttgtccattctctctctcttctctttgcttttttttgacctaaataagctgcaaacatgttaatttaccaatattgataaaccacatgaagaaatcaggcattttacgttatgatgtgcttgttcctgtctctgcctataaattgactgtattgatgatgaaggaaggagttccggctgaccattctgaagcagtcccagtcacgggaggatgccttacccagtggccagacatgatagttccaggtctccccttggttttggtgatagagaacccaaggaggcaagggggaatatcaacgaacccatttctatttcattacccacaagcgaaaggactagaaaaaaatatttgaaattaacatttagatgcataggtctaactccttgtgtgaacctgtcctcctcaccccctgctccaaatatgtgaggtggaagcattagcagcggagcaaaactaagatctaagaacgggcggtggtgctattgtgtccctgggagtcactccacgtcgcattgcacggtggtgctgaggagcgagagtttgctttatcatgggctttcagttcccacctgcgagctgcaaactttgatcttgttgtccttgaattcccctctacatcacgaggaagctgtctctttcatctcttccggatttggaatcagaacactctgcccgttgtttattcgccagttgccattcttaacatgggggagcattaagatgcaaatgcagagatgtgtcctgtcttgacaaaggtgggaacccctgagctggagaaggggctcctctcatgagaagctggggtaaacagccaggcatcgcagcgtggggaattagacaggcaggaatctggcctggtttgtcataaattagccttcaacttgaagtctattatgttcttataaggcggtagtgacttcagtccagccgcatctaccatccagggtggaggttcaaaaagtcttatacgcacctacaagtctcacgcttgctgctcagactttctgataaaatctcagagttctgtttgtattgaccaaaaatgcagttgtgcccacttgggtgtgtatctcatgtccttgtaaaccagccaccttctttggatagaaggcaaggctgacaaatctgcagatttgttcaatgcaaacacagccgtctatatcattggccactgctgattatattgagtgtttttaggttttttaggtttcttattccaaaaaggattttagactgtaaaatgactaaagatgagttaatttccaaactaaaaaaggaaggagtcctgcctgtactcattgttctttcctgctggactagtaacccattcttggagcacacacagagtccctcgcttctaaagacaatacgtcttaaaccctgaaaacttgccagtgagaaagaggttgaaagtcctgtttgctattagttgaggctaagccgtctgctgccactgtccctggggcctccatgctgccgccggggtatgtggcccagctgtccccccatgaaggacactcttcaatgccaccacacgggagtctgggcagggaggaaaggcacacagcccacttttctctgcaccaaatgaaacaaagctgggtgttcagtgtcactgatgcaagtaaatgggtctcaaattttggtgggggcagtgtttctttggattctgatacctctttttccacctccagaaagtatctgtcaacattggtgggtaacagcttataaagtgcatcacttagtaatcttcctgacaaaatgacacattttaaaattacaacctgttcattatttccatcataatgcaagcgtaattctaatccgggagaagatactgtcatttaagctcatcttctcaaaaaaattttttctgaaaattcctggaaactaatttatccctccctaaacaaacacattctgcttttgggtggccctacccagaacctgcagcaatgtcataacactggacacagtgcggcttggggcagtatcaagccttcattgcatacaaaccttaatctctaagcatagttgttcccaaggtccacacgtgtggaggcgagtactgaaataccacactcacacatctattccatgcgtacctagaaattaccttcaacactaaaaaaggttccttctttcattccctatcctgctaacagcccacattgtaatatttgatttatgaagaagttctaatttatttgtgaactcaggatgttgctttacagcattgctcgtgttctctcatttacttattatgcatcacggttggaaatgctatccacgtgccgtgcatcgaggtggagatttgctggatctgtctgtggctatttttttccatgtttttctcactcaagcaaagtctgttagtggaaacatgggctgggggatggggagaggacagataaagcaagagaatagggattagggtccaatcctcaatgcacagggcttagttcaaaatctaagctgtttctgtagtaagcagccaaatgggaaagatcccttcgttttgaatttgatgagaatgggcttggaaatccacgcccaccggcttgcacggaagaggactcagcctcttcctaatggttcaacattcaattcctgaggaaagtgctgatagtattagttccctacatttccctaagactcccatccaacccctagtgctactgaagagggtttgggaaagcaattggagttccttagcttggatatatatagtacctgtttttttcctctggaaaaaccaaagtactttagtgagtcttacaatcttaaggcattttgtcccctcactgggtcccgagaggcagggaggggctaggccttgagctaggagcaaggacatgggccgccaggcctggttgttactagctgtgcaaccttgggcgagcctcttcgctttgctgggcctcaggttcccgagtggaagactgggggtcagaacagctgcccttctgggagagcatcaagagaaagtggtataagtgatgggaagtgctttgaagaaattaaaggtctgtctaggagctgggggtaatcatttacagatgaagaaactgaagtctagtcattgactggcccgagttcacagagtggttttatagcaaaacagggacttgagtccagcttattggattcttcccatcagatcatattgcaccaggtatgtgtagacatgaacacataccattcctctaaggtgtgtgtacatacacggatgtgtgtgtacaggaggtacctgacatggtgaaaggccataggacagaaaacctgagttctaattccagctttgccagtcgtcccgtccgtgatatattccataggacagaaaacctgagttctaattccagctttgccagtcatcctgtccgtgatatattccataggacagaaaacctgagttctaattccagctttgccagtcgtcccgtccgtgatatattacctaactcctccagaactcagttttctaacctataaaatgaagacattgtgctagatgatctttgtggttccttcaagctctggatctctaattccatgattagtaatgtatgtatgtgtatataaatatgcttatctgtagaaatgggcccatttgaaaagtggagacaaggtctgcccaggtgcatttattgtgccagaaacagtgaattcctaaataagttcataaaatcttgttttacaattcaatggtagtgcttaatgttactgtctgaaatccactgtttaaccagatggaagactggggccattcaaaacattattagttcacaagtgtttgctgttaaaatgcttcaataaaactcatttgttaaagtcagaaattcaactcttctgtacttgggcaggtcccagcagccccttggcaggctagttttgtgcatgggcctttgcaagctatataaacgttaggtgttggcttgattatgataaatatgagcaggctccctggagaacagtccagaaaaaaagagttatagttctcacaaactggtgacatgaatccattaagctgtgtggcattttccagtgtaaagacattgtttgctggctacgatctctgactttttgtggcatatgaggtgtaaaatgttgtcaaaaaagaatctggtgtttaaaaaaaaatcaaactatggtggcattaaatgttcacttttattct

SEQ ID NO: 146755 - DNA, 7287 bp, Homo sapiens
  Payload ID: 9033
  Gene Symbol: KIF26B
  Gene Name: kinesin family member 26B
  Uniprot ID: Q2KJY2
  ENST ID: ENST00000407071
  CDS Start-End: 441-6767
agttaccaagctcggtgaaggagacaagttcccacagctgactcggctcggctctcccaccttcccggcagcggccgcgagccctgattgtatccctcgctttcctcgtgggggagcacggactgacttggctgaagaaaatgccagttctgtggatgtggccgtgacaagaggacgtgcggctggaagaggcagaaggggacgaggaaaagcatgctttgaagagaagaataaaccagcgaccccaaccctttctgcaaattggtgctattacttgtgggatccatttgctttcattccctcccaccccaccgctgaagaaaccttgccctgagggctgagagccagccccctgcagccgggggacgcttctgggttggaggaccttctggatgtagcgtcggtggaacctttagatactctcctctggaaaagccaccatgaattcggtagctgggaataaagagaggcttgcggtctccaccaggggcaagaaatacggggtgaatgaagtctgctcgcccaccaagcccgcagcgcccttctccccggaaagctggtaccggaaagcatacgaggagtcgcgcgccggcagccggcccactcctgagggcgcgggctcagcgctcggctcctcggggaccccgtctcccggctcgggcacctcgtccccgagctcgttcaccggctccccgggacccgcctcccccggcatcggcactagttcgccgggctccttgggcggctctccgggcttcggcacaggctccccgggctccggcagcggcggcggctcctcccccggctcggaccgcggcgtctggtgcgagaactgcaacgcccgcctggtggagctcaagaggcaggccctgaggttgctcctcccggggcccttcccgggcaaggaccctgctttctcggctgtgattcacgacaaactccaggtccccaacaccatccggaaggcatggaacgaccgggacaaccgctgtgacatttgcgccactcacctgaaccagttgaagcaggaggccatccagatggtgctgacgttggagcaggcagccggcagtgagcactacgacgcctcgccctgctccccgccaccgctctccaacatccccaccctggtggggtcccggcacgtgggtgggctccagcagcccagagactgggcctttgtgcccgccccctgtgccacctccaactacacaggcttcgccaacaagcacggcagcaaacccagcagccttggggtcagcaatggggcggaaaagaagagcgggtccccaacccaccaggccaaggtcagcctccagatggccaccagtccaagcaatgggaacatcctcaattcggtggccatccaggctcaccagtacctggatggcacctggtccctgtcgagaaccaacggggtcaccctgtacccataccagatctcccagctgatgacagagagtagccgggagggactaacagaagcagtgctgaaccgctacaatgcagacaagccttccgcctgcagtgtcccagcctcgcagggctcctgcgtggccagcgagacttccacaggcacatcggtggccgcctccttctttgcacgagctgcccagaagttaaatctgtcttctaaaaagaagaaacatcggccttccacttcttccgctgccgaaccaccgctctttgcaaccagcttcagtgggattctgcagacctcccctcccccagccccaccctgcctgctgagggctgtcaacaaggtgaaggacaccccggggctgggcaaggtgaaagtcatgcttcgcatctgttccaccttggctcgagatacttcagaatccagctctttcttaaaggtggacccacggaagaagcagatcaccttgtacgatcccctgacttgtggaggtcaaaatgccttccaaaagagaggcaaccaggttcctccaaagatgtttgccttcgatgcagtttttccacaagacgcttctcaggctgaagtgtgtgcaggcaccgtggcagaggtgatccagtctgtggtcaacggggcagatggctgcgtgttctgtttcggccacgccaaactgggaaaatcctacaccatgatcggaaaggatgattccatgcagaacctgggcatcattccctgtgccatctcttggctcttcaagctcataaacgaacgcaaggaaaagaccggcgcccgtttctcagtccgggtttccgccgtggaagtgtgggggaaggaggagaacctgcgggacctgctgtcggaggtggccacgggcagcctgcaggacggccagtccccgggcgtgtacctctgtgaggaccccatctgcggcacgcagctgcagaaccagagcgagctgcgggcccccaccgcagagaaggctgcctttttcctggatgccgccattgcctcccgcaggagccaccaacaggactgtgatgaggacgaccaccgcaactcacacgtgttcttcacactgcacatctaccagtaccggatggagaagagcgggaaagggggaatgtctggaggtcgcagccgcctgcatctcattgatctcggcagctgtgtgaaagctcttagcaaaaatcgagaaggaggctcagggctgtgtctctcgctgtctgctctgggcaatgtcatcctggctctcgtcaatggcagcaaacacattccatacaaagagagcaagctcgccatgttgctgcgggagtctctggggaacatgaactgccgtaccaccatgatcgcgcacatctcggccgcggtcgggagctacgcggagaccctgtccaccatccagattgcatcgagagtcttgaggatgaagaaaaagaagacgaagtacacatccagctcgtccggcggggagagctcctgcgaagaaggccgcatgcgcaggcccacccagctgagacccttccacaccagggccacggtggaccctgacttccccatcgctcacctgtccagcgaccccgactactcctccagcagcgagcagtcctgcgacaccgtcatctacatcgggcccaacggcacggccctctctgacaaggagctcaccgacaacgagggccccccagactttgtccctatcgtgccagccctgcagaagacccggggcgacagccggcccgcagaggcaggagaggctgcagccggcaagtcagaaagggactgcctgaagtgcaacacgtttgccgagctgcaggagaggctggactgcatcgacggcagcgaggagcccagcagctttcctttcgaagaactgcctgctcagtttgggccagagcaggcaagcagaggcccccggttaagccaagcagcgggggcaagcccactctctgagtctgataaggaagataatgggtccgaaggtcagctgaccaacagagaaggccctgaactcccagcctccaagatgcagaggagtcactcacctgtgcccgccgcggcacccgcccacagccccagcccggcctcacccaggagcgtcccgggcagcagtagccagcacagcgcctccccactcgtgcagagccccagcctccagagcagccgggagagcctcaactcctgcggcttcgtggaaggcaagcccaggcccatgggctccccccggctgggcatcgccagcctgtccaagacctcggagtacaagccacccagctctccttcccagagatgcaaagtctacacccagaagggggtcctgccgtctcccgccccactgcctccctcgagcaaggattccggcgtggcgtctagggagtccttgctgcagcccgaggtgcgtacgcccccggttggaatgagcccccaggttttgaaaaaatccatgtctgctgggagcgaagggttcccggaaactcctgtcgatgatgagcagcaggcagctactccttcagagtccaagaaggagatcctgagcaccacgatggtgacggtgcagcagccactggagctgaacggtgaggacgagctggtgttcacgctggtggaggagctgaccatcagcggggtcctggacagcggccgccccaccagcatcatcagcttcaacagcgactgctctgcacgggccctggcctcgggctcgcggcccgtcagcatcatcagcagcatcagcgaggacctggagtgctactccagcacggcccccgtctccgaggtcagcatcacacagttcttgcccctcccgaagatgagcctggatgagaaggcccaggacgcagggagcagacgctcttccatcagctcctggctgagcgagatgagcgcgggcagtgagggtgagcagtcgtgccacagtttcatagcccagacgtgttttgggcacggggaggcaatggcagaacctgtggcctcggagtttgtcagcagcctccagaacaccgctgtggtgtgcagagagaagcccaaggccagccccgacaacttgctcatcctgtctgagatgggagatgactctttcaacaaagcagcccccatcaaaggctgcaaaatatccacagtgagcaaggccatggtcaccatctccaacacggccaatctgagcagctgcgaggggtacatccccatgaagaccaatatcacagtttacccctgcattgccatgagcccccggaacatccaagagccggaggcccccaccgccacccccaaagcaggccccacattagcccagtcccgggagagtaaggaaaacagtgcaaagaaagagatgaaatttgaggacccgtggctgaaacgagaagaggaagtgaaaaaagagacggctcatcccaatgaagaagggatgatgaggtgtgagactgccacgggcccctcgaatgctgagaccagagcagagcaggagcaggacggaaagcccagtccgggagacaggctcagcagcagcagcggagaggtgtcggcctccccggtcactgacaacttcaggagggtcgtggatgggtgtgagatggccctgcccggtttggccacccagagccccgtgcatcccaacaaaagcgtcaagtccagcagccttcccagggcctttcagaaggccagccggcaggaggagccggacagcctctcctattactgcgctgctgagaccaacggggtgggtgcagcctcgggcaccccgccctccaaggctaccctggaggggaaggtggcttcccccaagcactgtgttctggctcggcccaaagggactccccctctgccccctgtccgaaagtccagcctggaccagaagaaccgggccagccctcagcacagtgccagcggcagcggcaccagcagccccctgaaccaaccagccgccttcccggcgggcctcccagacgagcctagcggcaagacgaaggacgccagcagcagcagcaagctcttcagtgccaagctggagcagctggccagcagaagcaactcgctgggcagggcgacagtcagccactacgaatgcctctccctggagcgggccgagagcctgtcctccgtgagctcccggctgcacgcgggcaaggacggcaccatgccccgcgcggggaggagcctgggccgcagcgccgggacctcgccccccagctccggggcctcgcccaaggccggccagtccaagatctccgccgtgagcagactcctcctggccagccccagagcgcgcggcccgtccgcctccaccaccaaaaccctcagcttctccaccaagtccctgccgcaggcggtgggccagggctccagctcgccccccggtgggaagcacacgccctggtccacgcagtccctcagcaggaacaggagctcgggcctggcctccaagcttcccctgcgggccgtcagcgggcgcatctcggagctgctgcagggtggcgcgggcgcccggggcttgcagctgcgggccgggcccgaggcggaggcgcgcgggggggccctggccgaggacgagcccgcggccgcgcacctgctcccgtcgccctacagcaagatcacgcccccgcggaggccccaccgctgcagcagcggccacggcagcgacaacagcagcgtgctgagcggggagctcccgccggccatggggaagacggccctgttctaccacagcggcggcagcagcggctacgagagcgtgatgcgggacagcgaggccaccggcagcgcgtcctcggcgcaggactccacgagcgagaacagcagctccgtgggcggcaggtgccggagcctcaagaccccgaagaaacgctccaatccaggttctcagagacggaggcttatcccagcactatccctggacacctcttcccctgtgagaaaaccccccaacagcacaggcgtccgctgggtggatggccccttgcggagcagcccgaggggccttggggaaccctttgagattaaagtctatgaaatcgatgacgtggagcgcctgcagcggcgacgagggggtgccagcaaggaggccatgtgcttcaatgcaaagctgaagattctggaacaccgccagcagaggatcgccgaggtccgcgcgaagtacgagtggctgatgaaggagctggaggcgaccaaacagtatctgatgctggatcccaacaagtggctcagtgaatttgacttggagcaggtttgggagctggattccctggagtacctggaggcactggagtgtgtgacggagcgcctggagagccgtgtcaacttctgcaaggcccatctcatgatgatcacctgcttcgacatcacctccaggcgccggtagatgagccagacccttgtcctagtggtcccccgctccccaggacttcagagatgttgcacgcccctaggccctctgtgctggggcatcaaagacaatgaatgaggatgaaggttggtggcaagtctggagcgggcgttgagcggaaggcgagttttcttttgttttctgtaggaaaggtgcaaacgtcaaacaccgtggaaggagaaaaggatgggaagcccgaggggtgtccaagccctgtgagactgaaaaagcactttgaggaaccttaaagaccttgtttgtacataagaactgctagcaaaagagacctcactcttctcttgctttcgtgagaaaggaggggcgtggatgtaggattgctgtggaaagcgaacacaaaacaacccagaatgactgattaagtgccttgcaaatctttattattatccaaacatttatgttcatactttcttgtgtacagatggtgctagtcaagatgaaaacaacaaaacaaacaagaaaaacattttggaaatgt

SEQ ID NO: 146756 - DNA, 12690 bp, Homo sapiens
  Payload ID: 9033
  Gene Symbol: KIF26B
  Gene Name: kinesin family member 26B
  ENST ID: ENST00000629409
  CDS Start-End: 1-5864
aggaccctgctttctcggctgtgattcacgacaaactccaggtccccaacaccatccggaaggcatggaacgaccgggacaaccgctgtgacatttgcgccactcacctgaaccagttgaagcaggaggccatccagatggtgctgacgttggagcaggcagccggcagtgagcactacgacgcctcgccctgctccccgccaccgctctccaacatccccaccctggtggggtcccggcacgtgggtgggctccagcagcccagagactgggcctttgtgcccgccccctgtgccacctccaactacacaggcttcgccaacaagcacggcagcaaacccagcagccttggggtcagcaatggggcggaaaagaagagcgggtccccaacccaccaggccaaggtcagcctccagatggccaccagtccaagcaatgggaacatcctcaattcggtggccatccaggctcaccagtacctggatggcacctggtccctgtcgagaaccaacggggtcaccctgtacccataccagatctcccagctgatgacagagagtagccgggagggactaacagaagcagtgctgaaccgctacaatgcagacaagccttccgcctgcagtgtcccagcctcgcagggctcctgcgtggccagcgagacttccacaggcacatcggtggccgcctccttctttgcacgagctgcccagaagttaaatctgtcttctaaaaagaagaaacatcggccttccacttcttccgctgccgaaccaccgctctttgcaaccagcttcagtgggattctgcagacctcccctcccccagccccaccctgcctgctgagggctgtcaacaaggtgaaggacaccccggggctgggcaaggtgaaagtcatgcttcgcatctgttccaccttggctcgagatacttcagaatccagctctttcttaaaggtggacccacggaagaagcagatcaccttgtacgatcccctgacttgtggaggtcaaaatgccttccaaaagagaggcaaccaggttcctccaaagatgtttgccttcgatgcagtttttccacaagacgcttctcaggctgaagtgtgtgcaggcaccgtggcagaggtgatccagtctgtggtcaacggggcagatggctgcgtgttctgtttcggccacgccaaactgggaaaatcctacaccatgatcggaaaggatgattccatgcagaacctgggcatcattccctgtgccatctcttggctcttcaagctcataaacgaacgcaaggaaaagaccggcgcccgtttctcagtccgggtttccgccgtggaagtgtgggggaaggaggagaacctgcgggacctgctgtcggaggtggccacgggcagcctgcaggacggccagtccccgggcgtgtacctctgtgaggaccccatctgcggcacgcagctgcagaaccagagcgagctgcgggcccccaccgcagagaaggctgcctttttcctggatgccgccattgcctcccgcaggagccaccaacaggactgtgatgaggacgaccaccgcaactcacacgtgttcttcacactgcacatctaccagtaccggatggagaagagcgggaaagggggaatgtctggaggtcgcagccgcctgcatctcattgatctcggcagctgtgtgaaagctcttagcaaaaatcgagaaggaggctcagggctgtgtctctcgctgtctgctctgggcaatgtcatcctggctctcgtcaatggcagcaaacacattccatacaaagagagcaagctcgccatgttgctgcgggagtctctggggaacatgaactgccgtaccaccatgatcgcgcacatctcggccgcggtcgggagctacgcggagaccctgtccaccatccagattgcatcgagagtcttgaggatgaagaaaaagaagacgaagtacacatccagctcgtccggcggggagagctcctgcgaagaaggccgcatgcgcaggcccacccagctgagacccttccacaccagggccacggtggaccctgacttccccatcgctcacctgtccagcgaccccgactactcctccagcagcgagcagtcctgcgacaccgtcatctacatcgggcccaacggcacggccctctctgacaaggagctcaccgacaacgagggccccccagactttgtccctatcgtgccagccctgcagaagacccggggcgacagccggcccgcagaggcaggagaggctgcagccggcaagtcagaaagggactgcctgaagtgcaacacgtttgccgagctgcaggagaggctggactgcatcgacggcagcgaggagcccagcagctttcctttcgaagaactgcctgctcagtttgggccagagcaggcaagcagaggcccccggttaagccaagcagcgggggcaagcccactctctgagtctgataaggaagataatgggtccgaaggtcagctgaccaacagagaaggccctgaactcccagcctccaagatgcagaggagtcactcacctgtgcccgccgcggcacccgcccacagccccagcccggcctcacccaggagcgtcccgggcagcagtagccagcacagcgcctccccactcgtgcagagccccagcctccagagcagccgggagagcctcaactcctgcggcttcgtggaaggcaagcccaggcccatgggctccccccggctgggcatcgccagcctgtccaagacctcggagtacaagccacccagctctccttcccagagatgcaaagtctacacccagaagggggtcctgccgtctcccgccccactgcctccctcgagcaaggattccggcgtggcgtctagggagtccttgctgcagcccgaggtgcgtacgcccccggttggaatgagcccccaggttttgaaaaaatccatgtctgctgggagcgaagggttcccggaaactcctgtcgatgatgagcagcaggcagctactccttcagagtccaagaaggagatcctgagcaccacgatggtgacggtgcagcagccactggagctgaacggtgaggacgagctggtgttcacgctggtggaggagctgaccatcagcggggtcctggacagcggccgccccaccagcatcatcagcttcaacagcgactgctctgcacgggccctggcctcgggctcgcggcccgtcagcatcatcagcagcatcagcgaggacctggagtgctactccagcacggcccccgtctccgaggtcagcatcacacagttcttgcccctcccgaagatgagcctggatgagaaggcccaggacgcagggagcagacgctcttccatcagctcctggctgagcgagatgagcgcgggcagtgagggtgagcagtcgtgccacagtttcatagcccagacgtgttttgggcacggggaggcaatggcagaacctgtggcctcggagtttgtcagcagcctccagaacaccgctgtggtgtgcagagagaagcccaaggccagccccgacaacttgctcatcctgtctgagatgggagatgactctttcaacaaagcagcccccatcaaaggctgcaaaatatccacagtgagcaaggccatggtcaccatctccaacacggccaatctgagcagctgcgaggggtacatccccatgaagaccaatatcacagtttacccctgcattgccatgagcccccggaacatccaagagccggaggcccccaccgccacccccaaagcaggccccacattagcccagtcccgggagagtaaggaaaacagtgcaaagaaagagatgaaatttgaggacccgtggctgaaacgagaagaggaagtgaaaaaagagacggctcatcccaatgaagaagggatgatgaggtgtgagactgccacgggcccctcgaatgctgagaccagagcagagcaggagcaggacggaaagcccagtccgggagacaggctcagcagcagcagcggagaggtgtcggcctccccggtcactgacaacttcaggagggtcgtggatgggtgtgagatggccctgcccggtttggccacccagagccccgtgcatcccaacaaaagcgtcaagtccagcagccttcccagggcctttcagaaggccagccggcaggaggagccggacagcctctcctattactgcgctgctgagaccaacggggtgggtgcagcctcgggcaccccgccctccaaggctaccctggaggggaaggtggcttcccccaagcactgtgttctggctcggcccaaagggactccccctctgccccctgtccgaaagtccagcctggaccagaagaaccgggccagccctcagcacagtgccagcggcagcggcaccagcagccccctgaaccaaccagccgccttcccggcgggcctcccagacgagcctagcggcaagacgaaggacgccagcagcagcagcaagctcttcagtgccaagctggagcagctggccagcagaagcaactcgctgggcagggcgacagtcagccactacgaatgcctctccctggagcgggccgagagcctgtcctccgtgagctcccggctgcacgcgggcaaggacggcaccatgccccgcgcggggaggagcctgggccgcagcgccgggacctcgccccccagctccggggcctcgcccaaggccggccagtccaagatctccgccgtgagcagactcctcctggccagccccagagcgcgcggcccgtccgcctccaccaccaaaaccctcagcttctccaccaagtccctgccgcaggcggtgggccagggctccagctcgccccccggtgggaagcacacgccctggtccacgcagtccctcagcaggaacaggagctcgggcctggcctccaagcttcccctgcgggccgtcagcgggcgcatctcggagctgctgcagggtggcgcgggcgcccggggcttgcagctgcgggccgggcccgaggcggaggcgcgcgggggggccctggccgaggacgagcccgcggccgcgcacctgctcccgtcgccctacagcaagatcacgcccccgcggaggccccaccgctgcagcagcggccacggcagcgacaacagcagcgtgctgagcggggagctcccgccggccatggggaagacggccctgttctaccacagcggcggcagcagcggctacgagagcgtgatgcgggacagcgaggccaccggcagcgcgtcctcggcgcaggactccacgagcgagaacagcagctccgtgggcggcaggtgccggagcctcaagaccccgaagaaacgctccaatccaggttctcagagacggaggcttatcccagcactatccctggacacctcttcccctgtgagaaaaccccccaacagcacaggcgtccgctgggtggatggccccttgcggagcagcccgaggggccttggggaaccctttgagattaaagtctatgaaatcgatgacgtggagcgcctgcagcggcgacgagggggtgccagcaaggaggccatgtgcttcaatgcaaagctgaagattctggaacaccgccagcagaggatcgccgaggtccgcgcgaagtacgagtggctgatgaaggagctggaggcgaccaaacagtatctgatgctggatcccaacaagtggctcagtgaatttgacttggagcaggtttgggagctggattccctggagtacctggaggcactggagtgtgtgacggagcgcctggagagccgtgtcaacttctgcaaggcccatctcatgatgatcacctgcttcgacatcacctccaggcgccggtagatgagccagacccttgtcctagtggtcccccgctccccaggacttcagagatgttgcacgcccctaggccctctgtgctggggcatcaaagacaatgaatgaggatgaaggttggtggcaagtctggagcgggcgttgagcggaaggcgagttttcttttgttttctgtaggaaaggtgcaaacgtcaaacaccgtggaaggagaaaaggatgggaagcccgaggggtgtccaagccctgtgagactgaaaaagcactttgaggaaccttaaagaccttgtttgtacataagaactgctagcaaaagagacctcactcttctcttgctttcgtgagaaaggaggggcgtggatgtaggattgctgtggaaagcgaacacaaaacaacccagaatgactgattaagtgccttgcaaatctttattattatccaaacatttatgttcatactttcttgtgtacagatggtgctagtcaagatgaaaacaacaaaacaaacaagaaaaacattttggaaatgtattcacagctctttttctcttggtgttttatcctatttctgacttgctgtttctaagtaagttgtgtttgtagagctatttcttaatcagtattgcttatgaataaatattacctgtcttttatggttattctggtgaggccactcaaacagagagacttccctcggcacgagccagtgtgtgtgtttccaaagtaggtttggagcagcaggtgacctcgatgccacatcccaacaagcagcgtggtcaggtagacccagaaggttgattgtggggcaggtgctttagagaacaggtgaggagacggcacctgcagcacaggggaggaggagtcctttgcgacctgggccctccctgctcctgggaggtgggccgtatgttctgtagaccgtttgcccccctcaagtcctccacacatgtggttccttgacccacaaatccacagtttgcgtggccctcaaaattcatattcatttttattccaaaaagtcttgaacgaaagctggaaccaattcaccagagccatatttctttctttagtattttctagtgttgtgttgtagattgattaaagtgggtttttccccagctgagagaccttctcaggcttgttcagagacttcaactgtattggattagaagaaggattcttgagactgtacatcttgtctgttgtccagagtacaaggatttcagctctcctgtgtcccaaagcctctatgccaagaagggacaggcttgtcctctcagtctttgctcctgcccaaaggcagagagagcttcccctccataactcacacgaccctggataggcagaacatagctgaagactatggatgtccaggtcttggctcccaacaactcaggacctcaaattcagatgttcctccctataacaattcccttaggaattatgatacccattttagtgattgatagaaacctggggtacagagtggtcaagggatttccctgataaaagctgtggtgctgatgatagtgcagcccagaatctaagagtccctgcagccttcgcatcgaggatggtacttaggcgtgtgcagagcacgcttcccttttgccctcaaatgcagcatatcttcatgagcctatttatttccaagctaggctgtctttattaaccaacaactcagccccagccactccccaagcggggaaaaaaacactacgtttcttggtcagtgtacctctggacactgcagcccacacagctggctgaactcggtaaatgggaaccgaagtcttgtgagcttcacatgacctgatcctttgttatcagaacagggttcaggtggccctgttggctcatgtgctttggaagccagctccctgggtcacgagtctggctttgcactttccataagagtctgcttctatgcaaaggtgcaaacaggagacatgcccaaatctgctggctgaacaggctaaactacagtgagaggctgctctggcatggctcgttcttccttctgtgtatctcccaagtctgacaagtgtgttgccctgggaagcaggacctccctgagctccttaaccttgaccccattctgcaggacagtcgcatgctctgggctcgcctctggcctcaaagcacttgtgtaagtgggcttgcttaacagtaatatccttggaggcttctggacccaaagggaagccaatccttcgagtttgccattgggctgctggttgctggtttcaaacatatagttcatgaaaagtctttaattggagattttcaaaggtgaatattctgtttttgttggaaagaaactcatctgatgagtcatcgatgagtttggctttcgcccctgccacatcctcccctgaggttccttccatgctgcactgccttcctttagccagtgacagagcctggtgcccttcctggactgaaaccgatggaatccttccgaggggagtggcattcggcttgcctcctgcctaaatctgcttttatccatttgtagcaactttatgctgtaacaaaaggcggaaggaaaccaagagttctcttagcaagtcagactccttcccaagatggcaatcacagaacacctcgcaggatctcgcaggccacggtgaaggagaatgctttatgttgatgttgtccattctctctctcttctctttgcttttttttgacctaaataagctgcaaacatgttaatttaccaatattgataaaccacatgaagaaatcaggcattttacgttatgatgtgcttgttcctgtctctgcctataaattgactgtattgatgatgaaggaaggagttccggctgaccattctgaagcagtcccagtcacgggaggatgccttacccagtggccagacatgatagttccaggtctccccttggttttggtgatagagaacccaaggaggcaagggggaatatcaacgaacccatttctatttcattacccacaagcgaaaggactagaaaaaaatatttgaaattaacatttagatgcataggtctaactccttgtgtgaacctgtcctcctcaccccctgctccaaatatgtgaggtggaagcattagcagcggagcaaaactaagatctaagaacgggcggtggtgctattgtgtccctgggagtcactccacgtcgcattgcacggtggtgctgaggagcgagagtttgctttatcatgggctttcagttcccacctgcgagctgcaaactttgatcttgttgtccttgaattcccctctacatcacgaggaagctgtctctttcatctcttccggatttggaatcagaacactctgcccgttgtttattcgccagttgccattcttaacatgggggagcattaagatgcaaatgcagagatgtgtcctgtcttgacaaaggtgggaacccctgagctggagaaggggctcctctcatgagaagctggggtaaacagccaggcatcgcagcgtggggaattagacaggcaggaatctggcctggtttgtcataaattagccttcaacttgaagtctattatgttcttataaggcggtagtgacttcagtccagccgcatctaccatccagggtggaggttcaaaaagtcttatacgcacctacaagtctcacgcttgctgctcagactttctgataaaatctcagagttctgtttgtattgaccaaaaatgcagttgtgcccacttgggtgtgtatctcatgtccttgtaaaccagccaccttctttggatagaaggcaaggctgacaaatctgcagatttgttcaatgcaaacacagccgtctatatcattggccactgctgattatattgagtgtttttaggttttttaggtttcttattccaaaaaggattttagactgtaaaatgactaaagatgagttaatttccaaactaaaaaaggaaggagtcctgcctgtactcattgttctttcctgctggactagtaacccattcttggagcacacacagagtccctcgcttctaaagacaatacgtcttaaaccctgaaaacttgccagtgagaaagaggttgaaagtcctgtttgctattagttgaggctaagccgtctgctgccactgtccctggggcctccatgctgccgccggggtatgtggcccagctgtccccccatgaaggacactcttcaatgccaccacacgggagtctgggcagggaggaaaggcacacagcccacttttctctgcaccaaatgaaacaaagctgggtgttcagtgtcactgatgcaagtaaatgggtctcaaattttggtgggggcagtgtttctttggattctgatacctctttttccacctccagaaagtatctgtcaacattggtgggtaacagcttataaagtgcatcacttagtaatcttcctgacaaaatgacacattttaaaattacaacctgttcattatttccatcataatgcaagcgtaattctaatccgggagaagatactgtcatttaagctcatcttctcaaaaaaattttttctgaaaattcctggaaactaatttatccctccctaaacaaacacattctgcttttgggtggccctacccagaacctgcagcaatgtcataacactggacacagtgcggcttggggcagtatcaagccttcattgcatacaaaccttaatctctaagcatagttgttcccaaggtccacacgtgtggaggcgagtactgaaataccacactcacacatctattccatgcgtacctagaaattaccttcaacactaaaaaaggttccttctttcattccctatcctgctaacagcccacattgtaatatttgatttatgaagaagttctaatttatttgtgaactcaggatgttgctttacagcattgctcgtgttctctcatttacttattatgcatcacggttggaaatgctatccacgtgccgtgcatcgaggtggagatttgctggatctgtctgtggctatttttttccatgtttttctcactcaagcaaagtctgttagtggaaacatgggctgggggatggggagaggacagataaagcaagagaatagggattagggtccaatcctcaatgcacagggcttagttcaaaatctaagctgtttctgtagtaagcagccaaatgggaaagatcccttcgttttgaatttgatgagaatgggcttggaaatccacgcccaccggcttgcacggaagaggactcagcctcttcctaatggttcaacattcaattcctgaggaaagtgctgatagtattagttccctacatttccctaagactcccatccaacccctagtgctactgaagagggtttgggaaagcaattggagttccttagcttggatatatatagtacctgtttttttcctctggaaaaaccaaagtactttagtgagtcttacaatcttaaggcattttgtcccctcactgggtcccgagaggcagggaggggctaggccttgagctaggagcaaggacatgggccgccaggcctggttgttactagctgtgcaaccttgggcgagcctcttcgctttgctgggcctcaggttcccgagtggaagactgggggtcagaacagctgcccttctgggagagcatcaagagaaagtggtataagtgatgggaagtgctttgaagaaattaaaggtctgtctaggagctgggggtaatcatttacagatgaagaaactgaagtctagtcattgactggcccgagttcacagagtggttttatagcaaaacagggacttgagtccagcttattggattcttcccatcagatcatattgcaccaggtatgtgtagacatgaacacataccattcctctaaggtgtgtgtacatacacggatgtgtgtgtacaggaggtacctgacatggtgaaaggccataggacagaaaacctgagttctaattccagctttgccagtcgtcccgtccgtgatatattccataggacagaaaacctgagttctaattccagctttgccagtcatcctgtccgtgatatattccataggacagaaaacctgagttctaattccagctttgccagtcgtcccgtccgtgatatattacctaactcctccagaactcagttttctaacctataaaatgaagacattgtgctagatgatctttgtggttccttcaagctctggatctctaattccatgattagtaatgtatgtatgtgtatataaatatgcttatctgtagaaatgggcccatttgaaaagtggagacaaggtctgcccaggtgcatttattgtgccagaaacagtgaattcctaaataagttcataaaatcttgttttacaattcaatggtagtgcttaatgttactgtctgaaatccactgtttaaccagatggaagactggggccattcaaaacattattagttcacaagtgtttgctgttaaaatgcttcaataaaactcatttgttaaagtcagaaattcaactcttctgtacttgggcaggtcccagcagccccttggcaggctagttttgtgcatgggcctttgcaagctatataaacgttaggtgttggcttgattatgataaatatgagcaggctccctggagaacagtccagaaaaaaagagttatagttctcacaaactggtgacatgaatccattaagctgtgtggcattttccagtgtaaagacattgtttgctggctacgatctctgactttttgtggcatatgaggtgtaaaatgttgtcaaaaaagaatctggtgtttaaaaaaaaatcaaactatggtggcattaaatgttcacttttattcta

SEQ ID NO: 146757 - DNA, 4653 bp, Homo sapiens
  Payload ID: 9034
  Gene Symbol: KIF27
  Gene Name: kinesin family member 27
  Uniprot ID: Q86VH2
  ENST ID: ENST00000297814
  CDS Start-End: 145-4350
agagcgaagctgaggagtccagcgctcgccgacaggggcctgggctgtcccgagccggaatccagatcttacataagatggaagtctctcacactagatactgaacattaaatagaaaatctatttagtaaaatctaagttgccatggaagaaataccagtaaaagttgctgtaagaattagacctctgctttgcaaagaagctcttcataatcatcaagtttgtgtgagagttattccaaacagccagcaagttatcattgggagagatagagtcttcacttttgattttgtttttggcaaaaattccactcaagatgaagtttataacacatgtataaagcccctagtgttgtcactcattgagggctataatgcaactgtttttgcctatggacaaactggatctgggaagacatacaccattggagggggccatattgcttcagttgtggagggccaaaagggtatcattcctcgagctattcaagaaatatttcaaagcatctctgaacatcctagcattgactttaatgtaaaagtatcttatatagaagtgtacaaggaagacctaagagatcttctagaattggagacatccatgaaggatcttcacatccgagaagatgaaaaaggaaacacagtgattgttggggccaaggaatgccatgtggagagtgcaggtgaagtgatgagtcttttggagatggggaatgcagccagacatacaggtaccactcaaatgaatgagcactccagcagatcacatgcaatttttacaatcagcatttgtcaagttcataaaaatatggaggcagctgaagatggatcatggtattcccctcggcatattgtctcaaagttccactttgtggatttggcaggatcagaaagagtaaccaaaacggggaatactggtgaacggttcaaagaatccattcaaatcaatagtggattgctggctttaggaaatgtaataagcgctcttggggacccacgcaggaagagttcacatattccatatagggatgctaaaattacccggcttctgaaagattctctgggaggcagtgctaagactgtcatgatcacatgtgtcagcccctcctcctcgaattttgatgagtccttaaattctctcaaatatgccaacagagcacggaacattagaaacaaacccactgtaaacttcagccccgagtcagaccgtatagatgaaatggaatttgagattaaattgcttcgagaagctttgcaaagccagcaggctggtgtcagccaaactacccagatcaatcgagaagggagtcctgatacaaataggattcattctcttgaggagcaagtagctcagcttcaaggagaatgtctgggttaccagtgttgtgtagaagaagcctttaccttcctggttgacctaaaagatactgtcagactaaacgaaaagcagcaacacaaactgcaggagtggtttaacatgatccaagaggtcaggaaggctgtcctcacctcatttcgaggaatcggaggcactgcaagtctggaagaaggaccacagcatgttacagttctccagctgaagagagagcttaagaaatgccagtgtgtgcttgctgctgatgaagtagtatttaatcagaaggaactggaggtgaaggaactgaagaatcaagtgcagatgatggtacaggaaaacaaagggcatgctgtatctttgaaagaagcgcaaaaagtgaatagactgcagaatgaaaaaataatagaacaacaacttcttgtggatcaactgagtgaagaactaacaaaacttaacctgtcagtgacttcttcagctaaagaaaattgtggagatgggccagatgccaggatccctgaaaggagaccatatactgtaccatttgatactcatttggggcattatatttatatcccatcaagacaagattccaggaaggtccacacaagtccgcctatgtactctctggatcgaatatttgctggatttcgaacacgaagtcagatgctgttgggtcacatagaagaacaagataaggtcctccactgccaattttctgataacagtgatgatgaagaatcagaaggccaagagaaatctggaactagatgtagaagtcgttcatggattcagaagccagactctgtttgttcccttgttgaattgagtgatactcaggatgaaacacaaaagtcagatttggagaatgaagatttaaagattgattgtctccaggagagtcaagaattgaatttgcaaaaattaaagaattcagaacgcatacttactgaagctaaacaaaaaatgagagaacttacaattaacatcaagatgaaggaagatctgattaaagaattaataaaaacaggtaatgatgccaagtctgtaagcaagcagtattctttgaaagtaacaaagctagagcatgatgcagaacaggcaaaagtcgaactgattgaaacacaaaagcagctacaggagctggaaaacaaagatctttctgatgttgcaatgaaggtaaaattacagaaagagtttcgtaaaaagatggatgctgcaaagctgagagttcaggtcttgcagaagaagcaacaagatagtaagaaactggcatcactgtcaatccaaaatgagaaacgtgctaatgagctagagcagagtgtagatcacatgaaatatcaaaagatacagctacaaagaaaactacgagaagaaaatgaaaaaaggaagcaactggatgcagtaattaagcgggaccagcaaaaaatcaaagaaatacaattaaaaacaggacaggaagaaggtctaaaaccgaaagctgaggaccttgatgcatgtaacttgaaaaggagaaaaggttcgtttggaagtatagaccatctccagaaattggatgagcaaaagaaatggttagatgaagaagtagagaaagttctgaaccaacgccaagaattagaggagctggaagcagacttaaagaaacgggaggccatagtttctaagaaggaggctctgttacaggagaagagtcacctggaaaataagaaattgagatctagtcaggccttaaacacagatagtttgaaaatatcaactcgcctgaacttactggaacaagagttgtctgaaaagaatgtgcagctccagaccagtacagctgaggagaaaacaaagatttcagaacaagttgaagtcctccagaaagaaaaggatcagctccagaaacgcagacacaatgtggatgaaaaacttaaaaatggtagagtgttatcacctgaagaagaacatgttcttttccaacttgaagaagggattgaagctttggaagctgcaattgaatacaggaatgaaagtatccagaatcgccagaagtcacttagagcatcattccataacctctctcgtggtgaagcaaatgtcttggaaaagctagcttgcctgagtcctgttgagattagaactattcttttcagatatttcaataaggtggtgaatttgcgagaagctgaacggaaacaacagttatataatgaagaaatgaaaatgaaagttctggaacgggataatatggttcgtgaattagaatctgcactggaccatctaaaattgcagtgtgaccggagactgaccctccagcaaaaggaacacgaacaaaagatgcagttgctattacatcatttcaaagaacaagatggagaaggcattatggaaactttcaaaacatatgaagataaaatccagcagttggaaaaagatctttatttctataagaaaaccagccgggatcataagaagaaacttaaggaactggtaggggaagcaattcggcggcaactagcaccatcagagtatcaagaggctggagatggagtcctgaagccagaaggaggaggcatgctttcagaagaattaaaatgggcatccagacctgaaagtatgaaattaagtggaagagaaagagaaatggacagttcagcaagcagcttaagaacacagccaaatcctcaaaagctctgggaagatatcccagaattacctccaattcatagttctttagcaccccccagtgggcatatgttaggtaatgagaataaaacagaaacagatgataatcagtttacaaaatctcacagtcgactgtcatcccaaattcaggttgtgggaaatgtgggacgacttcatggtgtcacacctgtaaaactgtgtcgaaaagaattacgtcaaatttccgccttggaactatcattgcgacgttccagtcttggagttggcattggatcaatggctgctgattccatcgaagtatctaggaaaccaagggacttaaaaacttagacattgaataatagaacttttagtagatatgtaaaaagattcctttttctaacctgttaaaaactaaagctcaagttcactacctctttcctcagaataaaggaagaaggggaggaaggaatccctaattcttttatatgctatagatgtgtacatcttctatatatatttggggagttttagtttatattcccatagtaatcaaacatgttttccaatacttgataacatttaaatatttataaatacgcttaaatgtttttccaggcatatttgaagattaaaactagtaatagactaaaa

SEQ ID NO: 146758 - DNA, 4400 bp, Homo sapiens
  Payload ID: 9034
  Gene Symbol: KIF27
  Gene Name: kinesin family member 27
  Uniprot ID: Q86VH2
  ENST ID: ENST00000334204
  CDS Start-End: 183-4097
gacaacaaaagacgcggacggcggctgcgcggtgtggcagagcgaagctgaggagtccagcgctcgccgacaggggcctgggctgtcccgagccggaatccagatcttacataagatggaagtctctcacactagatactgaacattaaatagaaaatctatttagtaaaatctaagttgccatggaagaaataccagtaaaagttgctgtaagaattagacctctgctttgcaaagaagctcttcataatcatcaagtttgtgtgagagttattccaaacagccagcaagttatcattgggagagatagagtcttcacttttgattttgtttttggcaaaaattccactcaagatgaagtttataacacatgtataaagcccctagtgttgtcactcattgagggctataatgcaactgtttttgcctatggacaaactggatctgggaagacatacaccattggagggggccatattgcttcagttgtggagggccaaaagggtatcattcctcgagctattcaagaaatatttcaaagcatctctgaacatcctagcattgactttaatgtaaaagtatcttatatagaagtgtacaaggaagacctaagagatcttctagaattggagacatccatgaaggatcttcacatccgagaagatgaaaaaggaaacacagtgattgttggggccaaggaatgccatgtggagagtgcaggtgaagtgatgagtcttttggagatggggaatgcagccagacatacaggtaccactcaaatgaatgagcactccagcagatcacatgcaatttttacaatcagcatttgtcaagttcataaaaatatggaggcagctgaagatggatcatggtattcccctcggcatattgtctcaaagttccactttgtggatttggcaggatcagaaagagtaaccaaaacggggaatactggtgaacggttcaaagaatccattcaaatcaatagtggattgctggctttaggaaatgtaataagcgctcttggggacccacgcaggaagagttcacatattccatatagggatgctaaaattacccggcttctgaaagattctctgggaggcagtgctaagactgtcatgatcacatgtgtcagcccctcctcctcgaattttgatgagtccttaaattctctcaaatatgccaacagagcacggaacattagaaacaaacccactgtaaacttcagccccgagtcagaccgtatagatgaaatggaatttgagattaaattgcttcgagaagctttgcaaagccagcaggctggtgtcagccaaactacccagatcaatcgagaagggagtcctgatacaaataggattcattctcttgaggagcaagtagctcagcttcaaggagaatgtctgggttaccagtgttgtgtagaagaagcctttaccttcctggttgacctaaaagatactgtcagactaaacgaaaagcagcaacacaaactgcaggagtggtttaacatgatccaagaggtcaggaaggctgtcctcacctcatttcgaggaatcggaggcactgcaagtctggaagaaggaccacagcatgttacagttctccagctgaagagagagcttaagaaatgccagtgtgtgcttgctgctgatgaagtagtatttaatcagaaggaactggaggtgaaggaactgaagaatcaagtgcagatgatggtacaggaaaacaaagggcatgctgtatctttgaaagaagcgcaaaaagtgaatagactgcagaatgaaaaaataatagaacaacaacttcttgtggatcaactgagtgaagaactaacaaaacttaacctgtcagtgacttcttcagctaaagaaaattgtggagatgggccagatgccaggatccctgaaaggagaccatatactgtaccatttgatactcatttggggcattatatttatatcccatcaagacaagattccaggaaggtccacacaagtccgcctatgtactctctggatcgaatatttgctggatttcgaacacgaagtcagatgctgttgggtcacatagaagaacaagataaggtcctccactgccaattttctgataacagtgatgatgaagaatcagaaggccaagagaaatctggaactagatgtagaagtcgttcatggattcagaagccagactctgtttgttcccttgttgaattgagtgatactcaggatgaaacacaaaagtcagatttggagaatgaagatttaaagattgattgtctccaggagagtcaagaattgaatttgcaaaaattaaagaattcagaacgcatacttactgaagctaaacaaaaaatgagagaacttacaattaacatcaagatgaaggaagatctgattaaagaattaataaaaacaggtaatgatgccaagtctgtaagcaagcagtattctttgaaagtaacaaagctagagcatgatgcagaacaggcaaaagtcgaactgattgaaacacaaaagcagctacaggagctggaaaacaaagatctttctgatgttgcaatgaaggtaaaattacagaaagagtttcgtaaaaagatggatgctgcaaagctgagagttcaggtcttgcagaagaagcaacaagatagtaagaaactggcatcactgtcaatccaaaatgagaaacgtgctaatgagctagagcagagtgtagatcacatgaaatatcaaaagatacagctacaaagaaaactacgagaagaaaatgaaaaaaggaagcaactggatgcagtaattaagcgggaccagcaaaaaatcaaagccttaaacacagatagtttgaaaatatcaactcgcctgaacttactggaacaagagttgtctgaaaagaatgtgcagctccagaccagtacagctgaggagaaaacaaagatttcagaacaagttgaagtcctccagaaagaaaaggatcagctccagaaacgcagacacaatgtggatgaaaaacttaaaaatggtagagtgttatcacctgaagaagaacatgttcttttccaacttgaagaagggattgaagctttggaagctgcaattgaatacaggaatgaaagtatccagaatcgccagaagtcacttagagcatcattccataacctctctcgtggtgaagcaaatgtcttggaaaagctagcttgcctgagtcctgttgagattagaactattcttttcagatatttcaataaggtggtgaatttgcgagaagctgaacggaaacaacagttatataatgaagaaatgaaaatgaaagttctggaacgggataatatggttcgtgaattagaatctgcactggaccatctaaaattgcagtgtgaccggagactgaccctccagcaaaaggaacacgaacaaaagatgcagttgctattacatcatttcaaagaacaagatggagaaggcattatggaaactttcaaaacatatgaagataaaatccagcagttggaaaaagatctttatttctataagaaaaccagccgggatcataagaagaaacttaaggaactggtaggggaagcaattcggcggcaactagcaccatcagagtatcaagaggctggagatggagtcctgaagccagaaggaggaggcatgctttcagaagaattaaaatgggcatccagacctgaaagtatgaaattaagtggaagagaaagagaaatggacagttcagcaagcagcttaagaacacagccaaatcctcaaaagctctgggaagatatcccagaattacctccaattcatagttctttagcaccccccagtgggcatatgttaggtaatgagaataaaacagaaacagatgataatcagtttacaaaatctcacagtcgactgtcatcccaaattcaggttgtgggaaatgtgggacgacttcatggtgtcacacctgtaaaactgtgtcgaaaagaattacgtcaaatttccgccttggaactatcattgcgacgttccagtcttggagttggcattggatcaatggctgctgattccatcgaagtatctaggaaaccaagggacttaaaaacttagacattgaataatagaacttttagtagatatgtaaaaagattcctttttctaacctgttaaaaactaaagctcaagttcactacctctttcctcagaataaaggaagaaggggaggaaggaatccctaattcttttatatgctatagatgtgtacatcttctatatatatttggggagttttagtttatattcccatagtaatcaaacatgttttccaatacttgataacatttaaatatttataaatacgcttaaatgtttttccaggcatatttgaagattaaaactagtaatagactaaaa

SEQ ID NO: 146759 - DNA, 1030 bp, Homo sapiens
  Payload ID: 9034
  Gene Symbol: KIF27
  Gene Name: kinesin family member 27
  Uniprot ID: Q86VH2
  ENST ID: ENST00000376347
  CDS Start-End: 36-896
ggggaatcacttgcaaggtccacacaagtccgcctatgtactctctggatcgaatatttgctggatttcgaacacgaagtcagatgctgttgggtcacatagaagaacaagataaggtcctccactgccaattttctgataacagtgatgatgaagaatcagaaggccaagagaaatctggaactagatgtagaagtcgttcatggattcagaagccagactctgtttgttcccttgttgaattgagtgatactcaggatgaaacacaaaagtcagatttggagaatgaagatttaaagattgattgtctccaggagagtcaagaattgaatttgcaaaaattaaagaattcagaacgcatacttactgaagctaaacaaaaaatgagagaacttacaattaacatcaagatgaaggaagatctgattaaagaattaataaaaacaggtaatgatgccaagtctgtaagcaagcagtattctttgaaagtaacaaagctagagcatgatgcagaacaggcaaaagtcgaactgattgaaacacaaaagcagctacaggagctggaaaacaaagatctttctgatgttgcaatgaaggtaaaattacagaaagagtttcgtaaaaagatggatgctgcaaagctgagagttcaggtcttgcagaagaagcaacaagatagtaagaaactggcatcactgtcaatccaaaatgagaaacgtgctaatgagctagagcagagtgtagatcacatgaaatatcaaaagatacagctacaaagaaaactacgagaagaaaatgaaaaaaggaagcaactggatgcagtaattaagcgggaccagcaaaaaatcaaagtaatattgtcatacattcctgctaagtataatatgaaatgttaaacggctcagagctaacgaatccatggtcttcattcagttggcttgtgaagtatctatccttgacctgcccttcactgctgtccttattcactttaaagctttgttcatctacgtagtaaaacctacttattgaa

SEQ ID NO: 146760 - DNA, 4493 bp, Homo sapiens
  Payload ID: 9034
  Gene Symbol: KIF27
  Gene Name: kinesin family member 27
  Uniprot ID: Q86VH2
  ENST ID: ENST00000413982
  CDS Start-End: 183-4190
gacaacaaaagacgcggacggcggctgcgcggtgtggcagagcgaagctgaggagtccagcgctcgccgacaggggcctgggctgtcccgagccggaatccagatcttacataagatggaagtctctcacactagatactgaacattaaatagaaaatctatttagtaaaatctaagttgccatggaagaaataccagtaaaagttgctgtaagaattagacctctgctttgcaaagaagctcttcataatcatcaagtttgtgtgagagttattccaaacagccagcaagttatcattgggagagatagagtcttcacttttgattttgtttttggcaaaaattccactcaagatgaagtttataacacatgtataaagcccctagtgttgtcactcattgagggctataatgcaactgtttttgcctatggacaaactggatctgggaagacatacaccattggagggggccatattgcttcagttgtggagggccaaaagggtatcattcctcgagctattcaagaaatatttcaaagcatctctgaacatcctagcattgactttaatgtaaaagtatcttatatagaagtgtacaaggaagacctaagagatcttctagaattggagacatccatgaaggatcttcacatccgagaagatgaaaaaggaaacacagtgattgttggggccaaggaatgccatgtggagagtgcaggtgaagtgatgagtcttttggagatggggaatgcagccagacatacaggtaccactcaaatgaatgagcactccagcagatcacatgcaatttttacaatcagcatttgtcaagttcataaaaatatggaggcagctgaagatggatcatggtattcccctcggcatattgtctcaaagttccactttgtggatttggcaggatcagaaagagtaaccaaaacggggaatactggtgaacggttcaaagaatccattcaaatcaatagtggattgctggctttaggaaatgtaataagcgctcttggggacccacgcaggaagagttcacatattccatatagggatgctaaaattacccggcttctgaaagattctctgggaggcagtgctaagactgtcatgatcacatgtgtcagcccctcctcctcgaattttgatgagtccttaaattctctcaaatatgccaacagagcacggaacattagaaacaaacccactgtaaacttcagccccgagtcagaccgtatagatgaaatggaatttgagattaaattgcttcgagaagctttgcaaagccagcaggctggtgtcagccaaactacccagatcaatcgagaagggagtcctgatacaaataggattcattctcttgaggagcaagtagctcagcttcaaggagaatgtctgggttaccagtgttgtgtagaagaagcctttaccttcctggttgacctaaaagatactgtcagactaaacgaaaagcagcaacacaaactgcaggagtggtttaacatgatccaagaggtcaggaaggctgtcctcacctcatttcgaggaatcggaggcactgcaagtctggaagaaggaccacagcatgttacagttctccagctgaagagagagcttaagaaatgccagtgtgtgcttgctgctgatgaagtagtatttaatcagaaggaactggaggtgaaggaactgaagaatcaagtgcagatgatggtacaggaaaacaaagggcatgctgtatctttgaaagaagcgcaaaaagtgaatagactgcagaatgaaaaaataatagaacaacaacttcttgtggatcaactgagtgaagaactaacaaaacttaacctgtcagtgacttcttcagctaaagaaaattgtggagatgggccagatgccaggatccctgaaaggagaccatatactgtaccatttgatactcatttggggcattatatttatatcccatcaagacaagattccaggaaggtccacacaagtccgcctatgtactctctggatcgaatatttgctggatttcgaacacgaagtcagatgctgttgggtcacatagaagaacaagataaggtcctccactgccaattttctgataacagtgatgatgaagaatcagaaggccaagagaaatctggaactagatgtagaagtcgttcatggattcagaagccagactctgtttgttcccttgttgaattgagtgatactcaggatgaaacacaaaagtcagatttggagaatgaagatttaaagattgattgtctccaggagagtcaagaattgaatttgcaaaaattaaagaattcagaacgcatacttactgaagctaaacaaaaaatgagagaacttacaattaacatcaagatgaaggaagatctgattaaagaattaataaaaacaggtaatgatgccaagtctgtaagcaagcagtattctttgaaagtaacaaagctagagcatgatgcagaacaggcaaaagtcgaactgattgaaacacaaaagcagctacaggagctggaaaacaaagatctttctgatgttgcaatgaaggtaaaattacagaaagagtttcgtaaaaagatggatgctgcaaagctgagagttcaggaaatacaattaaaaacaggacaggaagaaggtctaaaaccgaaagctgaggaccttgatgcatgtaacttgaaaaggagaaaaggttcgtttggaagtatagaccatctccagaaattggatgagcaaaagaaatggttagatgaagaagtagagaaagttctgaaccaacgccaagaattagaggagctggaagcagacttaaagaaacgggaggccatagtttctaagaaggaggctctgttacaggagaagagtcacctggaaaataagaaattgagatctagtcaggccttaaacacagatagtttgaaaatatcaactcgcctgaacttactggaacaagagttgtctgaaaagaatgtgcagctccagaccagtacagctgaggagaaaacaaagatttcagaacaagttgaagtcctccagaaagaaaaggatcagctccagaaacgcagacacaatgtggatgaaaaacttaaaaatggtagagtgttatcacctgaagaagaacatgttcttttccaacttgaagaagggattgaagctttggaagctgcaattgaatacaggaatgaaagtatccagaatcgccagaagtcacttagagcatcattccataacctctctcgtggtgaagcaaatgtcttggaaaagctagcttgcctgagtcctgttgagattagaactattcttttcagatatttcaataaggtggtgaatttgcgagaagctgaacggaaacaacagttatataatgaagaaatgaaaatgaaagttctggaacgggataatatggttcgtgaattagaatctgcactggaccatctaaaattgcagtgtgaccggagactgaccctccagcaaaaggaacacgaacaaaagatgcagttgctattacatcatttcaaagaacaagatggagaaggcattatggaaactttcaaaacatatgaagataaaatccagcagttggaaaaagatctttatttctataagaaaaccagccgggatcataagaagaaacttaaggaactggtaggggaagcaattcggcggcaactagcaccatcagagtatcaagaggctggagatggagtcctgaagccagaaggaggaggcatgctttcagaagaattaaaatgggcatccagacctgaaagtatgaaattaagtggaagagaaagagaaatggacagttcagcaagcagcttaagaacacagccaaatcctcaaaagctctgggaagatatcccagaattacctccaattcatagttctttagcaccccccagtgggcatatgttaggtaatgagaataaaacagaaacagatgataatcagtttacaaaatctcacagtcgactgtcatcccaaattcaggttgtgggaaatgtgggacgacttcatggtgtcacacctgtaaaactgtgtcgaaaagaattacgtcaaatttccgccttggaactatcattgcgacgttccagtcttggagttggcattggatcaatggctgctgattccatcgaagtatctaggaaaccaagggacttaaaaacttagacattgaataatagaacttttagtagatatgtaaaaagattcctttttctaacctgttaaaaactaaagctcaagttcactacctctttcctcagaataaaggaagaaggggaggaaggaatccctaattcttttatatgctatagatgtgtacatcttctatatatatttggggagttttagtttatattcccatagtaatcaaacatgttttccaatacttgataacatttaaatatttataaatacgcttaaatgtttttccaggcatatttgaagattaaaactagtaatagactaaaa

SEQ ID NO: 146761 - DNA, 983 bp, Homo sapiens
  Payload ID: 9034
  Gene Symbol: KIF27
  Gene Name: kinesin family member 27
  ENST ID: ENST00000495062
  CDS Start-End: 88-603
gaatccagatcttacataagatggaagtctctcacactagatactgaacattaaatagaaaatctatttagtaaaatctaagttgccatggaagaaataccagtaaaagttgctgtaagaattagacctctgctttgcaaagaagctcttcataatcatcaagtttgtgtgagagttattccaaacagccagcaagttatcattgggagagatagagtcttcacttttgattttgtttttggcaaaaattccactcaagatgaagtttataacacatgtataaagcccctagtgttgtcactcattgagggctataatgcaactgtttttgcctatggacaaactggatctgggaagacatacaccattggagggggccatattgcttcagttgtggagggccaaaagggtatcattcctcgagctattcaagaaatatttcaaagcatctctgaacatcctagcattgactttaatgtaaaagtatcttatatagaagtgtacaaggaagacctaagagatcttctagaattggagacatccatgaaggatcttcacatccgagaagatgaaaaaggaaacacagtgtgtgcttgctgctgatgaagtagtatttaatcagaaggaactggaggtgaaggaactgaagaatcaagtgcagatgatggtacaggaaaacaaagggcatgctgtatctttgaaagaagcgcaaaaagtgaatagactgcaggatctcattctgttgctcaggctggtgtgcactggcacaatcacagctcactgcagcctcgacctcccaggctcaagtgatcctcccgcctcagcctcatgagtagctgtgaccacaggtgcatgccaccgtgcccggctaattttctgatttttttgtggagacagggtctcactgtgttgctcaagctggtctcgaactcctgggctcagtgatcctaccacctcagcttcccaaagtgctgagattgatt

SEQ ID NO: 146762 - DNA, 2313 bp, Homo sapiens
  Payload ID: 9035
  Gene Symbol: KIF2B
  Gene Name: kinesin family member 2B
  Uniprot ID: Q8N4N8
  ENST ID: ENST00000268919
  CDS Start-End: 134-2155
ggcgcgctaggctcacaaaggcaggcacagactgcaaccctgctcagtgctccgggcgcttcaggctggcttgggtcctgctgctccaaccccaagggccctggagcgctccctgatacctccatcactcaccatggccagccagttctgcctccctgaatccccatgtctctcgcccctgaaacccttgaagccacatttcggagacatccaagagggcatctacgtggcgatccagcgcagtgacaagcggatccacctcgctgtggtcacggagatcaacagagaaaactattgggtcacggtagagtgggtggagaaagcagtcaaaaaaggcaagaagattgacctggagaccatactcctgctgaatccagctctggactctgctgaacaccccatgccgcccccgcccttatcccccttggctctggcgccctcttcggccatcagggaccagcgtaccgccacgaaatgggttgcgatgatcccccagaaaaaccaaacagcctcaggggacagcctggatgtgagggtccccagcaaaccttgtctgatgaagcagaaaaagtctccctgcctctgggaaatccagaaactgcaggagcagcgggaaaagcgcaggcggctgcagcaggagatccgagctagacgcgccctcgatgtcaataccagaaaccccaactacgaaatcatgcacatgatcgaagagtatcgcaggcacctggacagcagcaagatctcagtcctggagcccccgcaagaacatcgcatctgcgtctgcgtgaggaagcggcctctcaaccagcgagagacaaccttaaaggacctggatatcatcaccgtcccctcggacaatgtggttatggtgcatgagtccaagcaaaaggtggacctcactcgctacctgcagaaccagaccttctgcttcgaccatgccttcgatgacaaagcctccaacgagttggtgtaccagttcaccgcccagccactggtggagtccatcttccgcaagggcatggccacctgctttgcctatgggcagacgggaagtgggaagacgtacaccatgggtggagacttttcaggaacggcccaagattgttctaagggcatttatgctctggtggcacaggatgtctttctcctgctcagaaactccacatatgagaagctggacctcaaagtctatgggacattttttgagatttatgggggcaaggtgtatgatttgttgaactggaagaagaagctgcaagtccttgaggatggcaatcagcaaatccaagtggtcgggctgcaggagaaagaggtgtgttgtgtggaggaagtgctgaacctggtggaaatagggaatagctgtcggacttccaggcaaacacctgtcaacgctcactcatccaggagccatgcagtgttccagatcatcctgaagtcaggacggataatgcatggcaagttttccctcgttgatttagctgggaatgaaagaggagcagatacaaccaaggccagccggaaaaggcagctggaaggggcagagattaacaagagtcttctagccctcaaagaatgtattctggctttgggtcagaacaagcctcacaccccattcagagccagcaaactcacactggtgctccgggactcctttataggccagaactcctccacttgcatgattgctaccatctctccggggatgacctcttgtgaaaacactctcaacactttaagatatgcaaacagagtaaaaaaattaaatgtagatgtaaggccctaccatcgtggccactatccgattggacatgaggcaccaaggatgttaaaaagtcacatcggaaattcagaaatgtcccttcagagggatgaatttattaaaataccttatgtacagagtgaggagcagaaagagattgaagaggttgaaacattacccactctgttagggaaggataccacaatttcagggaagggatctagccaatggctggaaaacatccaggagagagctggtggagtacaccatgatattgatttttgcattgcccggtctttgtccattttggagcagaaaattgatgctctgaccgagatccaaaagaaactgaaattattactagctgacctccacgtgaagagcaaggtagagtgaagccaatggcgagagatcaggtccgaaatgctgcattgctgcagtttccaccactcttatacaggaaaactgtccaaattatctaaagatcctcctgagaagcttaaaacatcttaaaatacactgatgggaaacatgctctttcttctgcctctgta

SEQ ID NO: 146763 - DNA, 2955 bp, Homo sapiens
  Payload ID: 9036
  Gene Symbol: KIF2C
  Gene Name: kinesin family member 2C
  Uniprot ID: Q99661
  ENST ID: ENST00000372217
  CDS Start-End: 352-2367
ggaagccgtaactggggaagtttctgggcccagaagaaaatgtaggtagtcttagggttaggtagcagctgtcaggaacttgcccctgcccataagatcctaaagggcccccatttgactctcaccagacagttagaacttgtttcctcctccgtgtcagccatcaagaggtgcttggggggctgtgcccagcaggacctcactgcccagcagatcagcaggggagccaagtggcctagatctgctgtggagtacccgactgtttgcctgcctgtctgccctcctcttcacctcattctcatcactgacgtctaccattggcttggaaatcagaaacccatatccatctagatgattgattttgatgatgtggctgcaataaacccagaactcttacagcttcttcccttacatccgaaggacaatctgcccttgcaggaaaatgtaacaatccagaaacaaaaacggagatccgtcaactccaaaattcctgctccaaaagaaagtcttcgaagccgctccactcgcatgtccactgtctcagagcttcgcatcacggctcaggagaatgacatggaggtggagctgcctgcagctgcaaactcccgcaagcagttttcagttcctcctgcccccactaggccttcctgccctgcagtggctgaaataccattgaggatggtcagcgaggagatggaagagcaagtccattccatccgaggcagctcttctgcaaaccctgtgaactcagttcggaggaaatcatgtcttgtgaaggaagtggaaaaaatgaagaacaagcgagaagagaagaaggcccagaactctgaaatgagaatgaagagagctcaggagtatgacagtagttttccaaactgggaatttgcccgaatgattaaagaatttcgggctactttggaatgtcatccacttactatgactgatcctatcgaagagcacagaatatgtgtctgtgttaggaaacgcccactgaataagcaagaattggccaagaaagaaattgatgtgatttccattcctagcaagtgtctcctcttggtacatgaacccaagttgaaagtggacttaacaaagtatctggagaaccaagcattctgctttgactttgcatttgatgaaacagcttcgaatgaagttgtctacaggttcacagcaaggccactggtacagacaatctttgaaggtggaaaagcaacttgttttgcatatggccagacaggaagtggcaagacacatactatgggcggagacctctctgggaaagcccagaatgcatccaaagggatctatgccatggcctcccgggacgtcttcctcctgaagaatcaaccctgctaccggaagttgggcctggaagtctatgtgacattcttcgagatctacaatgggaagctgtttgacctgctcaacaagaaggccaagctgcgcgtgctggaggacggcaagcaacaggtgcaagtggtggggctgcaggagcatctggttaactctgctgatgatgtcatcaagatgatcgacatgggcagcgcctgcagaacctctgggcagacatttgccaactccaattcctcccgctcccacgcgtgcttccaaattattcttcgagctaaagggagaatgcatggcaagttctctttggtagatctggcagggaatgagcgaggcgcggacacttccagtgctgaccggcagacccgcatggagggcgcagaaatcaacaagagtctcttagccctgaaggagtgcatcagggccctgggacagaacaaggctcacaccccgttccgtgagagcaagctgacacaggtgctgagggactccttcattggggagaactctaggacttgcatgattgccacgatctcaccaggcataagctcctgtgaatatactttaaacaccctgagatatgcagacagggtcaaggagctgagcccccacagtgggcccagtggagagcagttgattcaaatggaaacagaagagatggaagcctgctctaacggggcgctgattccaggcaatttatccaaggaagaggaggaactgtcttcccagatgtccagctttaacgaagccatgactcagatcagggagctggaggagaaggctatggaagagctcaaggagatcatacagcaaggaccagactggcttgagctctctgagatgaccgagcagccagactatgacctggagacctttgtgaacaaagcggaatctgctctggcccagcaagccaagcatttctcagccctgcgagatgtcatcaaggccttgcgcctggccatgcagctggaagagcaggctagcagacaaataagcagcaagaaacggccccagtgacgactgcaaataaaaatctgtttggtttgacacccagcctcttccctggccctccccagagaactttgggtacctggtgggtctaggcagggtctgagctgggacaggttctggtaaatgccaagtatgggggcatctgggcccagggcagctggggagggggtcagagtgacatgggacactccttttctgttcctcagttgtcgccctcacgagaggaaggagctcttagttacccttttgtgttgcccttctttccatcaaggggaatgttctcagcatagagctttctccgcagcatcctgcctgcgtggactggctgctaatggagagctccctggggttgtcctggctctggggagagagacggagcctttagtacagctatctgctggctctaaaccttctacgcctttgggccgagcactgaatgtcttgtactttaaaaaaatgtttctgagacctctttctactttactgtctccctagagatcctagaggatccctactgttttctgttttatgtgtttatacattgtatgtaacaataaagagaaaaaataaatcagctgtttaagtgtgtggaaa

SEQ ID NO: 146764 - DNA, 2879 bp, Homo sapiens
  Payload ID: 9036
  Gene Symbol: KIF2C
  Gene Name: kinesin family member 2C
  Uniprot ID: Q99661
  ENST ID: ENST00000372224
  CDS Start-End: 114-2291
gcttgcgcgcgggatttaaactgcggcggtttacgcggcgttaagacttcgtagggttagcgaaattgaggtttcttggtattgcgcgtttctcttccttgctgactctccgaatggccatggactcgtcgcttcaggcccgcctgtttcccggtctcgctatcaagatccaacgcagtaatggtttaattcacagtgccaatgtaaggactgtgaacttggagaaatcctgtgtttcagtggaatgggcagaaggaggtgccacaaagggcaaagagattgattttgatgatgtggctgcaataaacccagaactcttacagcttcttcccttacatccgaaggacaatctgcccttgcaggaaaatgtaacaatccagaaacaaaaacggagatccgtcaactccaaaattcctgctccaaaagaaagtcttcgaagccgctccactcgcatgtccactgtctcagagcttcgcatcacggctcaggagaatgacatggaggtggagctgcctgcagctgcaaactcccgcaagcagttttcagttcctcctgcccccactaggccttcctgccctgcagtggctgaaataccattgaggatggtcagcgaggagatggaagagcaagtccattccatccgaggcagctcttctgcaaaccctgtgaactcagttcggaggaaatcatgtcttgtgaaggaagtggaaaaaatgaagaacaagcgagaagagaagaaggcccagaactctgaaatgagaatgaagagagctcaggagtatgacagtagttttccaaactgggaatttgcccgaatgattaaagaatttcgggctactttggaatgtcatccacttactatgactgatcctatcgaagagcacagaatatgtgtctgtgttaggaaacgcccactgaataagcaagaattggccaagaaagaaattgatgtgatttccattcctagcaagtgtctcctcttggtacatgaacccaagttgaaagtggacttaacaaagtatctggagaaccaagcattctgctttgactttgcatttgatgaaacagcttcgaatgaagttgtctacaggttcacagcaaggccactggtacagacaatctttgaaggtggaaaagcaacttgttttgcatatggccagacaggaagtggcaagacacatactatgggcggagacctctctgggaaagcccagaatgcatccaaagggatctatgccatggcctcccgggacgtcttcctcctgaagaatcaaccctgctaccggaagttgggcctggaagtctatgtgacattcttcgagatctacaatgggaagctgtttgacctgctcaacaagaaggccaagctgcgcgtgctggaggacggcaagcaacaggtgcaagtggtggggctgcaggagcatctggttaactctgctgatgatgtcatcaagatgatcgacatgggcagcgcctgcagaacctctgggcagacatttgccaactccaattcctcccgctcccacgcgtgcttccaaattattcttcgagctaaagggagaatgcatggcaagttctctttggtagatctggcagggaatgagcgaggcgcggacacttccagtgctgaccggcagacccgcatggagggcgcagaaatcaacaagagtctcttagccctgaaggagtgcatcagggccctgggacagaacaaggctcacaccccgttccgtgagagcaagctgacacaggtgctgagggactccttcattggggagaactctaggacttgcatgattgccacgatctcaccaggcataagctcctgtgaatatactttaaacaccctgagatatgcagacagggtcaaggagctgagcccccacagtgggcccagtggagagcagttgattcaaatggaaacagaagagatggaagcctgctctaacggggcgctgattccaggcaatttatccaaggaagaggaggaactgtcttcccagatgtccagctttaacgaagccatgactcagatcagggagctggaggagaaggctatggaagagctcaaggagatcatacagcaaggaccagactggcttgagctctctgagatgaccgagcagccagactatgacctggagacctttgtgaacaaagcggaatctgctctggcccagcaagccaagcatttctcagccctgcgagatgtcatcaaggccttgcgcctggccatgcagctggaagagcaggctagcagacaaataagcagcaagaaacggccccagtgacgactgcaaataaaaatctgtttggtttgacacccagcctcttccctggccctccccagagaactttgggtacctggtgggtctaggcagggtctgagctgggacaggttctggtaaatgccaagtatgggggcatctgggcccagggcagctggggagggggtcagagtgacatgggacactccttttctgttcctcagttgtcgccctcacgagaggaaggagctcttagttacccttttgtgttgcccttctttccatcaaggggaatgttctcagcatagagctttctccgcagcatcctgcctgcgtggactggctgctaatggagagctccctggggttgtcctggctctggggagagagacggagcctttagtacagctatctgctggctctaaaccttctacgcctttgggccgagcactgaatgtcttgtactttaaaaaaatgtttctgagacctctttctactttactgtctccctagagatcctagaggatccctactgttttctgttttatgtgtttatacattgtatgtaacaataaagagaaaaaataaatcagctgtttaagtgtgtggaaa

SEQ ID NO: 146765 - DNA, 908 bp, Homo sapiens
  Payload ID: 9036
  Gene Symbol: KIF2C
  Gene Name: kinesin family member 2C
  ENST ID: ENST00000455186
  CDS Start-End: 48-908
tcaggcccgcctgtttcccggtctcgctatcaagatccaacgcagtaatggtgaggagcggggtccctaggtcaaggggactcgtgagcggtttaattcacagtgccaatgtaaggactgtgaacttggagaaatcctgtgtttcagtggaatgggcagaaggaggtgccacaaagggcaaagagattgattttgatgatgtggctgcaataaacccagaactcttacagcttcttcccttacatccgaaggacaatctgcccttgcaggaaaatgtaacaatccagaaacaaaaacggagatccgtcaactccaaaattcctgctccaaaagaaagtcttcgaagccgctccactcgcatgtccactgtctcagagcttcgcatcacggctcaggagaatgacatggaggtggagctgcctgcagctgcaaactcccgcaagcagttttcagttcctcctgcccccactaggccttcctgccctgcagtggctgaaataccattgaggatggtcagcgaggagatggaagagcaagtccattccatccgaggcagctcttctgcaaaccctgtgaactcagttcggaggaaatcatgtcttgtgaaggaagtggaaaaaatgaagaacaagcgagaagagaagaaggcccagaactctgaaatgagaatgaagagagctcaggagtatgacagtagttttccaaactgggaatttgcccgaatgattaaagaatttcgggctactttggaatgtcatccacttactatgactgatcctatcgaagagcacagaatatgtgtctgtgttaggaaacgcccactgaataagcaagaattggccaagaaagaaattgatgtgatttccattcctagcaagtgtctcctcttggtacatgaacccaagttg

SEQ ID NO: 146766 - DNA, 320 bp, Homo sapiens
  Payload ID: 9036
  Gene Symbol: KIF2C
  Gene Name: kinesin family member 2C
  ENST ID: ENST00000423289
  CDS Start-End: 1-320
tgaaggagtgcatcagggccctgggacagaacaaggctcacaccccgttccgtgagagcaagctgacacaggtgctgagggactccttcattggggagaactctaggacttgcatgattgccacgatctcaccaggcataagctcctgtgaatatactttaaacaccctgagatatgcagacaggcaaggttgccattccatccccttggagcctcaagcctcgaagcctgggcggtgccacattcctctgttatccaaggaagaggaggaactgtcttcccagatgtccagctttaacgaagccatgactcagatcagg

SEQ ID NO: 146767 - DNA, 1124 bp, Homo sapiens
  Payload ID: 9036
  Gene Symbol: KIF2C
  Gene Name: kinesin family member 2C
  ENST ID: ENST00000452259
  CDS Start-End: 116-1124
acgcttgcgcgcgggatttaaactgcggcggtttacgcggcgttaagacttcgtagggttagcgaaattgaggtttcttggtattgcgcgtttctcttccttgctgactctccgaatggccatggactcgtcgcttcaggcccgcctgtttcccggtctcgctatcaagatccaacgcagtaatggtttaattcacagtgccaatgtaaggactgtgaacttggagaaatcctgtgtttcagtggaatgggcagaaggaggtgccacaaagggcaaagagattgattttgatgatgtggctgcaataaacccagaactcttacagcttcttcccttacatccgaaggacaatctgcccttgcaggaaaatgtaacaatccagaaacaaaaacggagatccgtcaactccaaaattcctgctccaaaagaaagtcttcgaagccgctccactcgcatgtccactgtctcagagcttcgcatcacggctcaggagaatgacatggaggtggagctgcctgcagctgcaaactcccgcaagcagttttcagttcctcttcggaggaaatcatgtcttgtgaaggaagtggaaaaaatgaagaacaagcgagaagagaagaaggcccagaactctgaaatgagaatgaagagagctcaggagtatgacagtagttttccaaactgggaatttgcccgaatgattaaagaatttcgggctactttggaatgtcatccacttactatgactgatcctatcgaagagcacagaatatgtgtctgtgttaggaaacgcccactgaataagcaagaattggccaagaaagaaattgatgtgatttccattcctagcaagtgtctcctcttggtacatgaacccaagttgaaagtggacttaacaaagtatctggagaaccaagcattctgctttgactttgcatttgatgaaacagcttcgaatgaagttgtctacaggttcacagcaaggccactggtacagacaatctttgaaggtggaaaagcaacttgttttgcatatggccagacaggaagtggcaagacacatactatgggcggagacctctctgggaaagcccagaatgcatccaaagggatctatgccatggcct

SEQ ID NO: 146768 - DNA, 3266 bp, Homo sapiens
  Payload ID: 9037
  Gene Symbol: KIF3A
  Gene Name: kinesin family member 3A
  ENST ID: ENST00000378735
  CDS Start-End: 154-2262
cggctgcgcactgggcgctctcgcccgagaagccgcagtctcgagagcgtcaacgaggtgtttcggtagtctctggccatcctttctgcgcacccggtgtcgctgggctgcaccccgggcggggacgtccgccgggcacgggagggggccaagatgccgatcaataaatcagagaagccagaaagctgcgataatgtgaaggttgttgttaggtgccggcccctcaatgagagagagaaatcaatgtgctacaaacaggctgtcagtgtggatgagatgaggggaactatcactgtacataagactgattcttccaatgaacctccaaagacatttacttttgatactgtttttggaccagagagtaaacaacttgatgtttataacttaactgcaagacctattattgattctgtacttgaaggctacaatgggactatttttgcatatggacaaaccggaacaggcaaaacttttaccatggaaggtgttcgagctattcctgaacttagaggaataattcccaattcatttgctcacatatttggtcatattgcaaaagcggagggtgatacaagatttttggttcgagtgtcttatttggaaatatataatgaagaagttcgtgaccttttgggcaaggatcagacacaaaggttagaggttaaagaaagacctgatgtgggagtttatatcaaagatttatcagcttatgtggtaaataatgctgatgatatggatagaattatgacgctaggccacaaaaatcgttctgttggtgcaactaatatgaacgaacatagttcccgttcccatgccatctttacaattactatagaatgcagtgaaaaaggcattgatggtaacatgcatgtcaggatggggaagctccatcttgtagatcttgctggttcagaaagacaggcaaaaactggagctactggacagcgcctaaaggaagctacaaaaatcaatctttcactttccacccttggtaatgtaatttctgccttggttgatggaaaaagcactcatgtgccttatcgtaactctaaactgactcgtcttcttcaggattccttaggaggaaattcaaaaaccatgatgtgtgcaaatattgggccagcagattacaattatgatgaaactatcagtacattacggtatgccaatcgtgctaagaatattaaaaataaagctagaattaatgaagatccaaaggatgctttgctgcgtcagttccagaaagaaatagaagaactgaaaaagaagcttgaagaaggagaagaaatatcaggctctgatatcagtgggtcagaggaagatgatgatgaagagggtgaggttggagaagatggagagaaaaggaaaaaaagaagggatcaagcaggaaaaaagaaagtctccccagacaagatgattgaaatgcaagcaaaaattgatgaggagagaaaagcacttgaaacaaagctcgacatggaagaagaagaaagaaacaaggctagagctgaattagagaaacgggaaaaagatcttcttaaagcccaacaagagcatcagtctttgctggaaaaattatctgccctggaaaagaaggtaattgttggtggggttgacttgttggccaaagctgaggaacaagagaaacttcttgaagaatctaacatggaactggaagaaaggaggaaaagagcagagcaacttcgcagagaacttgaggaaaaagagcaagaacgcttggatattgaagaaaaatataccagtttgcaagaggaagcacagggaaagaccaagaagttaaagaaagtttggactatgctgatggctgcaaagtcagagatggctgatctccaacaagaacatcagagggaaattgaaggcctactggagaacattcggcaacttagccgggagcttcgacttcagatgcttattattgataactttatacctcgggattatcaggaaatgattgaaaactatgtccattggaatgaagacataggagaatggcagctaaaatgtgttgcttatacaggaaataacatgaggaagcaaaccccagtacctgataaaaaggagaaagatccctttgaggtggacctttctcacgtgtatcttgcctatactgaggagagtctgcgtcagtctttgatgaaactagaaagaccacgaacttcaaaggggaaagcaaggccaaagacagggagaagaaagcgttctgcaaagcctgaaactgtaattgactctttactgcagtaaatgttacagacttaaagtcacaataaaaattagtgatattctcatgcctggacaaaatctttaattaaaacagtgaagacttctctataatttcaattaatggaagttgtagatcaatgaataagactggaaataataatttgcttaagaacttttagtctacatatattaatataacattaaaattgtacaactggtgattgttcaaattgttgtactactactcttcaattgtactgtgcagggaagttgggggaacagttcatactatagagagttacagtttagatgtatgtgtaaatcgattagctatttatccaactactgtatatttaggtaactagaatttcaaaatagaaaaaaaaaaactgtgtcctgttttgcacatagaaagaagcagatcagattgtcctatgttgcgctgttatatatgaatgtttggactgtacatctaaagaatgattccgtcctaacacccacccagcctgtttgaacacattctaattgtctaacatttgttgcattttaagtatgagatgactgatcttatgaatgttttgtagaaaatgttataatttaacagtctttgcgagtatacatgttttttaacaagttgaaaatgtttcatctgaacctttcctaacttttttttgccagtttgagttcaaatcaaatacaccttaagttctggtttcatgttctcttgaaacattgaattgtacgtaaatataaaggatctactgttgcggaaaattaagaagctaaatactgctcagttatctttgcctgcgtgtatatttttaaaaattcactctgaagtgttatggatgcttttctttgagttctaaattttggtgggaattactttatgtctcccagttaagaagagtctccattttccagaaaatacagctaagcaagaaaaatatcttttaaatactttgcctttaaaacacttttttattttgtttttctattttaaaaataaaatattattttctgaa

SEQ ID NO: 146769 - DNA, 6325 bp, Homo sapiens
  Payload ID: 9037
  Gene Symbol: KIF3A
  Gene Name: kinesin family member 3A
  Uniprot ID: Q9Y496
  ENST ID: ENST00000378746
  CDS Start-End: 220-2319
gcgcaggcgtaattcaagggccgagagagcctgagactgggcttggggcggggcgagctcggaatgcggctgcgcactgggcgctctcgcccgagaagccgcagtctcgagagcgtcaacgaggtgtttcggtagtctctggccatcctttctgcgcacccggtgtcgctgggctgcaccccgggcggggacgtccgccgggcacgggagggggccaagatgccgatcaataaatcagagaagccagaaagctgcgataatgtgaaggttgttgttaggtgccggcccctcaatgagagagagaaatcaatgtgctacaaacaggctgtcagtgtggatgagatgaggggaactatcactgtacataagactgattcttccaatgaacctccaaagacatttacttttgatactgtttttggaccagagagtaaacaacttgatgtttataacttaactgcaagacctattattgattctgtacttgaaggctacaatgggactatttttgcatatggacaaaccggaacaggcaaaacttttaccatggaaggtgttcgagctattcctgaacttagaggaataattcccaattcatttgctcacatatttggtcatattgcaaaagcggagggtgatacaagatttttggttcgagtgtcttatttggaaatatataatgaagaagttcgtgaccttttgggcaaggatcagacacaaaggttagaggttaaagaaagacctgatgtgggagtttatatcaaagatttatcagcttatgtggtaaataatgctgatgatatggatagaattatgacgctaggccacaaaaatcgttctgttggtgcaactaatatgaacgaacatagttcccgttcccatgccatctttacaattactatagaatgcagtgaaaaaggcattgatggtaacatgcatgtcaggatggggaagctccatcttgtagatcttgctggttcagaaagacaggcaaaaactggagctactggacagcgcctaaaggaagctacaaaaatcaatctttcactttccacccttggtaatgtaatttctgccttggttgatggaaaaagcactcatgtgccttatcgtaactctaaactgactcgtcttcttcaggattccttaggaggaaattcaaaaaccatgatgtgtgcaaatattgggccagcagattacaattatgatgaaactatcagtacattacggtatgccaatcgtgctaagaatattaaaaataaagctagaattaatgaagatccaaaggatgctttgctgcgtcagttccagaaagaaatagaagaactgaaaaagaagcttgaagaaggagaagaaatatcaggctctgatatcagtgggtcagaggaagatgatgatgaagagggtgaggttggagaagatggagagaaaaggaaaaaaagaaggggaaaaaagaaagtctccccagacaagatgattgaaatgcaagcaaaaattgatgaggagagaaaagcacttgaaacaaagctcgacatggaagaagaagaaagaaacaaggctagagctgaattagagaaacgggaaaaagatcttcttaaagcccaacaagagcatcagtctttgctggaaaaattatctgccctggaaaagaaggtaattgttggtggggttgacttgttggccaaagctgaggaacaagagaaacttcttgaagaatctaacatggaactggaagaaaggaggaaaagagcagagcaacttcgcagagaacttgaggaaaaagagcaagaacgcttggatattgaagaaaaatataccagtttgcaagaggaagcacagggaaagaccaagaagttaaagaaagtttggactatgctgatggctgcaaagtcagagatggctgatctccaacaagaacatcagagggaaattgaaggcctactggagaacattcggcaacttagccgggagcttcgacttcagatgcttattattgataactttatacctcgggattatcaggaaatgattgaaaactatgtccattggaatgaagacataggagaatggcagctaaaatgtgttgcttatacaggaaataacatgaggaagcaaaccccagtacctgataaaaaggagaaagatccctttgaggtggacctttctcacgtgtatcttgcctatactgaggagagtctgcgtcagtctttgatgaaactagaaagaccacgaacttcaaaggggaaagcaaggccaaagacagggagaagaaagcgttctgcaaagcctgaaactgtaattgactctttactgcagtaaatgttacagacttaaagtcacaataaaaattagtgatattctcatgcctggacaaaatctttaattaaaacagtgaagacttctctataatttcaattaatggaagttgtagatcaatgaataagactggaaataataatttgcttaagaacttttagtctacatatattaatataacattaaaattgtacaactggtgattgttcaaattgttgtactactactcttcaattgtactgtgcagggaagttgggggaacagttcatactatagagagttacagtttagatgtatgtgtaaatcgattagctatttatccaactactgtatatttaggtaactagaatttcaaaatagaaaaaaaaaaactgtgtcctgttttgcacatagaaagaagcagatcagattgtcctatgttgcgctgttatatatgaatgtttggactgtacatctaaagaatgattccgtcctaacacccacccagcctgtttgaacacattctaattgtctaacatttgttgcattttaagtatgagatgactgatcttatgaatgttttgtagaaaatgttataatttaacagtctttgcgagtatacatgttttttaacaagttgaaaatgtttcatctgaacctttcctaacttttttttgccagtttgagttcaaatcaaatacaccttaagttctggtttcatgttctcttgaaacattgaattgtacgtaaatataaaggatctactgttgcggaaaattaagaagctaaatactgctcagttatctttgcctgcgtgtatatttttaaaaattcactctgaagtgttatggatgcttttctttgagttctaaattttggtgggaattactttatgtctcccagttaagaagagtctccattttccagaaaatacagctaagcaagaaaaatatcttttaaatactttgcctttaaaacacttttttattttgtttttctattttaaaaataaaatattattttctgaatttcttctattgggtaatccagttagaccatattcctctacaaataaaaactatgttgatttcatagtaaagtaagttgtaatagagataattatttttttctgttgttagctgcttatgaaacttttattgtatttttttaaagttatgctactcctggccgggcatggtggctcacgcctgtaatcccagcactttgggaggccgaggcacgtggatcacttgatgtcaggagttcgagaccagcctggctaacatggtgaaaccctgtctccagtacaaatacaataattagctgggtgtggtggcgcacacctgtaatcccagctacttgggaggctgaggcaggagaatcacttgaacctgggaggcggaggttgcagtgagctgagatggcatcactgcactccagcctgggtgacagggtgacactccacctcaaaaaataaaaataaaataaaaataaagttatgctactcctaaaccacttaatatatgttttgtggttttcaaaattatgtaatcagccctgaaacacattggttgaaaatattttgagactttataagttagtatttattaaattaatattattttaataagttttgttaaatcctagtttaaatgacaaagctgtgtatagagtaggggtgagtgaaggtggagtactcttgaggtggcgataaaaatgtacccataaatttaaagtccattctgtaattggaatactgaatgtcctgtgtgtggtgaacattttctaggtgattagaattgcatttcactggctgcatttgtttgtggtatgtaagatagctagaaatttattacttaactctgtggggcattgtttagatactgtgaagagttgaggtaaatatgtgtcttgtaaaagctttgtgtgatcagaatattttggtaattataaaatgtttttgatgatacacatttaactctgttagtaattactctaaagaaatcttaattttaccagtttaaaaaaaacgcttctttttaaaagttcatgtttctaacctttaacaattcagttaataggaaaggagtaacttttaaatcaagctttaaaacatggaaatttaagccagtatgttagatattttttctatcccaccctaccatgataataaaaataaatctataaaaagtcaaaataaaaagccgatctataaaaagtcaattgagaagttctaaaagcaggctactatagcaggggtgtttgttttttgtttggagacggagtctggctctattacctaggctggagtgcagtgggacaatctcggctcactgtaacctctgtctcttcagcctcctgagttgctggaactacagctgtatgccatcatgctcggctaatttttgtatttttttgtagagatggggttttgccatgttgcccgggcctgtcttgaactcctagagcttaagtgatccacccgcctcaggctcccgaagtgctgggattacaggcatgattataggcctgagccaccacaccccgcctactatagcagttttttaaaaaaagcattatgttaaaactgattataccagatggacattaaatatccatctcagaaataccaaaatttgatacataagcctggcctgaatatcttttttttttttttgagacggagtcttactctgtcgcccaggctggagtgcagtggcgcgatctcggctcactgcaacctctgcctcctgggttcaagggattctcctgcctcagcctcttgagtagctgggattacaggtttgcgccaccacacccagctaatttttgtattttttttttagtagagaccgggtttcaccatgttggccaggctggtctcacctgactttgtgatccgcccgcctcagcctcccaaagtgctgggattacaggtgtgagccaccacgcctggcctcaagcctggtctgaatatctatatgcaaatatgggacactgacttcagagctattcatttagctccagtcatagcaattctgtagtttcctcacatttactgtgtctttgtccacaaatgaaatatgttgtaaggtcagtgttaatttcgtgagacgatatagatgaacacacttgctcattttttgaaataaatatgcagatttaaaatgagtggcacatatatataaataggttattgaatgggtattctcttttccctttaatttaaaaagtgatatttatttattaaaaggagcattggtagaattattggtttatagtatcttctttaataatccttacaattacatatactaataggatgttaaaattatcatcgtgtttcctatttgtgtttagattcttataaagcatgagatgagtaatcaagggaagggtcgcatctccatgtttgccccatgaatagaatccatttgacaagccatttcatttcctttctggagaaagggagttgttttttttttctttttacagcaaaaatttaaggttttattgggggagggggtggtgctacttcctctgtaacatgtttttaaaactatgattatggtttttggttgttttttgttttgtttgtttccttttagtctgtttttaatatccttccccttaactcttaaggaaagtcttctttcctacagggctgtgaattaaggaatgggtagcgtttacatttaagtacaccaatgtctgcccaatttcctaatgtatacatttgttttattttaaattattttttgttcttaaaaatactagaagaaaacatagatgtttctagtgcctttgaacttatactgtagtctgactaatttaatgaataacttcagtagcattactataatactgtatgctggccaaaattacaaattacagtttgttgcatcagtttcaaaagccatgctttcattgtattttatgtataaattgtatttgttcaagttgtatatattggtattgtatgtatacatgcagcatggttaaataagaataaaaatcttttacctaatgc

SEQ ID NO: 146770 - DNA, 2181 bp, Homo sapiens
  Payload ID: 9037
  Gene Symbol: KIF3A
  Gene Name: kinesin family member 3A
  ENST ID: ENST00000403231
  CDS Start-End: 1-2181
atgccgatcaataaatcagagaagccagaaagctgcgataatgtgaaggttgttgttaggtgccggcccctcaatgagagagagaaatcaatgtgctacaaacaggctgtcagtgtggatgagatgaggggaactatcactgtacataagactgattcttccaatgaacctccaaagacatttacttttgatactgtttttggaccagagagtaaacaacttgatgtttataacttaactgcaagacctattattgattctgtacttgaaggctacaatgggactatttttgcatatggacaaaccggaacaggcaaaacttttaccatggaaggtgttcgagctattcctgaacttagaggaataattcccaattcatttgctcacatatttggtcatattgcaaaagcggagggtgatacaagatttttggttcgagtgtcttatttggaaatatataatgaagaagttcgtgaccttttgggcaaggatcagacacaaaggttagaggttaaagaaagacctgatgtgggagtttatatcaaagatttatcagcttatgtggtaaataatgctgatgatatggatagaattatgacgctaggccacaaaaatcgttctgttggtgcaactaatatgaacgaacatagttcccgttcccatgccatctttacaattactatagaatgcagtgaaaaaggcattgatggtaacatgcatgtcaggatggggaagctccatcttgtagatcttgctggttcagaaagacaggcaaaaactggagctactggacagcgcctaaaggaagctacaaaaatcaatctttcactttccacccttggtaatgtaatttctgccttggttgatggaaaaagcactcatgtgccttatcgtaactctaaactgactcgtcttcttcaggattccttaggaggaaattcaaaaaccatgatgtgtgcaaatattgggccagcagattacaattatgatgaaactatcagtacattacggtatgccaatcgtgctaagaatattaaaaataaagctagaattaatgaagatccaaaggatgctttgctgcgtcagttccagaaagaaatagaagaactgaaaaagaagcttgaagaaggagaagaaatatcaggctctgatatcagtgggtcagaggaagatgatgatgaagagggtgaggttggagaagatggagagaaaaggaaaaaaagaaggggcagtagcagcagcagtagttcagactccacatgttctgtcatagagaaacctctggataagttcttgcctaatcaagcaggaaaaaagaaagtctccccagacaagatgattgaaatgcaagcaaaaattgatgaggagagaaaagcacttgaaacaaagctcgacatggaagaagaagaaagaaacaaggctagagctgaattagagaaacgggaaaaagatcttcttaaagcccaacaagagcatcagtctttgctggaaaaattatctgccctggaaaagaaggtaattgttggtggggttgacttgttggccaaagctgaggaacaagagaaacttcttgaagaatctaacatggaactggaagaaaggaggaaaagagcagagcaacttcgcagagaacttgaggaaaaagagcaagaacgcttggatattgaagaaaaatataccagtttgcaagaggaagcacagggaaagaccaagaagttaaagaaagtttggactatgctgatggctgcaaagtcagagatggctgatctccaacaagaacatcagagggaaattgaaggcctactggagaacattcggcaacttagccgggagcttcgacttcagatgcttattattgataactttatacctcgggattatcaggaaatgattgaaaactatgtccattggaatgaagacataggagaatggcagctaaaatgtgttgcttatacaggaaataacatgaggaagcaaaccccagtacctgataaaaaggagaaagatccctttgaggtggacctttctcacgtgtatcttgcctatactgaggagagtctgcgtcagtctttgatgaaactagaaagaccacgaacttcaaaggggaaagcaaggccaaagacagggagaagaaagcgttctgcaaagcctgaaactgtaattgactctttactgcagtaa

SEQ ID NO: 146771 - DNA, 658 bp, Homo sapiens
  Payload ID: 9037
  Gene Symbol: KIF3A
  Gene Name: kinesin family member 3A
  ENST ID: ENST00000428744
  CDS Start-End: 152-658
ttagcttatgatgcagaatgaaacccgtaggtgtctttgtgtgtgtggcggtgttatgtttatcttccaggatttcacagattgttatcgtgaacttaataatggggccttctaagaccccttattaggggtcatggaggaaaattgagccatgatcaataaatcagagaagccagaaagctgcgataatgtgaaggttgttgttaggtgccggcccctcaatgagagagagaaatcaatgtgctacaaacaggctgtcagtgtggatgagatgaggggaactatcactgtacataagactgattcttccaatgaacctccaaagacatttacttttgatactgtttttggaccagagagtaaacaacttgatgtttataacttaactgcaagacctattattgattctgtacttgaaggctacaatgggactatttttgcatatggacaaaccggaacaggcaaaacttttaccatggaaggtgttcgagctattcctgaacttagaggaataattcccaattcatttgctcacatatttggtcatattgcaaaagcggagggtgatacaagatttttggttcgagtgtcttatttggaaatatataatgaagaagttcgtgaccttttgggcaaggatcagacacaaaggttagag

SEQ ID NO: 146772 - DNA, 738 bp, Homo sapiens
  Payload ID: 9037
  Gene Symbol: KIF3A
  Gene Name: kinesin family member 3A
  ENST ID: ENST00000450441
  CDS Start-End: 1-558
tctgccctggaaaagaaggtaattgttggtggggttgacttgttggccaaagctgaggaacaagagaaacttcttgaagaatctaacatggaactggaagaaaggaggaaaagagcagagcaacttcgcagagaacttgaggaaaaagagcaagaacgcttggatattgaagaaaaatataccagtttgcaagaggaagcacagggaaagaccaagaagttaaagaaagtttggactatgctgatggctgcaaagtcagaggaaatgattgaaaactatgtccattggaatgaagacataggagaatggcagctaaaatgtgttgcttatacaggaaataacatgaggaagcaaaccccagtacctgataaaaaggagaaagatccctttgaggtggacctttctcacgtgtatcttgcctatactgaggagagtctgcgtcagtctttgatgaaactagaaagaccacgaacttcaaaggggaaagcaaggccaaagacagggagaagaaagcgttctgcaaagcctgaaactgtaattgactctttactgcagtaaatgttacagacttaaagtcacaataaaaattagtgatattctcatgcctggacaaaatctttaattaaaacagtgaagacttctctataatttcaattaatggaagttgtagatcaatgaataagactggaaataataatttgcttaagaacttttagtctacatatattaatataacat

SEQ ID NO: 146773 - DNA, 3333 bp, Homo sapiens
  Payload ID: 9037
  Gene Symbol: KIF3A
  Gene Name: kinesin family member 3A
  ENST ID: ENST00000618515
  CDS Start-End: 154-2331
cggctgcgcactgggcgctctcgcccgagaagccgcagtctcgagagcgtcaacgaggtgtttcggtagtctctggccatcctttctgcgcacccggtgtcgctgggctgcaccccgggcggggacgtccgccgggcacgggagggggccaagatgccgatcaataaatcagagaagccagaaagctgcgataatgtgaaggttgttgttaggtgccggcccctcaatgagagagagaaatcaatgtgctacaaacaggctgtcagtgtggatgagatgaggggaactatcactgtacataagactgattcttccaatgaacctccaaagacatttacttttgatactgtttttggaccagagagtaaacaacttgatgtttataacttaactgcaagacctattattgattctgtacttgaaggctacaatgggactatttttgcatatggacaaaccggaacaggcaaaacttttaccatggaaggtgttcgagctattcctgaacttagaggaataattcccaattcatttgctcacatatttggtcatattgcaaaagcggagggtgatacaagatttttggttcgagtgtcttatttggaaatatataatgaagaagttcgtgaccttttgggcaaggatcagacacaaaggttagaggttaaagaaagacctgatgtgggagtttatatcaaagatttatcagcttatgtggtaaataatgctgatgatatggatagaattatgacgctaggccacaaaaatcgttctgttggtgcaactaatatgaacgaacatagttcccgttcccatgccatctttacaattactatagaatgcagtgaaaaaggcattgatggtaacatgcatgtcaggatggggaagctccatcttgtagatcttgctggttcagaaagacaggcaaaaactggagctactggacagcgcctaaaggaagctacaaaaatcaatctttcactttccacccttggtaatgtaatttctgccttggttgatggaaaaagcactcatgtgccttatcgtaactctaaactgactcgtcttcttcaggattccttaggaggaaattcaaaaaccatgatgtgtgcaaatattgggccagcagattacaattatgatgaaactatcagtacattacggtatgccaatcgtgctaagaatattaaaaataaagctagaattaatgaagatccaaaggatgctttgctgcgtcagttccagaaagaaatagaagaactgaaaaagaagcttgaagaagaagaaatatcaggctctgatatcagtgggtcagaggaagatgatgatgaagagggtgaggttggagaagatggagagaaaaggaaaaaaagaaggggtaatagcagcagcagtagttcagactccacatgttctgtcatagagaaacctctggataagttcttgcctaatcaagcaggaaaaaagaaagtctccccagacaagatgattgaaatgcaagcaaaaattgatgaggagagaaaagcacttgaaacaaagctcgacatggaagaagaagaaagaaacaaggctagagctgaattagagaaacgggaaaaagatcttcttaaagcccaacaagagcatcagtctttgctggaaaaattatctgccctggaaaagaaggtaattgttggtggggttgacttgttggccaaagctgaggaacaagagaaacttcttgaagaatctaacatggaactggaagaaaggaggaaaagagcagagcaacttcgcagagaacttgaggaaaaagagcaagaacgcttggatattgaagaaaaatataccagtttgcaagaggaagcacagggaaagaccaagaagttaaagaaagtttggactatgctgatggctgcaaagtcagagatggctgatctccaacaagaacatcagagggaaattgaaggcctactggagaacattcggcaacttagccgggagcttcgacttcagatgcttattattgataactttatacctcgggattatcaggaaatgattgaaaactatgtccattggaatgaagacataggagaatggcagctaaaatgtgttgcttatacaggaaataacatgaggaagcaaaccccagtacctgataaaaaggagaaagatccctttgaggtggacctttctcacgtgtatcttgcctatactgaggagagtctgcgtcagtctttgatgaaactagaaagaccacgaacttcaaaggggaaagcaaggccaaagacagggagaagaaagcgttctgcaaagcctgaaactgtaattgactctttactgcagtaaatgttacagacttaaagtcacaataaaaattagtgatattctcatgcctggacaaaatctttaattaaaacagtgaagacttctctataatttcaattaatggaagttgtagatcaatgaataagactggaaataataatttgcttaagaacttttagtctacatatattaatataacattaaaattgtacaactggtgattgttcaaattgttgtactactactcttcaattgtactgtgcagggaagttgggggaacagttcatactatagagagttacagtttagatgtatgtgtaaatcgattagctatttatccaactactgtatatttaggtaactagaatttcaaaatagaaaaaaaaaaactgtgtcctgttttgcacatagaaagaagcagatcagattgtcctatgttgcgctgttatatatgaatgtttggactgtacatctaaagaatgattccgtcctaacacccacccagcctgtttgaacacattctaattgtctaacatttgttgcattttaagtatgagatgactgatcttatgaatgttttgtagaaaatgttataatttaacagtctttgcgagtatacatgttttttaacaagttgaaaatgtttcatctgaacctttcctaacttttttttgccagtttgagttcaaatcaaatacaccttaagttctggtttcatgttctcttgaaacattgaattgtacgtaaatataaaggatctactgttgcggaaaattaagaagctaaatactgctcagttatctttgcctgcgtgtatatttttaaaaattcactctgaagtgttatggatgcttttctttgagttctaaattttggtgggaattactttatgtctcccagttaagaagagtctccattttccagaaaatacagctaagcaagaaaaatatcttttaaatactttgcctttaaaacacttttttattttgtttttctattttaaaaataaaatattattttctg

SEQ ID NO: 146774 - DNA, 6103 bp, Homo sapiens
  Payload ID: 9038
  Gene Symbol: KIF3B
  Gene Name: kinesin family member 3B
  Uniprot ID: O15066
  ENST ID: ENST00000375712
  CDS Start-End: 168-2411
atccggggcagcggggaatggctgagccaggggttcgccgcccccgccgccgccgccgccgccgccgccgccgccgccgcccgctttcggctcgggcctcaggaccgtagcatcctgagacattttgaattgacacttctcaagatttgactggatcagagttcatcatgtcaaagttgaaaagctcagagtcagtcagggtggtggttcgctgtcggcccatgaatggcaaggaaaaggctgcttcgtatgacaaagtggtggatgtggatgttaagctggggcaggtgtctgtgaagaaccccaaagggacggcccatgaaatgcccaagaccttcacctttgatgccgtctatgactggaatgccaagcagtttgaactgtacgatgagacgttccgaccacttgttgactctgtcctgcaaggtttcaatggaaccatttttgcctatggacaaactgggacaggaaaaacctacaccatggaaggaatccgtggtgaccctgaaaaaagaggagtcattcctaactcatttgaccatatcttcacccacatctctcgatcccagaatcaacaatacctggtcagggcttcttacttagagatctaccaggaggagatccgagatttgctctcaaaggatcagaccaaaaggcttgagctcaaagagaggcctgacacaggagtgtatgtgaaagacctgtcttcctttgtcaccaagagtgtgaaggagatagagcatgtgatgaatgtggggaaccagaaccgttctgtcggtgctaccaacatgaacgagcacagctcgcgttctcatgcaattttcgttatcactattgagtgcagcgaggtgggcctcgatggtgaaaaccacatccgtgtaggaaaattgaaccttgtagatcttgctggcagcgaacggcaagccaagaccggcgcacaaggggagagattaaaagaagctaccaagatcaacctctccctttccgctttgggtaatgtcatctctgctctagtggacggcaaaagcactcacattccatatcgggactcaaagcttaccaggctcctccaagattcccttggtggcaatgccaagactgtgatggtggccaacgtggggcctgcctcttacaacgtagaagagactctgaccactctgcgatatgccaaccgtgccaaaaacattaagaacaaaccaagggtcaatgaggaccccaaggatgccctccttcgagaattccaggaagagattgctcggctcaaggcccagctggaaaaacggtccattggtaggaggaagaggcgagagaagcggagggaaggtggtggcagtggtgggggtggggaagaggaggaggaggagggagaagagggtgaggaggaaggggatgataaggatgattactggcgggaacagcaagaaaaactggagattgagaagcgggccattgtagaggatcacagcttggttgcagaggagaagatgaggctgctgaaggagaaagagaaaaagatggaggacctgcggcgggagaaggatgctgccgagatgctgggcgccaagatcaaggccatggagagtaagttgcttgttggaggaaaaaatatagtagatcatacgaatgaacagcagaaaatcctggagcagaaacgacaggaaattgcagagcagaaacgtcgagaaagagaaatccagcaacagatggaaagtcgagatgaggagaccttggaacttaaagagacatacagctcattgcagcaagaggtggacatcaagaccaaaaaactcaaaaagctcttctccaagcttcaggcagtgaaggctgagatccatgacctccaagaagaacacatcaaggagcgccaagagctagagcagactcagaatgagctcaccagggagctgaaactcaagcatcttattatagaaaactttatccctctggaagaaaaaagtaaaattatgaatagagccttctttgatgaagaggaagatcattggaaactacatcctataaccagactggagaaccagcagatgatgaagcggccagtctcagccgtgggatataagagaccattgagccagcacgcaagaatgtccatgatgattcgtccagaggcccgatatagggcagaaaacattgtgctgttagagctggacatgcccagccggaccaccagagactatgagggtccagccattgcccccaaggtccaggctgcattggatgcggctctgcaggatgaagatgagatacaggtggatgcatcatcatttgaaagcactgcaaataagaaatccaaggccaggcctaaaagtggaaggaagtcgggatcctcctcctcttcctcaggaacccctgcatctcagctttatccacagtctcgggggctggttccaaagtaaagccagcttctcctctcccagggcggaaacagcatttgccttctgagagaagagactagcaaaaagctgcagagaggattcggcccaaactcagaactgttcccctgaggagaagcggtggcctctttgcagatcaaccaacttaatctggttgaacgtgctgttcctaatctggcactcagcccctctgggaaacatcttttaattagcatctcagaaatgcatgggtaaggtaaagtgcgatagttcaagtggaaagcaagagaatgaccagtgaccttgcttccttcccccttgccttcttctcccccttcccctgtgctccctttctctcctctctccttttctagcctgttctttacatggggctcccttcttgttgaacaatagggcagaatcaggagtcaccttagcaggaccacatctttggagcctcgggataaaatgacagtgaggttgaaaagtgaaaaccctagaacttgaataggtgcctgttcttgtagggagaaatgagaaatcgcatttggatccaggccccaggtgggcaccatcagcagtcttgcttccatgcacctcagtaagaagtggatctgcctttgggacctgctcagtgaggaaatctcttccaatttctgcttctgaatgattcaatgttgggagcaatagaaataacattccctttgccttctctgagtgtttagggaaatagcttctttaaaacctcaaaaccatgaccatcctgtcaaagacctaagtctgtaagctggtgccatgtccatacaccatgtcactttactcttcatttgtcaccatcttttcccatgcacgcatactctgaacatccttgtgtgggcccatcctctgcatccagagcatgctctgcagtgggcctgttttgtggaagaaaggaggctgtctctgccttctctgatgggactggagttgagggaaggagctgtattgtggcacttctgaattccccgttttgttccatattggtatagagagcagaagagtagctaggcagatgcagagatggagacatgagactcagtgcagtgggcagggaagacataacagatggaagcaaaggaatcctgcctgccttcagcagagaattcaccgaatcctagaactgtggctccctccaggcagagcctaagatgctggtgaagaatagctgtgtgattgaataggctcaaaggagagttcagaattcccatttacatattactagtttggtttgtaagttttagttccttgtattattgagattcagagcttcattttatgttggtcattaggtgaatattactcattttccctcaagagaagctcataagtgtgtgtgggtgtgagagcacgatggtgcctgtgttctgtgaatgtgtccatatgtgtctgtaagagagacagagaccaagaacttgcccaattttagaaatacactaatgtgcagttgttgccttttgtctgtattgaaggcccattgaatgactaatccaggctggaagcattcccatgtgggtgtctgagtccatgagccaagcctgaggggacagtgagtctccaggtctgccacactggtgcaccttgctggcacggtgcctcaggaaggtggcgactcaggtgggccttgagttatattttaactcagctgctcagttcccagggcacatttctggatcagaacccatgggaaacaggaggtactaagtgcaatgtcttagcattctgcaaaatggagatctgttgtccagcggcttatctcctttttagtaacccttctttctgaacccagggcccttttcagccttccctcatattttcttgagatcaaactttacttctttcttatttactaagaatttgcctgtttgaataagaacaaaacgctaaggtgggtagcctaagctgattttctgctggttacacgtgtctctcacaccacatttcctcaaagctaatctgaattctgtaggctaaaaatattcatgtagcaaatctgagaattgaaaactgcagataaccggccgggtatggtgactcatgcctgtaatcctagcactttgggaggccgaggtgggtggaccacctgaggttaggacttcaagaccagcctggccaacatggtgaaaccccatctgtactaaaaatacaaaaatttgcctggtgtggtggtgcatgcctctagtcctagctactcgggaggctgaggcacgagaatcacttgaacctgggaggcggaggttgcagtgagtcgagataacactactgcattccagcctgggtgacagagtgagactccccctcaaaaaaaaaaaaaaaaaaaaaaaaaacagaaagaaagaaaaagaaaactgcagataaccctatacattaatactggtatctcgaggtgactcttctgaccaagggtggttaagtgacacatagaacttttctaagagaagacagacaagttgacaggcatgccttgtactcagctgtgttcatgtggtggtctgtggaaagaaaagaagactcatttggaaatgaagctgtccctttccaagcagtctctggtgcttttcttctctcaaaatggatccgataaatatttgaatagagcagattgtagaatgtcgtgctgtcaccagaaagctgctgttttgggttctgcattgagccaaatatgtagaggacctaccaagcccactgagggactaggttttcatgtctctagtcatacctagaatgttctgagccgtctgagggccttcatgccggcagcagctagcaaagccagaaagcaagtctaacaggatctaagatgaccatcaggagaaggagtttgagactgtgtatgcaacccccaatagacccccttttactctgatctggagaatgtatctggcttcatattttcaagtcacatgtctctcagacccctggattcagaacccaaggccacaaatcataggcatgaagcactttcttaagactgacctaacgctggattatttcccgtccaatgcctgcatgctgcttgaattgctccacccacacctccatgaccaagggcgccagagtgctgcaactggggcgtgggccgctctctgcttttcctgtctgactctgacaagtcctccctcactgaatgtagaatcgttgccaagtttctgagaagtgtcgattccctgttaacatggatatcagttctgcctcacatttcccacttgaggttgaggcgtactggagacaacacctcagaccatctgaaccccatcagtggacgaaaatggggctgttaatatactctaaaagccatactaaaaatgctctgagggaactggctaagaatagtgggcctggtgattgtctatcacgcaaggctttgttttgtactgttcagaaatctgtcacctttctgcctgcccttgtttcctgaatgaaatgcttctggggttatttatgaaaggagtgatcctggggcaggcaggaggcagtgggcttcatggctccttgaagttattactgatcttgaccttctctttggctacctttagacaaagaatacgccaatcaatacttggggctctaagttttacaattgatatttatttgtatcatctctttgtctaggaatgtaaaagtgattctaaactaagatgtgtaataaaaatcaatcagatttattgtacctacaaaaa

SEQ ID NO: 146775 - DNA, 5344 bp, Homo sapiens
  Payload ID: 9039
  Gene Symbol: KIF3C
  Gene Name: kinesin family member 3C
  Uniprot ID: O14782
  ENST ID: ENST00000264712
  CDS Start-End: 581-2962
gtttttctctctcattctccagtggcggcggcggggaaggcggaggcagaggcagcagcagccgcgctggctgcaatgaatgatcccccagcttggggggaggactccaggtgagcctctgccctcgggaggcccgggacccccggccgcccacgaccggcagcccacgctatggatccctagaggaaggaggagaagacagctcgccgcccacccccatcccattttcctcttcctttatctcattgttgccgaagctgtttacggcagcgctccctctgctcctgcatggggcgggctccgggcacggctgctcggcaggcgctgctcccgcggcgactgggggattctgcctaattcacctcccagccggtgcagagaggaccggagagcggtggaggcccggactgcagcagcgttggggccacctcccagcgtccccaccctaggaggctgcatgcggattgaagagctgcgcctgggggctgggccggccccgctgatcccgacctagcgagcaggatagcaggaccgcccaggctgcggaggggctcgggggcaggaaggtcagagcagcaagatggccagtaagaccaaggccagcgaggccctcaaggtggtggcccggtgccgccccctcagcaggaaggaggaggctgctggtcacgagcagatcctgaccatggacgtgaaactgggccaggtgaccctgcggaacccccgcgccgccccgggggagctgcccaagaccttcacctttgacgccgtgtatgatgccagctccaagcaggccgacctgtatgacgaaaccgtgaggcccctgatagactccgtgctccagggtttcaatggcacggtgtttgcctatggccagacgggcactggcaagacctataccatgcaggggacctgggtggagcccgagctgcgcggggtcatcccgaatgcctttgagcacatcttcacccacatctcccgctcccagaaccaacagtacctggtccgggcctcctatttggagatctaccaggaagagattcgagacctgctctccaaggagccgggcaagaggctagagctgaaagagaaccccgagactggcgtctacatcaaggacctctcctccttcgtcaccaagaatgtcaaggagattgagcatgtgatgaacctggggaaccagacccgggctgtgggcagcacccacatgaatgaggtcagctcccgctcccatgccatcttcatcatcactgtggagtgcagcgaacgtggctctgatggccaggaccacatccgagtgggcaagctcaacctcgtggacctggctggcagcgagaggcagaacaaggcaggccccaacacagcgggaggggcagccacaccatcctcgggtggcggtggtggcggtggaggcagtggtggtggtgctggtggagagaggcctaaggaagcctccaaaatcaacctctcattatctgccctgggcaacgtgattgctgccctggcgggcaacaggagcacccacattccctaccgggactccaagctgacccggctgctccaggactccctgggggggaatgccaagaccatcatggtagccacactggggccagcttctcacagctacgatgagagcctctccaccttgcgctttgccaaccgagccaagaacatcaagaacaagccccgggtgaacgaggaccccaaggacacactgctgcgggaattccaagaggagattgcccgcctgaaggcccagctggagaagagggggatgctggggaagcggccccggaggaagagcagccgcaggaagaaggccgtgtccgccccgcctgggtaccctgagggcccagtgattgaggcctgggtggcagaagaggaggatgacaacaacaacaaccaccgcccgccccagcccatcctggagtcagccttggagaagaacatggagaattacctgcaggaacagaaggagcggctggaggaggagaaggcagccatccaggatgaccgcagcctggtgagcgaggagaagcagaagctgctggaggagaaggagaagatgctggaggacctgcggcgggaacagcaggccacagagctgcttgcggccaagtacaaggccatggagagcaagctcctcatcgggggcaggaacatcatggatcacaccaacgaacagcagaagatgttggaactgaagaggcaggagattgccgagcagaaacgtcgtgagcgggagatgcagcaggagatgatgctccgggacgaggagactatggagctccggggcacctacacatccctgcagcaggaggtggaggtcaaaaccaagaaactcaagaagctctacgccaagctgcaggcggtgaaggcggagatccaggaccagcatgatgagtatatccgcgtgcggcaggacctggaggaggcgcagaacgagcagacccgcgaactcaagctcaagtacctaatcatcgagaacttcatcccgccggaggagaagaacaagatcatgaaccggcttttcctggactgtgaggaggagcagtggaagttccagccactggtgccagccggcgtcagtagcagccagatgaagaagcggccaacatctgcagtgggctacaagaggcctatcagccagtatgctcgggttgccatggcaatggggtcccaccccaggtacagggctgaaaacataatgtttctggagttggatgtgtcccctccagctgtctttgagatggaattctctcacgaccaagaacaagaccctcgtgcgctacacatggagaggctcatgcgattggacagctttctggaaagaccttccacgtctaaagtccgaaagtccagatcctggtgccagagtcctcagcggcctccaccttccaccacacatgcctccctggcctctgcttctctgcgccctgcaacagtggcggaccatgagtgacaaccatcacgtcaggctgcccatccaatagactcctgggatggggcagccaaccctggctcatctcatctgccgcttggtgcgtgtgcgtgtgcgtgcatgtgcgtgtgcgtgtgtgcaggggtgagaatctggcagatggtgcctctgcctgctcttcttcgcctcctttatttaattcatgttatttattcgcggagctctgttcgtgttggggagatgccctcgcctgagccgtctgggcctaccgtggtcactgcgtagcctctttttcttctgacttgagagctcccccagtcagatctcaggcttgtccccctgtcagctgcctccagaagggaaggtagccagtgcctgagaagacagtcccttttctacccaccgcactccataacctccatcttctcccacactgatggcgagcagcccctgagcactttctgggactgggagactgcttggtgttccctgaggacaagagacatcctgacagtgttgggcatctgctccccgtggacacagccccactctccactttctgagcctcagacaacctcattcagcctcttgggctccttttcaaggacattaataacctcaccaacatagctcatgcccttcagctttgacaagaactcacagcttcccaaactctgctttctgcccaccttggatgggaactgtggaccaagcaattaccatcgccttggaacctgcaggaaatggaacagcaattgagacaacttgaacagtcatcaacggaagtccctccactggattcctttgtttctgtcccctccgaggagtcattttggtcgacaggctctcaaggcaactccccattttcaagaggctgctcctgcctgcttcgatcatttctccctgcagctgcctagaccccgttcacagtgggaggagtcaatgtcattctacccctcgctaaacgaagatattaacatctattgctttttcccttcatctgtcacaggaaacagaagcccaggcacaatcttttccagctttgcctgttacccctgtttctgaattgcatctttaaggtattattttgttgaaaatagatcctttattcactagttacgcaaattggttcctagggggatactccttaccttcctttgtgatggcccaaaatgtctctaggtatctcaagtgataagtaaatttctacaaaaaaaaatggttaatgttcattgactggctttttaagtgtatattttggaggacgggtgaagaggtcataacgaaagcaagcgagtgaattaggatttcaaagtgccctaatagtgtgagtctccagttcctagaatatgaagagtgctgtcgttggggtgaaaccatgagactgacagatctgcctgaaatggggggtgtgggaggtggtggcgggggttattctctttccttcaggaaatgaacccttcttacatcattcaagttctgctctgaggatcaagcttgggtctgatttaactcagcgacactgtcatttctgcttcattactggactagagggttgagccacccacttgccatttgctcctgtccttccaggaaatcacaattttcatcagagcccaagagattatttgagactcaggattcagatcagaggttcgactgtggctgggacaggagttgtgtgtagaaattcaccaggtggcctgagcgcagggggacctccagggctgcgttgagcagcctctcccactgacctctttctcgtttgtggacaaagcagcacgtatcacctcattcatcacttggacacatcgcctttgcattgtcttgtcacacctccctcacagtcttatagcacaatatacccaaatcagcccccccagtccgagggctgggcccgaggtatggtcggaggaggagctcctgcctgcggttttgtgtatgtgtgtatgtgtgtgcgtgtttgtgtgcgtgtttacctccacaggggacactctacactcagtgtaagatctgctgggaacagggccaccaggagtggctggatctcagtctctctgtctctctttctctccttttccttttggtgtatcaaatatttgattgacaaagtaagggccttgattaggaccaaattctcgtgtgttgctatggtctttatttaggacaacaattaacaatgcagtggcccattcttgtcactctacacatatgactatacgggacatatgtaatatataaatatatatataaaacattcccctctgtccccttggcttcggatggaggcctttctgttgagctgaaatgcacctgcagctgggtgctgccagcagcttgcaggccccagccctgttccaatcaatgcagttgacaataaaggaatgagtatcgtcacggagt

SEQ ID NO: 146776 - DNA, 3180 bp, Homo sapiens
  Payload ID: 9039
  Gene Symbol: KIF3C
  Gene Name: kinesin family member 3C
  Uniprot ID: O14782
  ENST ID: ENST00000405914
  CDS Start-End: 574-2955
ggcggtggctgcgctgcacccgactggtgggcgcaggacctgggtcggcaccggagcctgtcatcccggagcggtcggcgggggtgcagagacggcgatgcgcccctgtcccccgcacccgggccgctccgggctcgcgcctcccgccccgcggccccgccccctgccccaccccagtcgggaggcttagctggggccgcagcgcggcggcaacatcactctcgctgccgctgctccgccccatccccttctgtttttctctctcattctccagtggcggcggcggggaaggcggaggcagaggcagcagcagccgcgctggctgcaatgaatgatcccccagcttggggggaggactccagccggtgcagagaggaccggagagcggtggaggcccggactgcagcagcgttggggccacctcccagcgtccccaccctaggaggctgcatgcggattgaagagctgcgcctgggggctgggccggccccgctgatcccgacctagcgagcaggatagcaggaccgcccaggctgcggaggggctcgggggcaggaaggtcagagcagcaagatggccagtaagaccaaggccagcgaggccctcaaggtggtggcccggtgccgccccctcagcaggaaggaggaggctgctggtcacgagcagatcctgaccatggacgtgaaactgggccaggtgaccctgcggaacccccgcgccgccccgggggagctgcccaagaccttcacctttgacgccgtgtatgatgccagctccaagcaggccgacctgtatgacgaaaccgtgaggcccctgatagactccgtgctccagggtttcaatggcacggtgtttgcctatggccagacgggcactggcaagacctataccatgcaggggacctgggtggagcccgagctgcgcggggtcatcccgaatgcctttgagcacatcttcacccacatctcccgctcccagaaccaacagtacctggtccgggcctcctatttggagatctaccaggaagagattcgagacctgctctccaaggagccgggcaagaggctagagctgaaagagaaccccgagactggcgtctacatcaaggacctctcctccttcgtcaccaagaatgtcaaggagattgagcatgtgatgaacctggggaaccagacccgggctgtgggcagcacccacatgaatgaggtcagctcccgctcccatgccatcttcatcatcactgtggagtgcagcgaacgtggctctgatggccaggaccacatccgagtgggcaagctcaacctcgtggacctggctggcagcgagaggcagaacaaggcaggccccaacacagcgggaggggcagccacaccatcctcgggtggcggtggtggcggtggaggcagtggtggtggtgctggtggagagaggcctaaggaagcctccaaaatcaacctctcattatctgccctgggcaacgtgattgctgccctggcgggcaacaggagcacccacattccctaccgggactccaagctgacccggctgctccaggactccctgggggggaatgccaagaccatcatggtagccacactggggccagcttctcacagctacgatgagagcctctccaccttgcgctttgccaaccgagccaagaacatcaagaacaagccccgggtgaacgaggaccccaaggacacactgctgcgggaattccaagaggagattgcccgcctgaaggcccagctggagaagagggggatgctggggaagcggccccggaggaagagcagccgcaggaagaaggccgtgtccgccccgcctgggtaccctgagggcccagtgattgaggcctgggtggcagaagaggaggatgacaacaacaacaaccaccgcccgccccagcccatcctggagtcagccttggagaagaacatggagaattacctgcaggaacagaaggagcggctggaggaggagaaggcagccatccaggatgaccgcagcctggtgagcgaggagaagcagaagctgctggaggagaaggagaagatgctggaggacctgcggcgggaacagcaggccacagagctgcttgcggccaagtacaaggccatggagagcaagctcctcatcgggggcaggaacatcatggatcacaccaacgaacagcagaagatgttggaactgaagaggcaggagattgccgagcagaaacgtcgtgagcgggagatgcagcaggagatgatgctccgggacgaggagactatggagctccggggcacctacacatccctgcagcaggaggtggaggtcaaaaccaagaaactcaagaagctctacgccaagctgcaggcggtgaaggcggagatccaggaccagcatgatgagtatatccgcgtgcggcaggacctggaggaggcgcagaacgagcagacccgcgaactcaagctcaagtacctaatcatcgagaacttcatcccgccggaggagaagaacaagatcatgaaccggcttttcctggactgtgaggaggagcagtggaagttccagccactggtgccagccggcgtcagtagcagccagatgaagaagcggccaacatctgcagtgggctacaagaggcctatcagccagtatgctcgggttgccatggcaatggggtcccaccccaggtacagggctgaaaacataatgtttctggagttggatgtgtcccctccagctgtctttgagatggaattctctcacgaccaagaacaagaccctcgtgcgctacacatggagaggctcatgcgattggacagctttctggaaagaccttccacgtctaaagtccgaaagtccagatcctggtgccagagtcctcagcggcctccaccttccaccacacatgcctccctggcctctgcttctctgcgccctgcaacagtggcggaccatgagtgacaaccatcacgtcaggctgcccatccaatagactcctgggatggggcagccaaccctggctcatctcatctgccgcttggtgcgtgtgcgtgtgcgtgcatgtgcgtgtgcgtgtgtgcaggggtgagaatctggcagatggtgcctctgcctgctcttcttcgcctcctttatttaattcatgttatttattcgcggagctctgttcgtgttggggagatgccc

SEQ ID NO: 146777 - DNA, 5452 bp, Homo sapiens
  Payload ID: 9039
  Gene Symbol: KIF3C
  Gene Name: kinesin family member 3C
  ENST ID: ENST00000417737
  CDS Start-End: 581-2638
gtttttctctctcattctccagtggcggcggcggggaaggcggaggcagaggcagcagcagccgcgctggctgcaatgaatgatcccccagcttggggggaggactccaggtgagcctctgccctcgggaggcccgggacccccggccgcccacgaccggcagcccacgctatggatccctagaggaaggaggagaagacagctcgccgcccacccccatcccattttcctcttcctttatctcattgttgccgaagctgtttacggcagcgctccctctgctcctgcatggggcgggctccgggcacggctgctcggcaggcgctgctcccgcggcgactgggggattctgcctaattcacctcccagccggtgcagagaggaccggagagcggtggaggcccggactgcagcagcgttggggccacctcccagcgtccccaccctaggaggctgcatgcggattgaagagctgcgcctgggggctgggccggccccgctgatcccgacctagcgagcaggatagcaggaccgcccaggctgcggaggggctcgggggcaggaaggtcagagcagcaagatggccagtaagaccaaggccagcgaggccctcaaggtggtggcccggtgccgccccctcagcaggaaggaggaggctgctggtcacgagcagatcctgaccatggacgtgaaactgggccaggtgaccctgcggaacccccgcgccgccccgggggagctgcccaagaccttcacctttgacgccgtgtatgatgccagctccaagcaggccgacctgtatgacgaaaccgtgaggcccctgatagactccgtgctccagggtttcaatggcacggtgtttgcctatggccagacgggcactggcaagacctataccatgcaggggacctgggtggagcccgagctgcgcggggtcatcccgaatgcctttgagcacatcttcacccacatctcccgctcccagaaccaacagtacctggtccgggcctcctatttggagatctaccaggaagagattcgagacctgctctccaaggagccgggcaagaggctagagctgaaagagaaccccgagactggcgtctacatcaaggacctctcctccttcgtcaccaagaatgtcaaggagattgagcatgtgatgaacctggggaaccagacccgggctgtgggcagcacccacatgaatgaggtcagctcccgctcccatgccatcttcatcatcactgtggagtgcagcgaacgtggctctgatggccaggaccacatccgagtgggcaagctcaacctcgtggacctggctggcagcgagaggcagaacaaggcaggccccaacacagcgggaggggcagccacaccatcctcgggtggcggtggtggcggtggaggcagtggtggtggtgctggtggagagaggcctaaggaagcctccaaaatcaacctctcattatctgccctgggcaacgtgattgctgccctggcgggcaacaggagcacccacattccctaccgggactccaagctgacccggctgctccaggactccctgggggggaatgccaagaccatcatggtagccacactggggccagcttctcacagctacgatgagagcctctccaccttgcgctttgccaaccgagccaagaacatcaagaacaagccccgggtgaacgaggaccccaaggacacactgctgcgggaattccaagaggagattgcccgcctgaaggcccagctggagaagagggggatgctggggaagcggccccggaggaagagcagccgcaggaagaaggccgtgtccgccccgcctgggtaccctgagggcccagtgattgaggcctgggtggcagaagaggaggatgacaacaacaacaaccaccgcccgccccagcccatcctggagtcagccttggagaagaacatggagaattacctgcaggaacagaaggagcggctggaggaggagaaggcagccatccaggatgaccgcagcctggtgagcgaggagaagcagaagctgctggaggagaaggagaagatgctggaggacctgcggcgggaacagcaggccacagagctgcttgcggccaagtacaaggccatggagagcaagctcctcatcgggggcaggaacatcatggatcacaccaacgaacagcagaagatgttggaactgaagaggcaggagattgccgagcagaaacgtcgtgagcgggagatgcagcaggagatgatgctccgggacgaggagactatggagctccggggcacctacacatccctgcagcaggaggtggaggtcaaaaccaagaaactcaagaagctctacgccaagctgcaggcggtgaaggcggagatccaggaccagcatgatgagtatatccgcgtgcggcaggacctggaggaggcgcagaacgagcagacccgcgaactcaagctcaagtacctaatcatcgagaacttcatcccgccggaggagaagaacaagatcatgaaccggcttttcctggactgtgaggaggagcagtggaagttccagccactggtgccagccggcgtactcactctgtcgcccaggctgaaatgcagtggcacgatctcagctcactgaaacctccatctcccaggttcaagcaattctctgagtaacctcctcagtagctggggttacagcagtagcagccagatgaagaagcggccaacatctgcagtgggctacaagaggcctatcagccagtatgctcgggttgccatggcaatggggtcccaccccaggtacagggctgaaaacataatgtttctggagttggatgtgtcccctccagctgtctttgagatggaattctctcacgaccaagaacaagaccctcgtgcgctacacatggagaggctcatgcgattggacagctttctggaaagaccttccacgtctaaagtccgaaagtccagatcctggtgccagagtcctcagcggcctccaccttccaccacacatgcctccctggcctctgcttctctgcgccctgcaacagtggcggaccatgagtgacaaccatcacgtcaggctgcccatccaatagactcctgggatggggcagccaaccctggctcatctcatctgccgcttggtgcgtgtgcgtgtgcgtgcatgtgcgtgtgcgtgtgtgcaggggtgagaatctggcagatggtgcctctgcctgctcttcttcgcctcctttatttaattcatgttatttattcgcggagctctgttcgtgttggggagatgccctcgcctgagccgtctgggcctaccgtggtcactgcgtagcctctttttcttctgacttgagagctcccccagtcagatctcaggcttgtccccctgtcagctgcctccagaagggaaggtagccagtgcctgagaagacagtcccttttctacccaccgcactccataacctccatcttctcccacactgatggcgagcagcccctgagcactttctgggactgggagactgcttggtgttccctgaggacaagagacatcctgacagtgttgggcatctgctccccgtggacacagccccactctccactttctgagcctcagacaacctcattcagcctcttgggctccttttcaaggacattaataacctcaccaacatagctcatgcccttcagctttgacaagaactcacagcttcccaaactctgctttctgcccaccttggatgggaactgtggaccaagcaattaccatcgccttggaacctgcaggaaatggaacagcaattgagacaacttgaacagtcatcaacggaagtccctccactggattcctttgtttctgtcccctccgaggagtcattttggtcgacaggctctcaaggcaactccccattttcaagaggctgctcctgcctgcttcgatcatttctccctgcagctgcctagaccccgttcacagtgggaggagtcaatgtcattctacccctcgctaaacgaagatattaacatctattgctttttcccttcatctgtcacaggaaacagaagcccaggcacaatcttttccagctttgcctgttacccctgtttctgaattgcatctttaaggtattattttgttgaaaatagatcctttattcactagttacgcaaattggttcctagggggatactccttaccttcctttgtgatggcccaaaatgtctctaggtatctcaagtgataagtaaatttctacaaaaaaaaatggttaatgttcattgactggctttttaagtgtatattttggaggacgggtgaagaggtcataacgaaagcaagcgagtgaattaggatttcaaagtgccctaatagtgtgagtctccagttcctagaatatgaagagtgctgtcgttggggtgaaaccatgagactgacagatctgcctgaaatggggggtgtgggaggtggtggcgggggttattctctttccttcaggaaatgaacccttcttacatcattcaagttctgctctgaggatcaagcttgggtctgatttaactcagcgacactgtcatttctgcttcattactggactagagggttgagccacccacttgccatttgctcctgtccttccaggaaatcacaattttcatcagagcccaagagattatttgagactcaggattcagatcagaggttcgactgtggctgggacaggagttgtgtgtagaaattcaccaggtggcctgagcgcagggggacctccagggctgcgttgagcagcctctcccactgacctctttctcgtttgtggacaaagcagcacgtatcacctcattcatcacttggacacatcgcctttgcattgtcttgtcacacctccctcacagtcttatagcacaatatacccaaatcagcccccccagtccgagggctgggcccgaggtatggtcggaggaggagctcctgcctgcggttttgtgtatgtgtgtatgtgtgtgcgtgtttgtgtgcgtgtttacctccacaggggacactctacactcagtgtaagatctgctgggaacagggccaccaggagtggctggatctcagtctctctgtctctctttctctccttttccttttggtgtatcaaatatttgattgacaaagtaagggccttgattaggaccaaattctcgtgtgttgctatggtctttatttaggacaacaattaacaatgcagtggcccattcttgtcactctacacatatgactatacgggacatatgtaatatataaatatatatataaaacattcccctctgtccccttggcttcggatggaggcctttctgttgagctgaaatgcacctgcagctgggtgctgccagcagcttgcaggccccagccctgttccaatcaatgcagttgacaataaaggaatgagtatcgtca

SEQ ID NO: 146778 - DNA, 5462 bp, Homo sapiens
  Payload ID: 9039
  Gene Symbol: KIF3C
  Gene Name: kinesin family member 3C
  ENST ID: ENST00000455394
  CDS Start-End: 581-2599
gtttttctctctcattctccagtggcggcggcggggaaggcggaggcagaggcagcagcagccgcgctggctgcaatgaatgatcccccagcttggggggaggactccaggtgagcctctgccctcgggaggcccgggacccccggccgcccacgaccggcagcccacgctatggatccctagaggaaggaggagaagacagctcgccgcccacccccatcccattttcctcttcctttatctcattgttgccgaagctgtttacggcagcgctccctctgctcctgcatggggcgggctccgggcacggctgctcggcaggcgctgctcccgcggcgactgggggattctgcctaattcacctcccagccggtgcagagaggaccggagagcggtggaggcccggactgcagcagcgttggggccacctcccagcgtccccaccctaggaggctgcatgcggattgaagagctgcgcctgggggctgggccggccccgctgatcccgacctagcgagcaggatagcaggaccgcccaggctgcggaggggctcgggggcaggaaggtcagagcagcaagatggccagtaagaccaaggccagcgaggccctcaaggtggtggcccggtgccgccccctcagcaggaaggaggaggctgctggtcacgagcagatcctgaccatggacgtgaaactgggccaggtgaccctgcggaacccccgcgccgccccgggggagctgcccaagaccttcacctttgacgccgtgtatgatgccagctccaagcaggccgacctgtatgacgaaaccgtgaggcccctgatagactccgtgctccagggtttcaatggcacggtgtttgcctatggccagacgggcactggcaagacctataccatgcaggggacctgggtggagcccgagctgcgcggggtcatcccgaatgcctttgagcacatcttcacccacatctcccgctcccagaaccaacagtacctggtccgggcctcctatttggagatctaccaggaagagattcgagacctgctctccaaggagccgggcaagaggctagagctgaaagagaaccccgagactggcgtctacatcaaggacctctcctccttcgtcaccaagaatgtcaaggagattgagcatgtgatgaacctggggaaccagacccgggctgtgggcagcacccacatgaatgaggtcagctcccgctcccatgccatcttcatcatcactgtggagtgcagcgaacgtggctctgatggccaggaccacatccgagtgggcaagctcaacctcgtggacctggctggcagcgagaggcagaacaaggcaggccccaacacagcgggaggggcagccacaccatcctcgggtggcggtggtggcggtggaggcagtggtggtggtgctggtggagagaggcctaaggaagcctccaaaatcaacctctcattatctgccctgggcaacgtgattgctgccctggcgggcaacaggagcacccacattccctaccgggactccaagctgacccggctgctccaggactccctgggggggaatgccaagaccatcatggtagccacactggggccagcttctcacagctacgatgagagcctctccaccttgcgctttgccaaccgagccaagaacatcaagaacaagccccgggtgaacgaggaccccaaggacacactgctgcgggaattccaagaggagattgcccgcctgaaggcccagctggagaagagggggatgctggggaagcggccccggaggaagagcagccgcaggaagaaggccgtgtccgccccgcctgggtaccctgagggcccagtgattgaggcctgggtggcagaagaggaggatgacaacaacaacaaccaccgcccgccccagcccatcctggagtcagccttggagaagaacatggagaattacctgcaggaacagaaggagcggctggaggaggagaaggcagccatccaggatgaccgcagcctggtgagcgaggagaagcagaagctgctggaggagaaggagaagatgctggaggacctgcggcgggaacagcaggccacagagctgcttgcggccaagtacaaggccatggagagcaagctcctcatcgggggcaggaacatcatggatcacaccaacgaacagcagaagatgttggaactgaagaggcaggagattgccgagcagaaacgtcgtgagcgggagatgcagcaggagatgatgctccgggacgaggagactatggagctccggggcacctacacatccctgcagcaggaggtggaggtcaaaaccaagaaactcaagaagctctacgccaagctgcaggcggtgaaggcggagatccaggaccagcatgatgagtatatccgcgtgcggcaggacctggaggaggcgcagaacgagcagacccgcgaactcaagctcaagtacctaatcatcgagaacttcatcccgccggaggagaagaacaagatcatgaaccggcttttcctggactgtgaggaggagcagtggaagttccagccactggtgccagccggcgtatattttatgtaaatggaatcacacaatatgtagtccgttgcgactgagttcttccacttagcaaaatgttttcaaggttcgtccatgttggaacactcatcagtacttcattcctttgtattgcagtagcagccagatgaagaagcggccaacatctgcagtgggctacaagaggcctatcagccagtatgctcgggttgccatggcaatggggtcccaccccaggtacagggctgaaaacataatgtttctggagttggatgtgtcccctccagctgtctttgagatggaattctctcacgaccaagaacaagaccctcgtgcgctacacatggagaggctcatgcgattggacagctttctggaaagaccttccacgtctaaagtccgaaagtccagatcctggtgccagagtcctcagcggcctccaccttccaccacacatgcctccctggcctctgcttctctgcgccctgcaacagtggcggaccatgagtgacaaccatcacgtcaggctgcccatccaatagactcctgggatggggcagccaaccctggctcatctcatctgccgcttggtgcgtgtgcgtgtgcgtgcatgtgcgtgtgcgtgtgtgcaggggtgagaatctggcagatggtgcctctgcctgctcttcttcgcctcctttatttaattcatgttatttattcgcggagctctgttcgtgttggggagatgccctcgcctgagccgtctgggcctaccgtggtcactgcgtagcctctttttcttctgacttgagagctcccccagtcagatctcaggcttgtccccctgtcagctgcctccagaagggaaggtagccagtgcctgagaagacagtcccttttctacccaccgcactccataacctccatcttctcccacactgatggcgagcagcccctgagcactttctgggactgggagactgcttggtgttccctgaggacaagagacatcctgacagtgttgggcatctgctccccgtggacacagccccactctccactttctgagcctcagacaacctcattcagcctcttgggctccttttcaaggacattaataacctcaccaacatagctcatgcccttcagctttgacaagaactcacagcttcccaaactctgctttctgcccaccttggatgggaactgtggaccaagcaattaccatcgccttggaacctgcaggaaatggaacagcaattgagacaacttgaacagtcatcaacggaagtccctccactggattcctttgtttctgtcccctccgaggagtcattttggtcgacaggctctcaaggcaactccccattttcaagaggctgctcctgcctgcttcgatcatttctccctgcagctgcctagaccccgttcacagtgggaggagtcaatgtcattctacccctcgctaaacgaagatattaacatctattgctttttcccttcatctgtcacaggaaacagaagcccaggcacaatcttttccagctttgcctgttacccctgtttctgaattgcatctttaaggtattattttgttgaaaatagatcctttattcactagttacgcaaattggttcctagggggatactccttaccttcctttgtgatggcccaaaatgtctctaggtatctcaagtgataagtaaatttctacaaaaaaaaatggttaatgttcattgactggctttttaagtgtatattttggaggacgggtgaagaggtcataacgaaagcaagcgagtgaattaggatttcaaagtgccctaatagtgtgagtctccagttcctagaatatgaagagtgctgtcgttggggtgaaaccatgagactgacagatctgcctgaaatggggggtgtgggaggtggtggcgggggttattctctttccttcaggaaatgaacccttcttacatcattcaagttctgctctgaggatcaagcttgggtctgatttaactcagcgacactgtcatttctgcttcattactggactagagggttgagccacccacttgccatttgctcctgtccttccaggaaatcacaattttcatcagagcccaagagattatttgagactcaggattcagatcagaggttcgactgtggctgggacaggagttgtgtgtagaaattcaccaggtggcctgagcgcagggggacctccagggctgcgttgagcagcctctcccactgacctctttctcgtttgtggacaaagcagcacgtatcacctcattcatcacttggacacatcgcctttgcattgtcttgtcacacctccctcacagtcttatagcacaatatacccaaatcagcccccccagtccgagggctgggcccgaggtatggtcggaggaggagctcctgcctgcggttttgtgtatgtgtgtatgtgtgtgcgtgtttgtgtgcgtgtttacctccacaggggacactctacactcagtgtaagatctgctgggaacagggccaccaggagtggctggatctcagtctctctgtctctctttctctccttttccttttggtgtatcaaatatttgattgacaaagtaagggccttgattaggaccaaattctcgtgtgttgctatggtctttatttaggacaacaattaacaatgcagtggcccattcttgtcactctacacatatgactatacgggacatatgtaatatataaatatatatataaaacattcccctctgtccccttggcttcggatggaggcctttctgttgagctgaaatgcacctgcagctgggtgctgccagcagcttgcaggccccagccctgttccaatcaatgcagttgacaataaaggaatgagtatcgtca

SEQ ID NO: 146779 - DNA, 3719 bp, Homo sapiens
  Payload ID: 9039
  Gene Symbol: KIF3C
  Gene Name: kinesin family member 3C
  ENST ID: ENST00000614152
  CDS Start-End: 154-2532
cctcccagcgtccccaccctaggaggctgcatgcggattgaagagctgcgcctgggggctgggccggccccgctgatcccgacctagcgagcaggatagcaggaccgcccaggctgcggaggggctcgggggcaggaaggtcagagcagcaagatggccagtaagaccaaggccagcgaggccctcaaggtggtggcccggtgccgccccctcagcaggaaggaggaggctgctggtcacgagcagatcctgaccatggacgtgaaactgggccaggtgaccctgcggaacccccgcgccgccccgggggagctgcccaagaccttcacctttgacgccgtgtatgatgccagctccaagcaggccgacctgtatgacgaacgtgagcccctgatagactccgtgctccagggtttcaatggcacggtgtttgcctatggccagacgggcactggcaagacctataccatgcaggggacctgggtggagcccgagctgcgcggggtcatcccgaatgcctttgagcacatcttcacccacatctcccgctcccagaaccaacagtacctggtccgggcctcctatttggagatctaccaggaagagattcgagacctgctctccaaggagccgggcaagaggctagagctgaaagagaaccccgagactggcgtctacatcaaggacctctcctccttcgtcaccaagaatgtcaaggagattgagcatgtgatgaacctggggaaccagacccgggctgtgggcagcacccacatgaatgaggtcagctcccgctcccatgccatcttcatcatcactgtggagtgcagcgaacgtggctctgatggccaggaccacatccgagtgggcaagctcaacctcgtggacctggctggcagcgagaggcagaacaaggcaggccccaacacagcgggaggggcagccacaccatcctcgggtggcggtggtggcggtggaggcagtggtggtggtgctggtggagagaggcctaaggaagcctccaaaatcaacctctcattatctgccctgggcaacgtgattgctgccctggcgggcaacaggagcacccacattccctaccgggactccaagctgacccggctgctccaggactccctgggggggaatgccaagaccatcatggtagccacactggggccagcttctcacagctacgatgagagcctctccaccttgcgctttgccaaccgagccaagaacatcaagaacaagccccgggtgaacgaggaccccaaggacacactgctgcgggaattccaagaggagattgcccgcctgaaggcccagctggagaagagggggatgctggggaagcggccccggaggaagagcagccgcaggaagaaggccgtgtccgccccgcctgggtaccctgagggcccagtgattgaggcctgggtggcagaagaggaggatgacaacaacaacaaccaccgcccgccccagcccatcctggagtcagccttggagaagaacatggagaattacctgcaggaacagaaggagcggctggaggaggagaaggcagccatccaggatgaccgcagcctggtgagcgaggagaagcagaagctgctggaggagaaggagaagatgctggaggacctgcggcgggaacagcaggccacagagctgcttgcggccaagtacaaggccatggagagcaagctcctcatcgggggcaggaacatcatggatcacaccaacgaacagcagaagatgttggaactgaagaggcaggagattgccgagcagaaacgtcgtgagcgggagatgcagcaggagatgatgctccgggacgaggagactatggagctccggggcacctacacatccctgcagcaggaggtggaggtcaaaaccaagaaactcaagaagctctacgccaagctgcaggcggtgaaggcggagatccaggaccagcatgatgagtatatccgcgtgcggcaggacctggaggaggcgcagaacgagcagacccgcgaactcaagctcaagtacctaatcatcgagaacttcatcccgccggaggagaagaacaagatcatgaaccggcttttcctggactgtgaggaggagcagtggaagttccagccactggtgccagccggcgtcagtagcagccagatgaagaagcggccaacatctgcagtgggctacaagaggcctatcagccagtatgctcgggttgccatggcaatggggtcccaccccaggtacagggctgaaaacataatgtttctggagttggatgtgtcccctccagctgtctttgagatggaattctctcacgaccaagaacaagaccctcgtgcgctacacatggagaggctcatgcgattggacagctttctggaaagaccttccacgtctaaagtccgaaagtccagatcctggtgccagagtcctcagcggcctccaccttccaccacacatgcctccctggcctctgcttctctgcgccctgcaacagtggcggaccatgagtgacaaccatcacgtcaggctgcccatccaatagactcctgggatggggcagccaaccctggctcatctcatctgccgcttggtgcgtgtgcgtgtgcgtgcatgtgcgtgtgcgtgtgtgcaggggtgagaatctggcagatggtgcctctgcctgctcttcttcgcctcctttatttaattcatgttatttattcgcggagctctgttcgtgttggggagatgccctcgcctgagccgtctgggcctaccgtggtcactgcgtagcctctttttcttctgacttgagagctcccccagtcagatctcaggcttgtccccctgtcagctgcctccagaagggaaggtagccagtgcctgagaagacagtcccttttctacccaccgcactccataacctccatcttctcccacactgatggcgagcagcccctgagcactttctgggactgggagactgcttggtgttccctgaggacaagagacatcctgacagtgttgggcatctgctccccgtggacacagccccactctccactttctgagcctcagacaacctcattcagcctcttgggctccttttcaaggacattaataacctcaccaacatagctcatgcccttcagctttgacaagaactcacagcttcccaaactctgctttctgcccaccttggatgggaactgtggaccaagcaattaccatcgccttggaacctgcaggaaatggaacagcaattgagacaacttgaacagtcatcaacggaagtccctccactggattcctttgtttctgtcccctccgaggagtcattttggtcgacaggctctcaaggcaactccccattttcaagaggctgctcctgcctgcttcgatcatttctccctgcagctgcctagaccccgttcacagtgggaggagtcaatgtcattctacccctcgctaaacgaagatattaacatctattgctttttcccttcatctgtcacaggaaacagaagcccaggcacaatcttttccagctttgcctgttacccctgtttctgaattgcatctttaaggtattattttgttgaaaatagatcctttattcactagttacgcaaattggttcctagggggatactccttaccttcctttgtgatggcccaaaatgtctctaggtatctcaagtgataagtaaatttct

SEQ ID NO: 146780 - DNA, 4348 bp, Homo sapiens
  Payload ID: 9040
  Gene Symbol: KIF4A
  Gene Name: kinesin family member 4A
  Uniprot ID: O95239
  ENST ID: ENST00000374403
  CDS Start-End: 83-3781
gctccggctgggacagggcggcgggaggcccagggagaacggggaagggacatttagtttgagacggtgctgagataggatcatgaaggaagaggtgaagggaattcccgtaagagtggcgctgcgttgtcgccctctggtccccaaagagattagcgagggctgccagatgtgcctttccttcgtgcccggagagcctcaggtggtggttggtacagataaatccttcacctacgattttgtatttgatccctctactgaacaggaagaagtcttcaatacagcagtagcgccactcataaaaggtgtatttaaaggatataatgcaacggtcctggcctatgggcagactggctctggaaaaacctattcaatgggaggtgcatatactgcagagcaagagaatgaaccaacagttggggttattcctagggtaatacaactgctcttcaaagaaattgataaaaagagtgactttgaatttactctgaaagtgtcttacttagagatttacaatgaagaaattttggatcttctatgcccatctcgtgagaaagctcaaataaatatacgagaggatcctaaggaaggcataaagattgtgggactcactgagaagactgttttggttgccttggatactgtttcctgtttggaacagggcaacaactctaggactgtggcctccacggctatgaactcccagtcgtcccgatctcatgccatctttacaatctccttagagcaaagaaagaaaagtgacaagaatagcagctttcgctccaagctgcatcttgtagacctcgctggatcagaaagacagaagaaaaccaaggctgaaggggatcgtctaaaagagggtattaatattaaccgaggcctcctatgcttgggaaatgtaatcagtgctcttggagatgacaaaaagggtggctttgtgccctacagagattccaagttgactcgactgcttcaagattctctaggaggtaatagccatactcttatgatagcctgtgtgagtcctgctgactccaatctagaggaaacattaaatacccttcgctatgctgacagagcaagaaaaatcaagaacaaacctattgttaatattgatccccagacagctgaacttaatcatctaaagcaacaggtacaacagctacaagtcttgttgctacaggcccatggaggtaccctgcctggatctataactgtggaaccatcagagaatctacaatccctgatggagaagaatcagtccctggtagaggagaatgaaaaattaagtcgtggtctgagcgaggcagctggtcagacagcccagatgttggagaggatcattttgacagagcaagcgaatgaaaaaatgaacgccaagctagaagagctcaggcagcatgcggcctgcaaactggatcttcaaaagctagtggagactttggaagaccaggaattgaaagaaaatgtagagataatttgtaacctgcagcaattgattacccagttatcggatgaaactgttgcttgcatggctgcagccattgatactgcggtggagcaagaagcccaagtagaaaccagtccagagacgagcaggtcttctgacgcttttaccactcagcatgctctccgtcaagcgcagatgtctaaggagctggttgagttgaataaagcgcttgcactgaaagaggccctggctaggaagatgactcagaatgacagccaactgcagcccattcagtaccaataccaggataacataaaagagctagaattagaagtcatcaatctgcaaaaggaaaaggaagaattggttcttgaacttcagacagcaaagaaggatgccaaccaagccaagttgagtgagcgccgccgcaaacgtctccaggagctggagggtcaaattgctgatctgaagaagaaactgaatgagcagtccaaacttctgaaactaaaggaatccacagagcgtactgtctccaaactgaaccaggagatacggatgatgaaaaaccagcgggtacagttaatgcgtcaaatgaaagaagatgctgagaagtttagacagtggaagcagaaaaaagacaaagaagtaatacagttaaaagaacgagaccgtaagaggcaatatgagctgctgaaacttgaaagaaacttccagaaacaatccaatgtgctcagacgtaaaacggaggaggcagcagctgccaacaagcgtctcaaggatgctctccagaaacaacgggaggttgcagataagcggaaagagactcagagccgtggaatggaaggcactgcagctcgagtgaagaattggcttggaaacgaaattgaggttatggtcagtactgaggaagccaaacgccatctgaatgacctccttgaagatagaaagatcctggctcaagatgtggctcaactcaaagaaaaaaaggaatctggggagaatccacctcctaaactccggaggcgtacattctcccttactgaagtgcgtggtcaagtttcggagtcagaagattctattacaaagcagattgaaagcctagagactgaaatggaattcaggagtgctcagattgctgacctacagcagaagctgctggatgcagaaagtgaagacagaccaaaacaacgctgggagaatattgccaccattctggaagccaagtgtgccctgaaatatttgattggagagctggtctcctccaaaatacaggtcagcaaacttgaaagcagcctgaaacagagcaagaccagctgtgctgacatgcagaagatgctgtttgaggaacgaaatcattttgccgagatagagacagagttacaagctgagctggtcagaatggagcaacagcaccaagagaaggtgctgtaccttctcagccagctgcagcaaagccaaatggcagagaagcagttagaggaatcagtcagtgaaaaggaacagcagctgctgagcacactgaagtgtcaggatgaagaacttgagaaaatgcgagaagtgtgtgagcaaaatcagcagcttctccgagagaatgaaatcatcaagcagaaactgaccctcctccaggtagccagcagacagaaacatcttcctaaggatacccttctatctccagactcttcttttgaatatgtcccacctaagccaaaaccttctcgtgttaaagaaaagttcctggagcaaagcatggacatcgaggatctaaaatattgttcagagcattctgtgaatgagcatgaggatggtgatggtgatgatgatgagggggatgacgaggaatggaagccaacaaaattagttaaggtgtccaggaagaacatccaagggtgttcctgcaagggctggtgtggaaacaagcagtgtgggtgcaggaagcaaaagtcagactgtggtgtggactgttgctgtgaccccacaaagtgtcggaaccgccagcaaggcaaggatagcttgggcactgttgaacggacccaggattccgaaggctccttcaaactggaggatcctaccgaggtgaccccaggattgagcttctttaatcccgtctgtgccacccccaatagcaagatcctgaaagagatgtgcgatgtggagcaggtgctgtcaaagaagactcccccagctccctccccttttgacctcccagagttgaaacatgtagcaacagaataccaagaaaacaaggctccagggaagaaaaagaaacgggctctggccagcaacaccagcttcttctctggctgctcccctatcgaagaagaggcccactgaagttggagtcatcatctctacccccagtctggcttgggagatgctttcaggttgcagccagaaggggttttttaaatgacttctctggatttcaggtttcttgctgttgaaaaaaggaacaaagcgttactgaaaagaaggtaacctttgttggatgtgggccttagcctccaggtccagactactactctatgttctccagaagggtgctaagtcacctactgaagagagaaccaactgactttcctattgactcatcaggaaccagtcctcagtctggtcaagttgtttcttatttgtgagcagttcaggctatctcctgatggggatgaggccaaggctttcttatcttttggttgtctctgcttaatggaggagcctggcctaggatggaggcctggcttagatctttcattccacctcaggaatgaggttgtgatctttcctgtcctgaccctctctgaattatgtttcaatagtactcttgattgtctgccatgttgttgaagcaaatgaattatttttaaatgttaagtaagtaaataaaccttagcccgtctactgttt

SEQ ID NO: 146781 - DNA, 4378 bp, Homo sapiens
  Payload ID: 9041
  Gene Symbol: KIF4B
  Gene Name: kinesin family member 4B
  Uniprot ID: Q2VIQ3
  ENST ID: ENST00000435029
  CDS Start-End: 106-3810
ggatttgaaacttggcggttaaagctccggctgggacagggcggcgggagaccccgggtgaacggggaagggacatttagtttgagacggtgctgagataggatcatgaaggaagaggtgaagggaattcctgtaagagtggcactgcgttgtcgccctctggtccccaaagagattagcgagggctgccagatgtgcctttccttcgtgcccggggagactcaggtggtggttggtactgataaatccttcacctacgattttgtgtttgacccctgtactgagcaggaagaagtcttcaataaagcagtagcgccgctcataaaaggcatatttaaaggatataatgcaacggtcctggcctatgggcagactggctctggaaaaacctattcaatgggaggtgcatacactgcggagcaggagaatgaaccaacagttggcattattcctagggtaatacaactgctcttcaaagaaattgataaaaagagtgactttgaatttactctgaaagtgtcttacttagagatttacaatgaagaaattttggatcttctatgcccatctcgtgagaaagctcaaataaatatacgggaggatcctaaggaaggcataaagattgtgggactcactgagaagactgttttagttgccttggatactgtttcctgtttggagcagggcaacaactctaggactgtggcctccacagctatgaactcccagtcgtcccgatctcatgccatctttacaatctccatagagcaaagaaagaaaagtgacaagaattgcagctttcgctccaagctgcatcttgtagatctcgctggatcagaaagacagaagaaaaccaaggctgaaggggatcgtctaaaagagggtattaatattaaccgaggcctcctatgcttgggaaatgtaatcagtgctcttggagatgacaaaaagggtagctttgtgccctacagagattccaagttaactcgactgctgcaagattctctaggaggtaacagccacactcttatgatagcctgtgtgagtcctgctgactccaatctagaggaaacattaagtacccttcgctatgctgacagagcaagaaaaatcaagaacaaacctattgttaatattgatccccacacagctgaacttaatcatctaaagcaacaggtacaacagctacaagtcttgttgctacaagcccatggaggtaccctgcctggatctataaatgcagaaccatcagagaatctacaatccctgatggagaagaatcagtccctggtagaggagaatgaaaaattaagtcgttgtctgagcaaggcagctggtcagacagcccagatgttggagaggatcattttgacagagcaagtgaatgaaaaactgaacgccaagctagaagagctcaggcagcatgtggcctgcaagctggatcttcaaaagctagtggagactttggaagaccaggaattgaaagaaaatgtagagataatttgtaacctgcagcaactgattacccagttatcagatgaaactgttgcttgcacggctgcagccattgatactgcggtagaagaagaagctcaagtggaaaccagtccagagacaagcaggtcttctgacgcttttaccactcagcatgctctccatcaagctcagatgtctaaggaggtggttgagttgaataacgcccttgcactgaaagaggccctagttaggaagatgactcagaacgacaaccaactacagcccattcagtttcaataccaggataacataaaaaatctagaattagaagtcatcaatctgcaaaaggaaaaggaagaattggttcgtgaacttcagacagcaaagaagaatgtcaaccaagccaagctgagtgagcaccgccacaaacttctccaggagctggagggtcaaatagctgatctgaagaagaaactgaatgagcagtccaaacttctgaaactaaaggaatccacagagcgtactgtctccaagctgaaccaagagatatggatgatgaaaaaccagcgggtacagttaatgcgtcaaatgaaagaggatgctgagaagtttagacaatggaagcagaaaaaagacaaagaagtaatacagttgaaagaacgagaccgtaagaggcaatatgagctgctcaaacttgaaagaaacttccagaaacaatccagtgtgctcagacgtaaaacggaagaggcagcagctgccaacaagcgactcaaggatgctctccagaaacaacgagaggtcacagataagcggaaagagactcagagccatggaaaggaaggtattgcagctcgagtgaggaattggcttggaaatgaaattgaggttatggtcagtactgaggaagccaaacgccatctgaatgacctccttgaagacagaaagatcctggctcaggatgtggttcaactcaaagaaaaaaaggaatctcgggagaatccacctcctaaactccggaagtgtacattctccctttctgaggtgcatggtcaagttttggagtcagaagattgtattacaaaacagattgaaagcctagagactgaaatggaactcaggagtgctcagattgctgacctacagcagaagctgctggatgcagaaagtgaagataggccaaaacaatgctgggagaatattgccaccattctggaagccaagtgtgccctgaaatatttgattggagagctggtctcctccaaaatacatgtcaccaaacttgaaaacagcctgagacagagcaaggccagctgtgctgacatgcagaagatgctatttgaggaacaaaatcatttttctgagatagagacagagttacaagctgagctggtcagaatggagcaacagcaccaagagaaggtgctataccttgtcagccagctgcaggaaagccaaatggcagagaagcagttagagaaatcagccagtgaaaaggaacaacagctggtgagcacactgcagtgtcaggatgaagaacttgagaagatgcgagaagtgtgtgagcaaaatcagcagcttctccaagagaatgaaatcatcaagcagaaactgatcctcctccaggtagccagcagacagaaacatcttcctaatgatacccttctatctccagactcttcttttgaatatatcccacctaagccaaaaccttctcgtgttaaagaaaagtttctggagcaaagcatggacatcgaggatctaaaatattgttcagagcattctgtgaatgagcatgaagatggtgatggtgatggcgacagtgatgagggggatgatgaggaatggaagccaacaaaattagtcaaggtgtccaggaagaacatccaagggtgttcctgcaagggctggtgtgggaacaagcagtgtgggtgcaggaagcaaaagtcagactgtggtgtggactgtagctgtgaccccacaaagtgtcggaaccgccagcaaggcaaggatagcttgggcactgttgaacagacccaggattccgaaggctccttcaaactggaggatcctaccgaggtgaccccaggattgagcttctttaaccctgtctgtgccacccccaatagcaagatcctgaaagagatgtgtgacatggagcaggtgctgtcaaagaagactgctccagctccctccccttttgacctcccagagtcgaaacatggagcaacagaataccaacaaaataagcctccagggaagaaaaagaaacgagctctggctagcaacaccagcttcttctctggctgctcccctatcgaagaagaggcccactgaagttggagtcatcatctctacccccaatctggcttgggagatgctttccagttgcagccagaaggggttttttaaatgacttctctggatttcaggtttcttgccgttgaaaaaaaggaacaaagcattactaaaaagaaggtaacctttgttggatgttgtccctcagtctccatccccagactactgctctctgctctctagaaggctgctaaaccacctgctgaagagagaaccaacagactttcctaatgactcatcaggaaccagtcctcagtatgatcaagttccttcttatttgtgagcagttcaggctatctcctgatggggatgaggccaaggctttcttatcttttggttgtctctgcttaatggaggagcctggcctaggatggaggtctggctcagatctttcactccacctcgggaatggggttgtgatctttcctgtcctgaccccctctgaattgtaagtgtttcaatagtactcttgattgtatgccatgttgttgaagtaaatgaattatttttaaatgttaagtaaataaaccttagcccatctactgtt

SEQ ID NO: 146782 - DNA, 3527 bp, Homo sapiens
  Payload ID: 9042
  Gene Symbol: KIF5A
  Gene Name: kinesin family member 5A
  ENST ID: ENST00000286452
  CDS Start-End: 229-3060
agagagcccgaaaggaccagacgcccaggtcgcccgcatcccgctgccgcaggagagagacagcgcgccccggccctgctccccaggcttcgcccgggcgccctcaactctgtccccagagactgagcacctgtcctccgcctcggcctctgctgagagccctctcctctggagcacacaccacccctgcagcccaagaagagtcccagccccacgccggctaccaccatggcggagaccaacaacgaatgtagcatcaaggtgctctgccgattccggcccctgaaccaggctgagattctgcggggagacaagttcatccccattttccaaggggacgacagcgtcgttattggggtttcttactttgaaatttacctggacaaaattcgtgaccttctggatgtgaccaagacaaatctgtccgtgcacgaggacaagaaccgggtgccatttgtcaagggttgtactgaacgctttgtgtccagcccggaggagattctggatgtgattgatgaagggaaatcaaatcgtcatgtggctgtcaccaacatgaatgaacacagctctcggagccacagcatcttcctcatcaacatcaagcaggagaacatggaaacggagcagaagctcagtgggaagctgtatctggtggacctggcagggagtgagaaggtcagcaagactggagcagagggagccgtgctggacgaggcaaagaatatcaacaagtcactgtcagctctgggcaatgtgatctccgcactggctgagggcactaaaagctatgttccatatcgtgacagcaaaatgacaaggattctccaggactctctcgggggaaactgccggacgactatgttcatctgttgctcaccatccagttataatgatgcagagaccaagtccaccctgatgtttgggcagcgggcaaagaccattaagaacactgcctcagtaaatttggagttgactgctgagcagtggaagaagaaatatgagaaggagaaggagaagacaaaggcccagaaggagacgattgcgaagctggaggctgagctgagccggtggcgcaatggagagaatgtgcctgagacagagcgcctggctggggaggaggcagccctgggagccgagctctgtgaggagacccctgtgaatgacaactcatccatcgtggtgcgcatcgcgcccgaggagcggcagaaatacgaggaggagatccgccgtctctataagcagcttgacgacaaggatgatgaaatcaaccaacaaagccaactcatagagaagctcaagcagcaaatgctggaccaggaagagctgctggtgtccacccgaggagacaacgagaaggtccagcgggagctgagccacctgcaatcagagaacgatgccgctaaggatgaggtgaaggaagtgctgcaggccctggaggagctggctgtgaactatgaccagaagtcccaggaggtggaggagaagagccagcagaaccagcttctggtggatgagctgtctcagaaggtggccaccatgctgtccctggagtctgagttgcagcggctacaggaggtcagtggacaccagcgaaaacgaattgctgaggtgctgaacgggctgatgaaggatctgagcgagttcagtgtcattgtgggcaacggggagattaagctgccagtggagatcagtggggccatcgaggaggagttcactgtggcccgactctacatcagcaaaatcaaatcagaagtcaagtctgtggtcaagcggtgccggcagctggagaacctccaggtggagtgtcaccgcaagatggaagtgaccgggcgggagctctcatcctgccagctcctcatctctcagcatgaggccaagatccgctcgcttacggaatacatgcagagcgtggagctaaagaagcggcacctggaagagtcctatgactccttgagcgatgagctggccaagctccaggcccaggaaactgtgcatgaagtggccctgaaggacaaggagcctgacactcaggatgcagatgaagtgaagaaggctctggagctgcagatggagagtcaccgggaggcccatcaccggcagctggcccggctccgggacgagatcaacgagaagcagaagaccattgatgagctcaaagacctaaatcagaagctccagttagagctagagaagcttcaggctgactacgagaagctgaagagcgaagaacacgagaagagcaccaagctgcaggagctgacatttctgtacgagcgacatgagcagtccaagcaggacctcaagggtctggaggagacagttgcccgggaactccagaccctccacaaccttcgcaagctgttcgttcaagacgtcacgactcgagtcaagaaaagtgcagaaatggagcccgaagacagtggggggattcactcccaaaagcagaagatttcctttcttgagaacaacctggaacagcttacaaaggttcacaaacagctggtacgtgacaatgcagatctgcgttgtgagcttcctaaattggaaaaacgacttagggctacggctgagagagttaaggccctggagggtgcactgaaggaggccaaggagggcgccatgaaggacaagcgccggtaccagcaggaggtggaccgcatcaaggaggccgttcgctacaagagctcgggcaaacggggccattctgcccagattgccaaacccgtccggcctggccactacccagcatcctcacccaccaacccctatggcacccggagccctgagtgcatcagttacaccaacagcctcttccagaactaccagaatctctacctgcaggccacacccagctccacctcagatatgtactttgcaaactcctgtaccagcagtggagccacatcttctggcggccccttggcttcctaccagaaggccaacatggacaatggaaatgccacagatatcaatgacaataggagtgacctgccgtgtggctatgaggctgaggaccaggccaagcttttccctctccaccaagagacagcagccagctaatctcccacacccacggctgcatacctgcactttcagtttctaagagggactgaggcctcttctcagcatgctgcaaacctgtggtctctgatactaactccctccccaacccctgttgttggactgtactatgtttgatgtcttctcttacttactctgtatctctttgtactctgtatctatatatcaaaagctgctgctatgtctctcttctgtcttattctcaagtatctactgatgtatttagcaatttcaaagcatagtctaccttccttatttggggcaatagggaggagggtgaatgtttcttctttctcatctactcgtctcacactgagtggtgttagtcactgagtagaggtcacagagatgacaaaaggaaaaatgggagctagagggttgtgacccttcatacacacacgcacgcacgcacacaaacatgcacacacgcatgcacacacacaaag

SEQ ID NO: 146783 - DNA, 5824 bp, Homo sapiens
  Payload ID: 9042
  Gene Symbol: KIF5A
  Gene Name: kinesin family member 5A
  Uniprot ID: Q12840
  ENST ID: ENST00000455537
  CDS Start-End: 275-3373
cgcccaggcccgcagcgcggcgctgcagcgcgaggggcggagaggcagagagcccgaaaggaccagacgcccaggtcgcccgcatcccgctgccgcaggagagagacagcgcgccccggccctgctccccaggcttcgcccgggcgccctcaactctgtccccagagactgagcacctgtcctccgcctcggcctctgctgagagccctctcctctggagcacacaccacccctgcagcccaagaagagtcccagccccacgccggctaccaccatggcggagaccaacaacgaatgtagcatcaaggtgctctgccgattccggcccctgaaccaggctgagattctgcggggagacaagttcatccccattttccaaggggacgacagcgtcgttattggggggaagccatatgtttttgaccgtgtattccccccaaacacgactcaagagcaagtttatcatgcatgtgccatgcagattgtcaaagatgtccttgctggctacaatggcaccatttttgcttatggacagacatcctcagggaaaacacataccatggagggaaagctgcacgaccctcagctgatgggaatcattcctcgaattgcccgagacatcttcaaccacatctactccatggatgagaaccttgagttccacatcaaggtttcttactttgaaatttacctggacaaaattcgtgaccttctggatgtgaccaagacaaatctgtccgtgcacgaggacaagaaccgggtgccatttgtcaagggttgtactgaacgctttgtgtccagcccggaggagattctggatgtgattgatgaagggaaatcaaatcgtcatgtggctgtcaccaacatgaatgaacacagctctcggagccacagcatcttcctcatcaacatcaagcaggagaacatggaaacggagcagaagctcagtgggaagctgtatctggtggacctggcagggagtgagaaggtcagcaagactggagcagagggagccgtgctggacgaggcaaagaatatcaacaagtcactgtcagctctgggcaatgtgatctccgcactggctgagggcactaaaagctatgttccatatcgtgacagcaaaatgacaaggattctccaggactctctcgggggaaactgccggacgactatgttcatctgttgctcaccatccagttataatgatgcagagaccaagtccaccctgatgtttgggcagcgggcaaagaccattaagaacactgcctcagtaaatttggagttgactgctgagcagtggaagaagaaatatgagaaggagaaggagaagacaaaggcccagaaggagacgattgcgaagctggaggctgagctgagccggtggcgcaatggagagaatgtgcctgagacagagcgcctggctggggaggaggcagccctgggagccgagctctgtgaggagacccctgtgaatgacaactcatccatcgtggtgcgcatcgcgcccgaggagcggcagaaatacgaggaggagatccgccgtctctataagcagcttgacgacaaggatgatgaaatcaaccaacaaagccaactcatagagaagctcaagcagcaaatgctggaccaggaagagctgctggtgtccacccgaggagacaacgagaaggtccagcgggagctgagccacctgcaatcagagaacgatgccgctaaggatgaggtgaaggaagtgctgcaggccctggaggagctggctgtgaactatgaccagaagtcccaggaggtggaggagaagagccagcagaaccagcttctggtggatgagctgtctcagaaggtggccaccatgctgtccctggagtctgagttgcagcggctacaggaggtcagtggacaccagcgaaaacgaattgctgaggtgctgaacgggctgatgaaggatctgagcgagttcagtgtcattgtgggcaacggggagattaagctgccagtggagatcagtggggccatcgaggaggagttcactgtggcccgactctacatcagcaaaatcaaatcagaagtcaagtctgtggtcaagcggtgccggcagctggagaacctccaggtggagtgtcaccgcaagatggaagtgaccgggcgggagctctcatcctgccagctcctcatctctcagcatgaggccaagatccgctcgcttacggaatacatgcagagcgtggagctaaagaagcggcacctggaagagtcctatgactccttgagcgatgagctggccaagctccaggcccaggaaactgtgcatgaagtggccctgaaggacaaggagcctgacactcaggatgcagatgaagtgaagaaggctctggagctgcagatggagagtcaccgggaggcccatcaccggcagctggcccggctccgggacgagatcaacgagaagcagaagaccattgatgagctcaaagacctaaatcagaagctccagttagagctagagaagcttcaggctgactacgagaagctgaagagcgaagaacacgagaagagcaccaagctgcaggagctgacatttctgtacgagcgacatgagcagtccaagcaggacctcaagggtctggaggagacagttgcccgggaactccagaccctccacaaccttcgcaagctgttcgttcaagacgtcacgactcgagtcaagaaaagtgcagaaatggagcccgaagacagtggggggattcactcccaaaagcagaagatttcctttcttgagaacaacctggaacagcttacaaaggttcacaaacagctggtacgtgacaatgcagatctgcgttgtgagcttcctaaattggaaaaacgacttagggctacggctgagagagttaaggccctggagggtgcactgaaggaggccaaggagggcgccatgaaggacaagcgccggtaccagcaggaggtggaccgcatcaaggaggccgttcgctacaagagctcgggcaaacggggccattctgcccagattgccaaacccgtccggcctggccactacccagcatcctcacccaccaacccctatggcacccggagccctgagtgcatcagttacaccaacagcctcttccagaactaccagaatctctacctgcaggccacacccagctccacctcagatatgtactttgcaaactcctgtaccagcagtggagccacatcttctggcggccccttggcttcctaccagaaggccaacatggacaatggaaatgccacagatatcaatgacaataggagtgacctgccgtgtggctatgaggctgaggaccaggccaagcttttccctctccaccaagagacagcagccagctaatctcccacacccacggctgcatacctgcactttcagtttctaagagggactgaggcctcttctcagcatgctgcaaacctgtggtctctgatactaactccctccccaacccctgttgttggactgtactatgtttgatgtcttctcttacttactctgtatctctttgtactctgtatctatatatcaaaagctgctgctatgtctctcttctgtcttattctcaagtatctactgatgtatttagcaatttcaaagcatagtctaccttccttatttggggcaatagggaggagggtgaatgtttcttctttctcatctactcgtctcacactgagtggtgttagtcactgagtagaggtcacagagatgacaaaaggaaaaatgggagctagagggttgtgacccttcatacacacacgcacgcacgcacacaaacatgcacacacgcatgcacacacacaaagccttaagcagaagaatgtcttagcatcatgagacagagaaatagactcttcctccctcctctttcacatatagcacaggggaaggtaaaatggaagggctgctaattgagacatataattttcttcatacacccctcaccttaatcaaaggattcaggtgttacttctgccctacaaagtctgccttttgcctccctcttcctgttttcccctggactgagaaatgggttgctcaagggaccatttccctttttcttcaagctccttttgatattccctgccccagagctcatgaccagaacccagagctgatttaaaatattttgaaaaatggaggaggcagactgctcccagcagcctgtcaatggctgctcatctgtccatggagatggttacaggcaggtgtagtcaaaatgattgattccttgggtttgggggtgaataggctgggaaatttctgagccttttttttttgtcacagtgccctcaagttgaagtgatgagctggatttctttcttgttccatactgggcggcatgctcctcccatctccaccccttggtttgggggcttccagctcattggcaaaatctctctagttgccttcctttcaagctggagcctgacttttccccaatgtacattttttttttctccacaaagagttccttctctaatgtccccatctggtattaagtgcactttaaagaaaggggcagggtggattttcaagaggtgggaagctctaaggcttgaccctgaggggtcttctcccagccattctcagcccatatgcagcaccctccatactgaagaggactgttgttttagtttcagacggtcctttccttccacatggtgctaaggtggttttctaggtaactgcagggatggaggtcactagccattccaaaccaggagagaaagtctggtgtcctgatatccagtcttttctaggaggaagaccaagattctccagcggcagggcagcctatcacccaacttctaagtcaggaaaggaagctgagtgggaatgccagctggtaagcgcaggctgcactggcccatgactccttcaaggaaaagaggccctgctccctttacctgctgagctccttttagcagttagggagaactgcagggggaaaaataccagtggagtgtggaataaatccaaagcagtgatttttaaatgtttttcaaaaacaaatcttacatagaaccccaatataaaaaataaagtaatgcagacctgggcagtttgcatttttttttttttttttttttggtggaagaagtctcagcgtctcttaggactgactgttcaaaggctcctcagcaaatgagcccttgaacagtcctaagagaccctgaggattctgtggagtagtttgaaaaccattgttctgaggaagggggtccaatctggctcctctgcactaaagctgcaactcatggaaaagagggcaacggtggggtagacaagccatgctgtctccagacccactagggtggaaggaaggttcctgtgggcctgtggacttaggctaatatttgctgtcagcagggcacttaagaatccagggggttttatgtaatgttgccaccacatggttcttttaaaaacacataaggaaatgtgagggtgtagcgcagatgaggagagagatgacacagagggagcagccttctctttagcaagatgtaagggaaatataattcacttacataaaaaagaaacaacacacacgcaaacccttcaccagaagcttcacactacatcctcctcctcctcctgctccccaccttcaccgcatccctttcagagccagggtcactgcaaggggcacctggcctgcccactcacatctgccaaaatgttgcatgccagcgtggaagacaaaccaaactgcgcaaccccctgtgtgtatttacttggtgtacatagataactttaaaataaaataaattcaatgataactct

SEQ ID NO: 146784 - DNA, 5877 bp, Homo sapiens
  Payload ID: 9043
  Gene Symbol: KIF5B
  Gene Name: kinesin family member 5B
  Uniprot ID: P33176
  ENST ID: ENST00000302418
  CDS Start-End: 459-3350
cgccctgtcgcccaacggcggcctcaggagtgatcgggcagcagtcggccggccagcggacggcagagcgggcggacgggtaggcccggcctgctcttcgcgaggaggaagaaggtggccactctcccggtccccagaacctccccagcccccgcagtccgcccagaccgtaaagggggacgctgaggagccgcggacgctctccccggtgccgccgccgctgccgccgccatggctgccatgatggatcggaagtgagcattagggttaacggctgccggcgccggctcttcaagtcccggctccccggccgcctccacccggggaagcgcagcgcggcgcagctgactgctgcctctcacggccctcgcgaccacaagccctcaggtccggcgcgttccctgcaagactgagcggcggggagtggctcccggccgccggccccggctgcgagaaagatggcggacctggccgagtgcaacatcaaagtgatgtgtcgcttcagacctctcaacgagtctgaagtgaaccgcggcgacaagtacatcgccaagtttcagggagaagacacggtcgtgatcgcgtccaagccttatgcatttgatcgggtgttccagtcaagcacatctcaagagcaagtgtataatgactgtgcaaagaagattgttaaagatgtacttgaaggatataatggaacaatatttgcatatggacaaacatcctctgggaagacacacacaatggagggtaaacttcatgatccagaaggcatgggaattattccaagaatagtgcaagatatttttaattatatttactccatggatgaaaatttggaatttcatattaaggtttcatattttgaaatatatttggataagataagggacctgttagatgtttcaaagaccaacctttcagttcatgaagacaaaaaccgagttccctatgtaaaggggtgcacagagcgttttgtatgtagtccagatgaagttatggataccatagatgaaggaaaatccaacagacatgtagcagttacaaatatgaatgaacatagctctaggagtcacagtatatttcttattaatgtcaaacaagagaacacacaaacggaacaaaagctgagtggaaaactttatctggttgatttagctggtagtgaaaaggttagtaaaactggagctgaaggtgctgtgctggatgaagctaaaaacatcaacaagtcactttctgctcttggaaatgttatttctgctttggctgagggtagtacatatgttccatatcgagatagtaaaatgacaagaatccttcaagattcattaggtggcaactgtagaaccactattgtaatttgctgctctccatcatcatacaatgagtctgaaacaaaatctacactcttatttggccaaagggccaaaacaattaagaacacagtttgtgtcaatgtggagttaactgcagaacagtggaaaaagaagtatgaaaaagaaaaagaaaaaaataagatcctgcggaacactattcagtggcttgaaaatgagctcaacagatggcgtaatggggagacggtgcctattgatgaacagtttgacaaagagaaagccaacttggaagctttcacagtggataaagatattactcttaccaatgataaaccagcaaccgcaattggagttataggaaattttactgatgctgaaagaagaaagtgtgaagaagaaattgctaaattatacaaacagcttgatgacaaggatgaagaaattaaccagcaaagtcaactggtagagaaactgaagacgcaaatgttggatcaggaggagcttttggcatctaccagaagggatcaagacaatatgcaagctgagctgaatcgccttcaagcagaaaatgatgcctctaaagaagaagtgaaagaagttttacaggccctagaagaacttgctgtcaattatgatcagaagtctcaggaagttgaagacaaaactaaggaatatgaattgcttagtgatgaattgaatcagaaatcggcaactttagcgagtatagatgctgagcttcagaaacttaaggaaatgaccaaccaccagaaaaaacgagcagctgagatgatggcatctttactaaaagaccttgcagaaataggaattgctgtgggaaataatgatgtaaagcagcctgagggaactggcatgatagatgaagagttcactgttgcaagactctacattagcaaaatgaagtcagaagtaaaaaccatggtgaaacgttgcaagcagttagaaagcacacaaactgagagcaacaaaaaaatggaagaaaatgaaaaggagttagcagcatgtcagcttcgtatctctcaacatgaagccaaaatcaagtcattgactgaataccttcaaaatgtggaacaaaagaaaagacagttggaggaatctgtcgatgccctcagtgaagaactagtccagcttcgagcacaagagaaagtccatgaaatggaaaaggagcacttaaataaggttcagactgcaaatgaagttaagcaagctgttgaacagcagatccagagccatagagaaactcatcaaaaacagatcagtagtttgagagatgaagtagaagcaaaagcaaaacttattactgatcttcaagaccaaaaccagaaaatgatgttagagcaggaacgtctaagagtagaacatgagaagttgaaagccacagatcaggaaaagagcagaaaactacatgaacttacggttatgcaagatagacgagaacaagcaagacaagacttgaagggtttggaagagacagtggcaaaagaacttcagactttacacaacctgcgcaaactctttgttcaggacctggctacaagagttaaaaagagtgctgagattgattctgatgacaccggaggcagcgctgctcagaagcaaaaaatctcctttcttgaaaataatcttgaacagctcactaaagtgcacaaacagttggtacgtgataatgcagatctccgctgtgaacttcctaagttggaaaagcgacttcgagctacagctgagagagtgaaagctttggaatcagcactgaaagaagctaaagaaaatgcatctcgtgatcgcaaacgctatcagcaagaagtagatcgcataaaggaagcagtcaggtcaaagaatatggccagaagagggcattctgcacagattgctaaacctattcgtcccgggcaacatccagcagcttctccaactcacccaagtgcaattcgtggaggaggtgcatttgttcagaacagccagccagtggcagtgcgaggtggaggaggcaaacaagtgtaatcgtttatacatacccacaggtgttaaaaagtaatcgaagtacgaagaggacatggtatcaagcagtcattcaatgactataacctctactcccttgggattgtagaattataacttttaaaaaaaatgtataaattatacctggcctgtacagctgtttcctacctactcttcttgtaaactctgctgcttcccaacacaactagagtgcaattttggcatcttaggagggaaaaaggacagtttacaactgtggccctatttattacacagtttgtctatcgtgtcttaaatttagtctttactgtgccaagctaactgtaccttataggactgtactttttgtattttttgtgtatgtttattttttaatctcagtttaaattacctagctgctactgcttcttgtttttcttttcctattaaaacgtcttcctttttttttcttaagagaaaatggaacatttaggttaaatgtctttaaattttaccacttaacaacactacatgcccataaaatatatccagtcagtactgtattttaaaatcccttgaaatgatgatatcagggttaaaattacttgtattgtttctgaagtttgctcctgaaaactactgtttgagcactgaaacgttacaaatgcctaataggcatttgagactgagcaaggctacttgttatctcatgaaatgcctgttgccgagttattttgaatagaaatattttaaagtatcaaaagcagatcttagtttaagggagtttggaaaaggaattatatttctctttttcctgattctgtactcaacaagtcttgatggaattaaaatactctgctttattctggtgagcctgctagctaatataagtattggacaggtaataatttgtcatctttaatattagtaaaatgaattaagatattataggattaaacataattttatacggttagtactttattggccgacctaaatttatagcgtgtggaaattgagaaaaatgaagaaacaggacagatatatgatgaattaaaaatatatataggtcaattttggtctgaaatccctgaggtgtttttaacctgctacactaatttgtacactaatttatttctttagtctagaaatagtaaattgtttgcaagtcactaataatcattagataaattattttcttggccatagccgataattttgtaatcagtactaagtgtatacgtatttttgccactttttcctcagatgattaaagtaagtcaacagcttattttaggaaactgtaaaagtaatagggaaagagatttcactatttgcttcatcagtggtaggggggcggtgactgcaactgtgttagcagaaattcacagagaatggggatttaaggttagcagagaaacttggaaagttctgtgttaggatcttgctggcagaattaactttttgcaaaagttttatacacagatatttgtattaaatttggagccatagtcagaagactcagatcataattggcttatttttctatttccgtaactattgtaatttccacttttgtaataattttgatttaaaatataaatttatttatttatttttttaatagtcaaaaatctttgctgttgtagtctgcaacctctaaaatgattgtgttgcttttaggattgatcagaagaaacactccaaaaattgagatgaaatgttggtgcagccagttataagtaatatagttaacaagcaaaaaaagtgctgccaccttttatgatgattttctaaatggagaaacatttggctgcatccacatagacctttatgttttgttttcagttgaaaacttgcctcctttggcaacattcgtaaatgaagcagaatttttttttctcttttttccaaatatgttagttttgttcttgtaagatgtatcatgggtattggtgctgtgtaatgaacaacgaattttaattagcatgtggttcagaatatacaatgttaggtttttaaaaagtatcttgatggttcttttctatttataatttcagactttcataaagtgtaccaagaatttcataaatttgttttcagtgaactgctttttgctatggtaggtcattaaacacagcacttactcttaaaaatgaaaatttctgatcatctaggatattgacacatttcaatttgcagtgtctttttgactggatatattaacgttcctctgaatggcattgatagatggttcagaagagaaactcaatgaaataaagagaatatttattcatggcgattaattaaattatttgcctaacttaagaaaactactgtgcgtaactctcagtttgtgcttaactccatttgacatgaggtgacagaagagagtctgagtctacctgtggaatatgttggtttattttcagtgcttgaagatacattcacaaatacttggtttgggaagacaccgtttaattttaagttaacttgcatgttgtaaatgcgttttatgtttaaataaagaggaaaattttttgaaatgtaa

SEQ ID NO: 146785 - DNA, 505 bp, Homo sapiens
  Payload ID: 9044
  Gene Symbol: KIF5C
  Gene Name: kinesin family member 5C
  ENST ID: ENST00000450621
  CDS Start-End: 278-505
gacttagcctgtggcagaggcagctgcacacatgtgggagggatatgaacttctgagaaaagagaaaatcccatgttgtacccgactctaataggccaggaacgagctttgccattggaatgtggcagtcctgcctctgcaggtcagcaaaactggtgccgagggagctgttcttgacgaagctaaaaatatcaataagtctttgtctgctcttggaaatgtgatctctgctttggcagaagggacaaaaacacatgtgccataccgggacagcaagatgactcggattcttcaggactctttgggtgggaactgcagaaccaccatcgtcatttgctgttctccttctgtcttcaatgaggctgagaccaagtccacactgatgttcggacagagagctaagaccatcaagaatacagtctctgtgaacctagaactgacagcagaagaatggaagaagaaatatgaaaaagagaaagagaaaaacaagactttgaagaatgtt

SEQ ID NO: 146786 - DNA, 6931 bp, Homo sapiens
  Payload ID: 9044
  Gene Symbol: KIF5C
  Gene Name: kinesin family member 5C
  Uniprot ID: O60282
  ENST ID: ENST00000435030
  CDS Start-End: 369-3242
gatggctgagcgcgcaggagcccgggaggtctgagccgggcgaggctcgctccctgcgcatcgcctcctccgcccgccgcgtggtcgcgggcaggtgggccggggggcgctgggcaggggcggggcagggccagggcaggccggtctgcagccggaggggccggagcggagaagctgcccaccttcccgggctcggagcggccggggctgctcagccggccgggctcgcgatgacctgctgagaagcgtcgtcggaggctgcaggaggcggcctagctgtgggcggtgcagctcgcggcctcctccctcgtcgttcccggccccggccccccacccatccccgtgccccctccctaccgccggccgagatggcggatccagccgaatgcagcatcaaagtgatgtgccggttccggcccctcaacgaagcggagatcctccgcggggacaaattcatccccaaatttaaaggcgatgagaccgtggtgatcgggcaagggaagccatatgtcttcgacagagtgctacctcccaacacgacccaagagcaggtttacaatgcatgtgcgaagcaaattgtcaaagatgtccttgaaggttataacgggacgatttttgcgtatgggcagacttcatcaggaaaaacccacaccatggaggggaagctgcatgacccccagctcatggggatcatcccacgaattgcccatgatatctttgaccatatctactccatggatgagaacctggagtttcacataaaggtttcctattttgagatctacttggacaaaataagggacttacttgatgtatccaagaccaacttggctgttcatgaagataaaaacagagtcccgtatgtaaaggggtgcactgagcggtttgtgtcgagccctgaggaagtcatggatgtaatagatgaaggcaaagcaaaccgacacgtggctgtgacaaacatgaatgaacacagctctagaagtcacagtatcttcctgataaatattaaacaagagaatgtagagactgaaaaaaaactcagtgggaaactttatttggttgatttggctgggagcgaaaaggtcagcaaaactggtgccgagggagctgttcttgacgaagctaaaaatatcaataagtctttgtctgctcttggaaatgtgatctctgctttggcagaagggacaaaaacacatgtgccataccgggacagcaagatgactcggattcttcaggactctttgggtgggaactgcagaaccaccatcgtcatttgctgttctccttctgtcttcaatgaggctgagaccaagtccacactgatgttcggacagagagctaagaccatcaagaatacagtctctgtgaacctagaactgacagcagaagaatggaagaagaaatatgaaaaagagaaagagaaaaacaagactttgaagaatgttatccagcatctggagatggagctaaacaggtggaggaatggagaagctgtgcctgaggatgaacagatcagtgccaaggaccagaagaacctggagccttgtgataacacccccatcatagacaatattgctcctgttgttgctggcatctctacagaggagaaagagaagtacgatgaggagatctccagtctctacagacaactggatgacaaggatgatgaaattaaccagcagagccagctggctgaaaagctgaagcaacagatgttggatcaggatgagcttttagcttccacaagaagagactatgagaagatacaggaggagctgacacgtctccagattgaaaatgaggcagccaaggatgaggtgaaagaagttctccaggccctggaggagctggctgtcaattatgaccagaaatcacaggaagtggaggataagacccgggccaatgagcagctgacagacgagctggcccagaaaacgactacattgacaaccacacagagagagctgagccagctacaagagcttagcaaccaccagaagaaaagggcaactgagatcctgaatttgctgttgaaagatctgggggagataggtggaattattggcaccaatgatgtgaaaactttggcagatgtgaatggagtcattgaggaggagtttaccatggcccgcctgtacatcagcaagatgaagtcagaggtcaagtccctggtgaaccgcagcaaacagctcgagagcgcccagatggactccaacaggaagatgaatgccagcgagcgggagctggcagcctgccagctgctcatctcccagcacgaagccaagatcaagtctctgacagactacatgcagaacatggaacagaagaggaggcagctagaagagtcccaggactcgctcagcgaagagctggcaaagctccgagcccaggaaaaaatgcacgaagtcagcttccaggataaggagaaggaacatctgacgcggttgcaggatgctgaagaaatgaagaaggcgctggagcagcagatggagagccaccgggaagctcaccagaagcagctgtccagactccgagacgaaattgaggagaagcagaaaatcattgatgagattcgggatttgaatcagaaactgcaactggaacaggagaagcttagttctgattataacaagctgaaaatagaggaccaagagagagaaatgaagctggaaaagctcttattgctcaacgataaaagggaacaagccagagaagacctcaaagggctggaggagacagtgtctagagaattgcagacactgcacaaccttcggaaactctttgtccaggatctgaccacccgagttaaaaaaagtgtggagttggacaacgatgatggagggggcagtgctgcccagaagcagaaaatttccttcttggagaataacctggagcagctcaccaaagttcacaagcagctggtccgggacaacgcagacctgcgctgtgaactgcccaagctggagaagcggctgcgtgccacggcggagcgcgtcaaggctctggagagcgcgctgaaggaggccaaggagaacgccatgcgggaccgtaagcgctaccagcaggaggtggatcgtatcaaggaggccgtgcgggccaagaacatggccagaagggcccattcagcccagatcgccaagcccatccgccccggacactacccggcctcatctccaacggccgtccatgccattcgagggggaggaggcagctcttcaaattccactcactaccagaaataaatacaaaatatgactccacgtagcatgtcaaggactacattaatcaccaattcctttatttttccccccctacagtttccattttttttttatacttgcttactccagccatctgcagtacaccagtttcaggtcttttgagctgtgtagagtttctgtgtgtacagatgtgtgctcggacttttctctttttgagaaatctgaaggagatggttgcagaagatccacttactactgagaaccattaccaccgactcggcctccggggtgttgggtggtttctgggtggttcctggagcctcctctgggcagtgcactgtcccatctgtacgccctaatgtgccattccctagaggggaacaaccaagtgccgtggaggcagatgatcatggtctgcctcaactgtctggtttcctgtaaaataaacacattgttttatatttttagggaacaaaaagtgctgctatagggttcaaagttttccttctgaacacttttccgaaacaaattaccccaaagacacattttgaatatcctggtcacatctttggatctgtaaaatataccttttagtatggcacctgttaaaatgcaaagcaaatttctttggggcagaaaaacaatctgacagtagcagtgtagaatttgttcattcaaatacatctgtgtaaatgcaaaaagtcataaaattcacctccgagctgcttgcttttgaacctgcagcaactagtcttagccggcccggtttgaacatcgttctttcagaagtgctgaaaatgctgcaaagttggataagtggaaatgtggctgcccctctcctcactacttcctctctgatcgttctgaagcttgcattgggaatggctgctttctctaaccattttcagcttgagtgggtattgctgaagaaatccaacatcattccagcagttgaaaaaggaagccttcgggagaaagtgcttgtcaaaattttgttctttgtgcttgtgtatgagtaagttgccatgaataagttattattttaacccataattggcgactgtttatatgaattctttctttggcaccaaataggtttcatcttcttaggcacaattagaaaaaatccacatagatggatattttacatttagttattgctttatccaaatacatgaatctaaagctgaatcaacccttacttccagttgtgcttattaagaagatcaatttccaagtagtaaagttttcagggaaactgactgtgctgctatttgttttgacaaatttgggggtaagtcaatgacaaccaaaccaatctcggtggaaactcctatcctatcatgttgtgtgcccaagatgagtgagctggcactgtgccctgaagctttcaccactgtaatgaaatatatgccaggggagactttgggcttttctcatgactgtgtgggtcgaaggtagctcaagtgtgtgtgtgtgtgtgtgtgtgtgtgtgtgtgtgtgtgtgtgtgtatgtgtgtaaagtgctaagaactgtgcattgacatccaaacatttcttgtacaaaatttccctagcaaagcaaacctgctttgacttaatttatttgttaaatgttgcactttgtttatgtatgttttgtttttggtggggaataaggagagagaggacgacaaattctattgaagtatttattttgtgaagatggcaattttgcatttgtttaaatttttttcattctttaattttgttatcagtgccagcccaatatacctgctctaccattatttgcggtctgataaaagggtccttgtggggcaggttttgcaaagcttatcaggtaataacatatgccacataaccttgttgatatgtttgcttctgatttgggaagctaaacattggtgtttgagaggattgccaattattaattgtcattaccactactctccattactttttgtttggaaattgaacaaaggtcagtaatggtttttggctcttgttaatatccatcataaaatagattgttttagattctttccagggtgatttttccctgggtaccccgtttctacttctaaagaattgcttggcactttcatgtttcaaagggaaacattcgcttgtagttccattttacttgatctctacaagggactgacaacatttgctttacttttattcacagagaaagttggctttgatgtctcttaaagataattctgctagttgctgatcagccagtcagttcacctagcttcaatctttataggacttctaatctaattttcctatagtgtgactaaaagggaggcaaattattggaacggattattcaaatggatccttaaatattgctatgtataataagccagttattatatcaggaccatgttctctgtaggccactttctaaaaaagccacatatgtgcaattttcaggtttttagactattgctccctgtactttaaatgtaaaaaccacacttctgaacaactaagctcatgaatatgattttggttatatgcagcttttgactagcatgtattgtgtctttttctcctctatgaataattttatatttcatgctacttcttgaaagtttactctttgatgctctaagagaacagccagatggtttatatgaataatctttatctgcaggatggtggattggtaaattaggagaatgttgtttgagatatcaagatttatgtctgggaactaaaatatataatgccaaatgtgtttttgtcaattactagagaattctgtgcaaacatatcatctcttcaaatgctgcacactttgcttttgttaaacagcaggtagtagacagaacaataacagtttcgcgttaagacttttaaaggaaatagaatcgtgattaagaaatcagaatttatagatatattgggataaatgaagaaataaaaatgtttgtctagaatgtagcatctagtgactttttaaagccctaacgtttacataaagaagctctagttcttatagaaataacaaagcaaataaaagttcttaacaatcccctctttcgaagtgcatttttttaaagcagggcaggagacatttggactctagctatatgacatactgggaaaggcagagggtggagggaagatttcacttcattgtctagcccagaatcttgagcaagctaaagaaaccatcataatctaaaattgcttcatttaacactaacaatttagactttttaaaccaagcattgaataatggctggataactgccgaagtaagcgccgctccatgaagtctgcttacttatttaaaaattgtgtatcagttttaaatactgttcattgtgtgcagatataaggggaatagggcattctgtagaattatacatgtctagtttgtaaagtgtgtcctgtgtactgcagatgtgtgttctctgggctttatgtatctgtacagtagctttcacattaaaaaaattgtggacaaacttgtccggggggtttgaggggagaatggtggtttatatcaataacgatgctgtactatagtccatgtaacaaaagatctggaagtcaccctcctctggcccacggaaaattttggtaatcttctaggttctaaaatgaagatgtatgggtactctggcagactgcatgttgtataatttgaaaaatactaaaagtggaaaataaaattgaattaaactttg

SEQ ID NO: 146787 - DNA, 3632 bp, Homo sapiens
  Payload ID: 9044
  Gene Symbol: KIF5C
  Gene Name: kinesin family member 5C
  ENST ID: ENST00000616530
  CDS Start-End: 1-2583
gggaagctgcatgacccccagctcatggggatcatcccacgaattgcccatgatatctttgaccatatctactccatggatgagaacctggagtttcacataaaggtttcctattttgagatctacttggacaaaataagggacttacttgatgtatccaagaccaacttggctgttcatgaagataaaaacagagtcccgtatgtaaaggggtgcactgagcggtttgtgtcgagccctgaggaagtcatggatgtaatagatgaaggcaaagcaaaccgacacgtggctgtgacaaacatgaatgaacacagctctagaagtcacagtatcttcctgataaatattaaacaagagaatgtagagactgaaaaaaaactcagtgggaaactttatttggttgatttggctgggagcgaaaaggtcagcaaaactggtgccgagggagctgttcttgacgaagctaaaaatatcaataagtctttgtctgctcttggaaatgtgatctctgctttggcagaagggacaaaaacacatgtgccataccgggacagcaagatgactcggattcttcaggactctttgggtgggaactgcagaaccaccatcgtcatttgctgttctccttctgtcttcaatgaggctgagaccaagtccacactgatgttcggacagagagctaagaccatcaagaatacagtctctgtgaacctagaactgacagcagaagaatggaagaagaaatatgaaaaagagaaagagaaaaacaagactttgaagaatgttatccagcatctggagatggagctaaacaggtggaggaatggagaagctgtgcctgaggatgaacagatcagtgccaaggaccagaagaacctggagccttgtgataacacccccatcatagacaatattgctcctgttgttgctggcatctctacagaggagaaagagaagtacgatgaggagatctccagtctctacagacaactggatgacaaggatgatgaaattaaccagcagagccagctggctgaaaagctgaagcaacagatgttggatcaggatgagcttttagcttccacaagaagagactatgagaagatacaggaggagctgacacgtctccagattgaaaatgaggcagccaaggatgaggtgaaagaagttctccaggccctggaggagctggctgtcaattatgaccagaaatcacaggaagtggaggataagacccgggccaatgagcagctgacagacgagctggcccagaaaacgactacattgacaaccacacagagagagctgagccagctacaagagcttagcaaccaccagaagaaaagggcaactgagatcctgaatttgctgttgaaagatctgggggagataggtggaattattggcaccaatgatgtgaaaactttggcagatgtgaatggagtcattgaggaggagtttaccatggcccgcctgtacatcagcaagatgaagtcagaggtcaagtccctggtgaaccgcagcaaacagctcgagagcgcccagatggactccaacaggaagatgaatgccagcgagcgggagctggcagcctgccagctgctcatctcccagcacgaagccaagatcaagtctctgacagactacatgcagaacatggaacagaagaggaggcagctagaagagtcccaggactcgctcagcgaagagctggcaaagctccgagcccaggaaaaaatgcacgaagtcagcttccaggataaggagaaggaacatctgacgcggttgcaggatgctgaagaaatgaagaaggcgctggagcagcagatggagagccaccgggaagctcaccagaagcagctgtccagactccgagacgaaattgaggagaagcagaaaatcattgatgagattcgggatttgaatcagaaactgcaactggaacaggagaagcttagttctgattataacaagctgaaaatagaggaccaagagagagaaatgaagctggaaaagctcttattgctcaacgataaaagggaacaagccagagaagacctcaaagggctggaggagacagtgtctagagaattgcagacactgcacaaccttcggaaactctttgtccaggatctgaccacccgagttaaaaaaagtgtggagttggacaacgatgatggagggggcagtgctgcccagaagcagaaaatttccttcttggagaataacctggagcagctcaccaaagttcacaagcagctggtccgggacaacgcagacctgcgctgtgaactgcccaagctggagaagcggctgcgtgccacggcggagcgcgtcaaggctctggagagcgcgctgaaggaggccaaggagaacgccatgcgggaccgtaagcgctaccagcaggaggtggatcgtatcaaggaggccgtgcgggccaagaacatggccagaagggcccattcagcccagatcgccaagcccatccgccccggacactacccggcctcatctccaacggccgtccatgccattcgagggggaggaggcagctcttcaaattccactcactaccagaaataaatacaaaatatgactccacgtagcatgtcaaggactacattaatcaccaattcctttatttttccccccctacagtttccattttttttttatacttgcttactccagccatctgcagtacaccagtttcaggtcttttgagctgtgtagagtttctgtgtgtacagatgtgtgctcggacttttctctttttgagaaatctgaaggagatggttgcagaagatccacttactactgagaaccattaccaccgactcggcctccggggtgttgggtggtttctgggtggttcctggagcctcctctgggcagtgcactgtcccatctgtacgccctaatgtgccattccctagaggggaacaaccaagtgccgtggaggcagatgatcatggtctgcctcaactgtctggtttcctgtaaaataaacacattgttttatatttttagggaacaaaaagtgctgctatagggttcaaagttttccttctgaacacttttccgaaacaaattaccccaaagacacattttgaatatcctggtcacatctttggatctgtaaaatataccttttagtatggcacctgttaaaatgcaaagcaaatttctttggggcagaaaaacaatctgacagtagcagtgtagaatttgttcattcaaatacatctgtgtaaatgcaaaaagtcataaaattcacctccgagctgcttgcttttgaacctgcagcaactagtcttagccggcccggtttgaacatcgttctttcagaagtgctgaaaatgctgcaaagttggataagtggaaatgtggctgcccctctcctcactacttcctctctgatcgttctgaagcttgcattgggaatggctgctttctctaaccattttcagcttgagtgggtattgctgaagaaatccaacatcattccagcagttgaaaaaggaagccttcgggagaaagtgcttgtcaaaattttgttctttgtgcttgtgtatgagtaagttgccatgaataagttattattttaacccataattggcgactgtttatat

SEQ ID NO: 146788 - DNA, 1330 bp, Homo sapiens
  Payload ID: 9045
  Gene Symbol: KIF6
  Gene Name: kinesin family member 6
  Uniprot ID: Q6ZMV9
  ENST ID: ENST00000229913
  CDS Start-End: 155-952
ctggaagagcctggggccacctgtctggtcagagtctctctgctgtgggcctcttggagccagggctggttttgtggtctgactgaagtgacaatgaaattaataggatcctgatgctgtgactgaggccatttccctgtgtctccaaacaggaatgagagaggaaatgtcattaggatgccaggaggcttttgaaatcttcaagagggaccacgctgacagcgttaccatcgatgacaacaaacagattctgaaacagagattttctgaagccaaggccctgggagaaagtataaatgaagcaagaagtaaaattggtcacctgaaggaagaaatcacccagcggcatatacagcaagtagccctaggaatctcggaaaacatggccgtgcctctgatgccagaccagcaggaggagaagctgcgatcacaactggaggaagaaaagagaaggtataaaacaatgttcactcgcctgaaagccctgaaggtggagatcgagcacttgcagctgctcatggacaaagccaaggtgaagctacagaaagagtttgaagtctggtgggcagaggaggccaccaacctgcaggtaaattctccagcagtgaattcactcgatcacacgaagccatttctccagacatctgactcccagcatgaatggtcccaactcctctctaacaaaagttctggaggctgggaagtccaagatcaaggcactggcagattcgatgtctgtgatgtgaatgccaggaaaatcctgccctcgccttgccccagtccacacagccagaaacagagcagcaccagcaccccactggaagacagcatccccaagaggccagtgtcgtccatccctctcaccggagacagccagacggactcggacatcatcgccttcatcaaggccagacagagcattctgcagaagcaatgtttgggaagcaattgaatttccaggaaatatccatccatgaattatgccagcaagaatgaagcacagatgaaggcagcgcccctcacttgctctggcttcagaagtgaactatgggctgctgggagcaactagtgactttgattcccatggaggggactgtgtttctttaaggatgctgacctggaggccaccgagaggctggggctggggctgaccacaacatccttcctgtggttgctggagctgctggcagggccaggcaaggccagagtgctaggggcagggtgaaggcttcagctcactgttgtagtgacgttttgtgtagatctttataagcttttgagaatgtgaaatagcaccatcaaaatataatgtcagaggatgctcacacca

SEQ ID NO: 146789 - DNA, 9082 bp, Homo sapiens
  Payload ID: 9045
  Gene Symbol: KIF6
  Gene Name: kinesin family member 6
  Uniprot ID: Q6ZMV9
  ENST ID: ENST00000287152
  CDS Start-End: 96-2540
gttgctaagactgtgggtcgccggaggtggtgggagttagttttggcagcccgggcctgagagaggtcaagggtcattgcagagccagggaggagatggtgaagcagactatccagatattcgcgagggtgaagccccctgtccggaagcaccaacaagggatttattccatagatgaagatgaaaaattaatacctagcttggaaatcatcttaccacgtgatttggcagatgggtttgtgaataataagcgagaaagctacaaatttaaatttcaaagaatttttgatcaggatgcaaaccaagagaccgtttttgaaaacattgccaaaccagttgctgggagtgtcctggcaggttacaatggtaccatctttgcatatgggcaaacaggcagcgggaagacattcactatcacagggggtgcagagcgttacagtgacagaggcattatcccaaggacactgtcatacatttttgaacagttacaaaaggacagcagcaaaatatatacaacacacatttcctatttggaaatctacaatgaatgtggttatgatcttttggatccaagacatgaagcctccagtttggaagatttgccgaaagtgacaatactggaggatcctgatcagaacattcacctgaaaaacttgactctccatcaggcaaccacagaggaagaagctctgaatttgctttttttaggagacaccaaccgaatgattgcagagactcctatgaaccaagcttcaacccgttcccactgcattttcaccattcatttgtcaagcaaggaaccaggatctgcaactgtacgacatgccaaactccatctggttgacctggctggttcagagcgagttgcaaagactggagtagggggccatcttctaacagaggccaagtatatcaacttgtcactacattacttagaacaggttatcattgccctttcagaaaagcaccgttcgcacattccttatagaaactccatgatgaccagtgtcctaagagacagtttgggagggaactgcatgacaactatgattgcaacactctccttggagaaaaggaatcttgatgagtctatatcaacctgcagatttgcacagcgagtggcactcataaagaatgaagctgttcttaatgaagaaattaaccccagattagtgattaaacgcctacaaaaggaaatccaggaactgaaggatgaactggccatggtcactggggagcagaggacagaggcactcacagaagcagagctccttcagctggaaaaactaataacatcctttttggaagaccaggattcagacagtagattagaggttggcgcggatatgcgtaaagttcatcactgttttcatcatttaaagaaactattgaatgacaagaagatccttgaaaacaatacagtctcctctgaaagcaaagaccaagattgtcaagaaccattaaaagaagaagaatatagaaagctacgagatattctgaaacagagagataacgaaatcaatatcctggtcaacatgttaaaaaaagaaaagaagaaagctcaggaggctctccacttggctggcatggatagacgtgaattcagacagtcccagagcccacccttccgcctaggaaacccagaagaaggtcaaagaatgcgactatcctcagctccctcacaggcccaggacttcagcattttggggaaaagatccagtttgctccacaagaaaataggaatgagagaggaaatgtcattaggatgccaggaggcttttgaaatcttcaagagggaccacgctgacagcgttaccatcgatgacaacaaacagattctgaaacagagattttctgaagccaaggccctgggagaaagtataaatgaagcaagaagtaaaattggtcacctgaaggaagaaatcacccagcggcatatacagcaagtagccctaggaatctcggaaaacatggccgtgcctctgatgccagaccagcaggaggagaagctgcgatcacaactggaggaagaaaagagaaggtataaaacaatgttcactcgcctgaaagccctgaaggtggagatcgagcacttgcagctgctcatggacaaagccaaggtgaagctacagaaagagtttgaagtctggtgggcagaggaggccaccaacctgcaggtaaattctccagcagtgaattcactcgatcacacgaagccatttctccagacatctgactcccagcatgaatggtcccaactcctctctaacaaaagttctggaggctgggaagtccaagatcaaggcactggcagattcgatgtctgtgatgtgaatgccaggaaaatcctgccctcgccttgccccagtccacacagccagaaacagagcagcaccagcaccccactggaagacagcatccccaagaggccagtgtcgtccatccctctcaccggagacagccagacggactcggacatcatcgccttcatcaaggccagacagagcattctgcagaagcaatgtttgggaagcaattgaatttccaggaaatatccatccatgaattatgccagcaagaatgaagcacagatgaaggcagcgcccctcacttgctctggcttcagaagtgaactatgggctgctgggagcaactagtgactttgattcccatggaggggactgtgtttctttaaggatgctgacctggaggccaccgagaggctggggctggggctgaccacaacatccttcctgtggttgctggagctgctggcagggccaggcaaggccagagtgctaggggcagggtgaaggcttcagctcactgttgtagtgacgttttgtgtagatctttataagcttttgagaatgtgaaatagcaccatcaaaatataatgtcagaggatgctcacaccagtggaatgtggggggaatatttttatttttaacgatttgccagctctctcccttggcccgtgctctggtttggaagcccagaaatggccatgacaggtccaggcaggatgtcccagccacaggcaaggcagtggaatgcagggcatcctgaaggccaatcctgatctcccagaccacatctttcaccatcagcctcttggccaggatgacctggaggcagtgcctgaacagctgtgtctccagggagccatctgccctgcagggtctaaggacatcatagcacccagagaacagtgggcagctcccaggggctctgctgagagcttgagagagggcagtgtgggtaccttgggcctcacaaccttcacccagccacttgggaggatttgggctgacactccccacttccacagggaaaaacatagctgcctgggggtcttgtctccatgggccctctccatgacagatccaagggaaggtgggcagccctcaaggaggttcttgaagaactgccccctgggccagggggttccaacccagctgcagccagggaggggcagcggagggtgagcaggagtggcacctggaaatgaagctaactggataaaagtgctggtccactgctcctggtgtctctgtcctataaatacaggacctgatgaccctggaggggagcagagtggtaatatagtataattggcttgattttctttttcgttttttaggactgggtaacaggatcatgcaggagaagattaaaccattacatttctaagctaggcaggcccatcgagctcctctaatccacacccctattttatataattagaaggccagagtgaaggggagattcagcttgctgttctatgccactgacaaatgtcccctcttcagggggcttcccctgaccactccatctcgagtcaccccctagttatcccctatcccattaccattttttctgcatcactatctgacatgttatccttccgaacttgcctatttttgaaatacctgcaaccccccataatactaagagctccaatgcaacagggacctgtttgtcttgctcattgctgtgtcccaagcacagagtcgctgttcagtaaacggtccttcagttcatgagtagacgagccagaacccagatgtgtttctcaggctggtgtcactctgacttcccccaggctctgactgaatcccatcgggacaggggccagcatctctggtccactcctggccctcacagttcaatggaacatagtaagccctctgtaaagtctgtagaaccagaggaagaccaaattctgattctagaagcctccccaagagtccatggaacacacatgtaactgcacacacacacacacatacacacacacactctcaagagccctgaagatggcatggcatttgccccagtcccctatgtagcagcagcagtattcttggcatgccttagtgccctcagccctctagagctgggtagagtctactaacttttattttcttttatttttactttcttttatttattttttgagatggggggggtctctgtcagccaggctggggtgcagtggtgcgaccatacctcactagtcagcctccaactcctgggctcaagccatactcagcctccaactcctgggctcaagcgatcctctcacctcagcctccaaagtagctggaactacaggcatgcaccaccacacctagctcgttttaaattttttgtagagacagggtctcactgtgtggctcaggatggtctcaaattcctggccttaagcgatgctcccgccttggcctcccaaagtgctgggattgcaggcatgagccacataccctgccagagtctttcaacattagatctcccactgagacatcatctcctggatccaaaggccttactgacagagatgtgtggcatggccccatgcggggtgtgaaccagcctcctggggcaatcactaagacaggaaaggaaatgaagacagaaaaacacacaacatgggatctggggccactggtgtccagagcatatgcaaagtgtgtgcagcaactggccaaggggccttttgctccgaacatcccctaatggaagcccagcctttgatatggacacatgcttgacagcagtgcaccttcccagagttcactggcctctgcaaatgggagaaattgatgcaatgttttgaaaagactttccagcaatccacctgggatcagtggagccacggatgacaagaagtatctgagttcactctaggccaaaatgtgggattttcaaaaacattttctggaaagcagcctagccagtgactccagcccagtccctgctagaattcaactggctctaccaatcccttgacaagaagtagggtggacggaggttggaggagggaagttaaaatgtagcttgcccagatcttgctaaaaaggagttttagaaagcagatagagaaattgtggtatactgaatacatcattttaattcttcaccaccagtatagaattacacatccaaagctttgtcatggcccactttgactaatgtggtgttggcaaacctgatccaggcagaggcttgaattgtgctctcatggttgagcttgcctcttgctccagtgatctctcttgggatgaacatgccatgggtagctgctgccccttcagcctggaacatccagagagcagacctgagcccagtctacagcctggagcagagcctcccaggcaagcccagcccagatcagctgaactatggctcacccaaagacctattggcatgagaatatatgctgcttgtcataaaccactgaggtttagagtggtttgttatatagcattaattgtagcaatagcagactggcacagaaattggaacccagagacagtatatgactggatctaggatttctcagtgcagagttcattgtctctccatgcagcctgtggaaaggcactgagagcatcctgtatatggaaaagcaggaccaccacctacagccatgatgaagcaacaaggacctgatttaccctcctgctttaaatgactaaaaatgagacaaaatcctctatacaaaccaatggttttcagccattggataacaagcaatatagggtatgattgatccgcaagagaagggaaacaagtgaggggagccctatgattgctccaacttactgcctgcagtgagttttcaggctgcagcccaggaagggggaaccaggtagagcccagtggtttccctgagttgaggaaatggagctgggaatccagggaggacaaagtggcttaaatttgcaaggcagagtcccagggatgagagagagagaaggagagagagaggagaaaaaagagagagaaagagagagagcatgctctggagatcttcagagggttacccttgagtcttcagctaactaccgatcaacatctgcatgtgaagaaattacccaaggcaggggaaagaaccaccaggaggaagcaggtggaataatttcctgagataacactgtgttgggaagagttcatgtttccaacagccagagtggagaaacctcccaaaacagtcattgtatagagacacataaggtactgcctcagaagtggggccaaattagtcctagatgatagattgctctggtcccacctaacaaagcttaaaaagccagccccaaaggagtcaaattgtttccagtaagtttccaagtaacttcaatgagtcccaaaacaaagcttcaaaatatctaaaggaatatgaaaaacaaaccaaaaagaaaccagcatccaacaatatagaatccacaatgtctggtgtccattaaaaaataatcaggcatgcaaagaagcaggaaaatatgggccatgagaggagaaaaaaccatcaatagaaatagaggccgggtgtggtggctcactcctataatcccagcactttgggaggccgaggcaggaggatcacctgaggtcaggagttcaagaacagcctgttcaacatggggaaaccccgtctctactaaaaatacaaaaaatagccgggcatggtgttgcgtacctgtaatcccagctactcagaggctgaggcaggagaattgcttgagcccaggaggcagaggttacagtgagccgaaattgtgccattgcactccagcttgggcaacaagagtgaaactctgtctcaaaaaaaaaaaaaagaaaaaacaaatagaaacagccccaggcatggcacagttgatagagtaaatagacagaaacattttttaaaatgcaatgggtgtgtgtttcaaatctaggcagaaaaaatgctccttgtaattccttaaacataagcatgtctcattcatctggtcattgttttgacaaggatgtgccatccattgtgctaagttctgaggagtcagaggtgacagagacagagaaagtgccagcattcttggaaccttctaacgaaggagagggacaagccaggcatggtggctcacgcctgtaatcccaacactttgggagactgaggctggcggatcacgaggtcaggagtttgagaccaacctggccaacatggcgaaaccccatcgctactaaaaatacaaaaattagctgggtgtggtggtgcgcacctgtaatcccagctactctggaggctgaggcaggacaatcacttgaaccctggaggcagagtttgcagtgagctgagatcgtgccactgcactccaacctgggcaacaagagcgagactccttctctgaaaaaaaaaaaaagagagggacaataaacaagtaagcaagacaatctgattaagaaggagttggggttagctgggcatggtagcaagcgcctgtagtctcagctactcgggaggctgaggtgggaggatccttgaacccaggaggttaaggctgcagtgagctgtgatcacaccactgcactccagcctggatgacagagcaagaccctgtctcagaaaaagaagaaggagttgggggtggggtaggatgggcttggactcactatcaaggtgggtgggagtgtgagaacccggcaaggtgcaaagagagaagcagggaagggaagcttaggacaatgatggcaggttgggtattgggtgatgggaagaggcaaaggacgtggagcttggcaaaaaggggacttgtggggatttgggccatgtgagcatgtgggggagacagtgttccttccataacacgtgtccagggactgccagggctccgaggcagagcaggtgtagagaggttggctgtgaatgttggatgttgaaaacatatgtgtcaaatgtgggaggaaaaagcagtgtttccttgaatacaagctcctcctcaccttgcgaaaagtggcctctgagtgtagccctgaatgcatctcccaaggaataggaggaagcagcaaccttttcagagttaactgctttatttgggttttccatggcctcgtgccagccagcagggctgagccagtttcacccacactgagagggaactcagcaaagagcaagcagcatgccagctggtactcttccctctccattcactcagctcctgatctcaggagggcagcccctccccaggccagcacccctccccttctggccccaggtgtgggatgttgttgttttcttttctccgaaacatctcctgggtttgtcttttccatcactgtctttagactgaggcaagcagtccccatgccttcagccccatgttttgggggtaacctgtgctttgacatgctttgctaaaaactttctaagtctccctctggtgctgggaccagccatgaccaacaacgtcatccatgcaggccacccctaacatagtccaggcctcatgtgggtctcagttcccttttcttctttcaggaagttctccagtgcatgcatagggttgaccagatgtcccaaggtgctctaggacttatgcctatgaagctgttttagggcttcctagtcagtccctggttccaggaaagcagcctgatgaggagatcattcccgctggctggtgtggcatttcttttatggcactacctgggattgggccaccagacctgcgctaacatgctgatttgatggactcttaacatcataggacaaagaatcgtcatgtgaaccaattagacaataaacaaatgcctaagtgcc

SEQ ID NO: 146790 - DNA, 2394 bp, Homo sapiens
  Payload ID: 9045
  Gene Symbol: KIF6
  Gene Name: kinesin family member 6
  ENST ID: ENST00000394362
  CDS Start-End: 216-962
acagtcctgaggggtgcagcgggtggcactggaagggcctcctcagcaggttgtcagccagctggaagagcctggggccacctgtctggtcagagtctctctgctgtgggcctcttggagccagggctggttttgtggtctgactgaagtgacaatgaaattaataggatcctgatgctgtgactgaggccatttccctgtgtctccaaacaggaatgagagaggaaatgtcattaggatgccaggaggcttttgaaatcttcaagagggaccacgctgacagcgttaccatcgatgacaacaaacagattctgaaacagagattttctgaagccaaggccctgggagaaagtataaatgaagcaagaagtaaaattggtcacctgaaggaagaaatcacccagcggcatatacagcaagtagccctaggaatctcggaaaacatggccgtgcctctgatgccagaccagcaggaggagaagctgcgatcacaactggaggaagaaaagagaaggtataaaacaatgttcactcgcctgaaagccctgaaggtggagatcgagcacttgcagctgctcatggacaaagccaaggtgaagctacagaaagagtttgaagtctggtgggcagaggaggccaccaacctgcaggtaaattctccagcagtgaattcactcgatcacacgaagccatttctccagacatctgactcccagcatgaatggtcccaactcctctctaacaaaagtgatgtgaatgccaggaaaatcctgccctcgccttgccccagtccacacagccagaaacagagcagcaccagcaccccactggaagacagcatccccaagaggccagtgtcgtccatccctctcaccggagacagccagacggactcggacatcatcgccttcatcaaggccagacagagcattctgcagaagcaatgtttgggaagcaattgaatttccaggaaatatccatccatgaattatgccagcaagaatgaagcacagatgaaggcagcgcccctcacttgctctggcttcagaagtgaactatgggctgctgggagcaactagtgactttgattcccatggaggggactgtgtttctttaaggatgctgacctggaggccaccgagaggctggggctggggctgaccacaacatccttcctgtggttgctggagctgctggcagggccaggcaaggccagagtgctaggggcagggtgaaggcttcagctcactgttgtagtgacgttttgtgtagatctttataagcttttgagaatgtgaaatagcaccatcaaaatataatgtcagaggatgctcacaccagtggaatgtggggggaatatttttatttttaacgatttgccagctctctcccttggcccgtgctctggtttggaagcccagaaatggccatgacaggtccaggcaggatgtcccagccacaggcaaggcagtggaatgcagggcatcctgaaggccaatcctgatctcccagaccacatctttcaccatcagcctcttggccaggatgacctggaggcagtgcctgaacagctgtgtctccagggagccatctgccctgcagggtctaaggacatcatagcacccagagaacagtgggcagctcccaggggctctgctgagagcttgagagagggcagtgtgggtaccttgggcctcacaaccttcacccagccacttgggaggatttgggctgacactccccacttccacagggaaaaacatagctgcctgggggtcttgtctccatgggccctctccatgacagatccaagggaaggtgggcagccctcaaggaggttcttgaagaactgccccctgggccagggggttccaacccagctgcagccagggaggggcagcggagggtgagcaggagtggcacctggaaatgaagctaactggataaaagtgctggtccactgctcctggtgtctctgtcctataaatacaggacctgatgaccctggaggggagcagagtggtaatatagtataattggcttgattttctttttcgttttttaggactgggtaacaggatcatgcaggagaagattaaaccattacatttctaagctaggcaggcccatcgagctcctctaatccacacccctattttatataattagaaggccagagtgaaggggagattcagcttgctgttctatgccactgacaaatgtcccctcttcagggggcttcccctgaccactccatctcgagtcaccccctagttatcccctatcccattaccattttttctgcatcactatctgacatgttatccttccgaacttgcctatttttgaaatacctgcaaccccccataatactaagagctccaatgcaacagg

SEQ ID NO: 146791 - DNA, 743 bp, Homo sapiens
  Payload ID: 9045
  Gene Symbol: KIF6
  Gene Name: kinesin family member 6
  ENST ID: ENST00000441975
  CDS Start-End: 1-486
actcctatgaaccaagcttcaacccgttcccactgcattttcaccattcatttgtcaagcaaggaaccaggatctgcaactgtacgacatgccaaactccatctggttgacctggctggttcagagcgagttgcaaagactggagtagggggccatcttctaacagaggccaagtatatcaacttgtcactacattacttagaacaggttatcattgccctttcagaaaagcaccgttcgcacattccttatagaaactccatgatgaccagtgtcctaagagacagtttgggagggaactgcatgacaactatgattgcaacactctccttggagaaaaggaatcttgatgagtctatatcaacctgcagatttgcacagcgagtggcactcataaagaatgaagctgttcttaatgaagaaattaaccccagattaaaagcaccaagctcctctgatggagttctcttctgcagaaaccaatgagtgaggcaggatctgtttcagcaaaggccctggtcaggtatcagcatcacacagtgttcctgctggagagaggagacagcatgcaaagtcaagattcaggtggaactgaactgctagggtggattttgttgctgtccctacccttccagaagccctatagcattacagtgctgaatgagaaagagagttaacaaagttattagccccaagacaaaaactagttcagaatttaaggaaaataaacatattagacattg

SEQ ID NO: 146792 - DNA, 8611 bp, Homo sapiens
  Payload ID: 9045
  Gene Symbol: KIF6
  Gene Name: kinesin family member 6
  ENST ID: ENST00000458470
  CDS Start-End: 1-2069
ggggtgcagagcgttacagtgacagaggcattatcccaaggacactgtcatacatttttgaacagttacaaaaggacagcagcaaaatatatacaacacacatttcctatttggaaatctacaatgaatgtggttatgatcttttggatccaagacatgaagcctccagtttggaagatttgccgaaagtgacaatactggaggatcctgatcagaacattcacctgaaaaacttgactctccatcaggcaaccacagaggaagaagctctgaatttgctttttttaggagacaccaaccgaatgattgcagagactcctatgaaccaagcttcaacccgttcccactgcattttcaccattcatttgtcaagcaaggaaccaggatctgcaactgtacgacatgccaaactccatctggttgacctggctggttcagagcgagttgcaaagactggagtagggggccatcttctaacagaggccaagtatatcaacttgtcactacattacttagaacaggttatcattgccctttcagaaaagcaccgttcgcacattccttatagaaactccatgatgaccagtgtcctaagagacagtttgggagggaactgcatgacaactatgattgcaacactctccttggagaaaaggaatcttgatgagtctatatcaacctgcagatttgcacagcgagtggcactcataaagaatgaagctgttcttaatgaagaaattaaccccagattagtgattaaacgcctacaaaaggaaatccaggaactgaaggatgaactggccatggtcactggggagcagaggacagaggcactcacagaagcagagctccttcagctggaaaaactaataacatcctttttggaagaccaggattcagacagtagattagaggttggcgcggatatgcgtaaagttcatcactgttttcatcatttaaagaaactattgaatgacaagaagatccttgaaaacaatacagtctcctctgaaagcaaagaccaagattgtcaagaaccattaaaagaagaagaatatagaaagctacgagatattctgaaacagagagataacgaaatcaatatcctggtcaacatgttaaaaaaagaaaagaagaaagctcaggaggctctccacttggctggcatggatagacgtgaattcagacagtcccagagcccacccttccgcctaggaaacccagaagaaggtcaaagaatgcgactatcctcagctccctcacaggcccaggacttcagcattttggggaaaagatccagtttgctccacaagaaaataggaatgagagaggaaatgtcattaggatgccaggaggcttttgaaatcttcaagagggaccacgctgacagcgttaccatcgatgacaacaaacagattctgaaacagagattttctgaagccaaggccctgggagaaagtataaatgaagcaagaagtaaaattggtcacctgaaggaagaaatcacccagcggcatatacagcaagtagccctaggaatctcggaaaacatggccgtgcctctgatgccagaccagcaggaggagaagctgcgatcacaactggaggaagaaaagagaaggtataaaacaatgttcactcgcctgaaagccctgaaggtggagatcgagcacttgcagctgctcatggacaaagccaaggtgaagctacagaaagagtttgaagtctggtgggcagaggaggccaccaacctgcaggtaaattctccagcagtgaattcactcgatcacacgaagccatttctccagacatctgactcccagcatgaatggtcccaactcctctctaacaaaagtgatgtgaatgccaggaaaatcctgccctcgccttgccccagtccacacagccagaaacagagcagcaccagcaccccactggaagacagcatccccaagaggccagtgtcgtccatccctctcaccggagacagccagacggactcggacatcatcgccttcatcaaggccagacagagcattctgcagaagcaatgtttgggaagcaattgaatttccaggaaatatccatccatgaattatgccagcaagaatgaagcacagatgaaggcagcgcccctcacttgctctggcttcagaagtgaactatgggctgctgggagcaactagtgactttgattcccatggaggggactgtgtttctttaaggatgctgacctggaggccaccgagaggctggggctggggctgaccacaacatccttcctgtggttgctggagctgctggcagggccaggcaaggccagagtgctaggggcagggtgaaggcttcagctcactgttgtagtgacgttttgtgtagatctttataagcttttgagaatgtgaaatagcaccatcaaaatataatgtcagaggatgctcacaccagtggaatgtggggggaatatttttatttttaacgatttgccagctctctcccttggcccgtgctctggtttggaagcccagaaatggccatgacaggtccaggcaggatgtcccagccacaggcaaggcagtggaatgcagggcatcctgaaggccaatcctgatctcccagaccacatctttcaccatcagcctcttggccaggatgacctggaggcagtgcctgaacagctgtgtctccagggagccatctgccctgcagggtctaaggacatcatagcacccagagaacagtgggcagctcccaggggctctgctgagagcttgagagagggcagtgtgggtaccttgggcctcacaaccttcacccagccacttgggaggatttgggctgacactccccacttccacagggaaaaacatagctgcctgggggtcttgtctccatgggccctctccatgacagatccaagggaaggtgggcagccctcaaggaggttcttgaagaactgccccctgggccagggggttccaacccagctgcagccagggaggggcagcggagggtgagcaggagtggcacctggaaatgaagctaactggataaaagtgctggtccactgctcctggtgtctctgtcctataaatacaggacctgatgaccctggaggggagcagagtggtaatatagtataattggcttgattttctttttcgttttttaggactgggtaacaggatcatgcaggagaagattaaaccattacatttctaagctaggcaggcccatcgagctcctctaatccacacccctattttatataattagaaggccagagtgaaggggagattcagcttgctgttctatgccactgacaaatgtcccctcttcagggggcttcccctgaccactccatctcgagtcaccccctagttatcccctatcccattaccattttttctgcatcactatctgacatgttatccttccgaacttgcctatttttgaaatacctgcaaccccccataatactaagagctccaatgcaacagggacctgtttgtcttgctcattgctgtgtcccaagcacagagtcgctgttcagtaaacggtccttcagttcatgagtagacgagccagaacccagatgtgtttctcaggctggtgtcactctgacttcccccaggctctgactgaatcccatcgggacaggggccagcatctctggtccactcctggccctcacagttcaatggaacatagtaagccctctgtaaagtctgtagaaccagaggaagaccaaattctgattctagaagcctccccaagagtccatggaacacacatgtaactgcacacacacacacacatacacacacacactctcaagagccctgaagatggcatggcatttgccccagtcccctatgtagcagcagcagtattcttggcatgccttagtgccctcagccctctagagctgggtagagtctactaacttttattttcttttatttttactttcttttatttattttttgagatggggggggtctctgtcagccaggctggggtgcagtggtgcgaccatacctcactagtcagcctccaactcctgggctcaagccatactcagcctccaactcctgggctcaagcgatcctctcacctcagcctccaaagtagctggaactacaggcatgcaccaccacacctagctcgttttaaattttttgtagagacagggtctcactgtgtggctcaggatggtctcaaattcctggccttaagcgatgctcccgccttggcctcccaaagtgctgggattgcaggcatgagccacataccctgccagagtctttcaacattagatctcccactgagacatcatctcctggatccaaaggccttactgacagagatgtgtggcatggccccatgcggggtgtgaaccagcctcctggggcaatcactaagacaggaaaggaaatgaagacagaaaaacacacaacatgggatctggggccactggtgtccagagcatatgcaaagtgtgtgcagcaactggccaaggggccttttgctccgaacatcccctaatggaagcccagcctttgatatggacacatgcttgacagcagtgcaccttcccagagttcactggcctctgcaaatgggagaaattgatgcaatgttttgaaaagactttccagcaatccacctgggatcagtggagccacggatgacaagaagtatctgagttcactctaggccaaaatgtgggattttcaaaaacattttctggaaagcagcctagccagtgactccagcccagtccctgctagaattcaactggctctaccaatcccttgacaagaagtagggtggacggaggttggaggagggaagttaaaatgtagcttgcccagatcttgctaaaaaggagttttagaaagcagatagagaaattgtggtatactgaatacatcattttaattcttcaccaccagtatagaattacacatccaaagctttgtcatggcccactttgactaatgtggtgttggcaaacctgatccaggcagaggcttgaattgtgctctcatggttgagcttgcctcttgctccagtgatctctcttgggatgaacatgccatgggtagctgctgccccttcagcctggaacatccagagagcagacctgagcccagtctacagcctggagcagagcctcccaggcaagcccagcccagatcagctgaactatggctcacccaaagacctattggcatgagaatatatgctgcttgtcataaaccactgaggtttagagtggtttgttatatagcattaattgtagcaatagcagactggcacagaaattggaacccagagacagtatatgactggatctaggatttctcagtgcagagttcattgtctctccatgcagcctgtggaaaggcactgagagcatcctgtatatggaaaagcaggaccaccacctacagccatgatgaagcaacaaggacctgatttaccctcctgctttaaatgactaaaaatgagacaaaatcctctatacaaaccaatggttttcagccattggataacaagcaatatagggtatgattgatccgcaagagaagggaaacaagtgaggggagccctatgattgctccaacttactgcctgcagtgagttttcaggctgcagcccaggaagggggaaccaggtagagcccagtggtttccctgagttgaggaaatggagctgggaatccagggaggacaaagtggcttaaatttgcaaggcagagtcccagggatgagagagagagaaggagagagagaggagaaaaaagagagagaaagagagagagcatgctctggagatcttcagagggttacccttgagtcttcagctaactaccgatcaacatctgcatgtgaagaaattacccaaggcaggggaaagaaccaccaggaggaagcaggtggaataatttcctgagataacactgtgttgggaagagttcatgtttccaacagccagagtggagaaacctcccaaaacagtcattgtatagagacacataaggtactgcctcagaagtggggccaaattagtcctagatgatagattgctctggtcccacctaacaaagcttaaaaagccagccccaaaggagtcaaattgtttccagtaagtttccaagtaacttcaatgagtcccaaaacaaagcttcaaaatatctaaaggaatatgaaaaacaaaccaaaaagaaaccagcatccaacaatatagaatccacaatgtctggtgtccattaaaaaataatcaggcatgcaaagaagcaggaaaatatgggccatgagaggagaaaaaaccatcaatagaaatagaggccgggtgtggtggctcactcctataatcccagcactttgggaggccgaggcaggaggatcacctgaggtcaggagttcaagaacagcctgttcaacatggggaaaccccgtctctactaaaaatacaaaaaatagccgggcatggtgttgcgtacctgtaatcccagctactcagaggctgaggcaggagaattgcttgagcccaggaggcagaggttacagtgagccgaaattgtgccattgcactccagcttgggcaacaagagtgaaactctgtctcaaaaaaaaaaaaaagaaaaaacaaatagaaacagccccaggcatggcacagttgatagagtaaatagacagaaacattttttaaaatgcaatgggtgtgtgtttcaaatctaggcagaaaaaatgctccttgtaattccttaaacataagcatgtctcattcatctggtcattgttttgacaaggatgtgccatccattgtgctaagttctgaggagtcagaggtgacagagacagagaaagtgccagcattcttggaaccttctaacgaaggagagggacaagccaggcatggtggctcacgcctgtaatcccaacactttgggagactgaggctggcggatcacgaggtcaggagtttgagaccaacctggccaacatggcgaaaccccatcgctactaaaaatacaaaaattagctgggtgtggtggtgcgcacctgtaatcccagctactctggaggctgaggcaggacaatcacttgaaccctggaggcagagtttgcagtgagctgagatcgtgccactgcactccaacctgggcaacaagagcgagactccttctctgaaaaaaaaaaaaagagagggacaataaacaagtaagcaagacaatctgattaagaaggagttggggttagctgggcatggtagcaagcgcctgtagtctcagctactcgggaggctgaggtgggaggatccttgaacccaggaggttaaggctgcagtgagctgtgatcacaccactgcactccagcctggatgacagagcaagaccctgtctcagaaaaagaagaaggagttgggggtggggtaggatgggcttggactcactatcaaggtgggtgggagtgtgagaacccggcaaggtgcaaagagagaagcagggaagggaagcttaggacaatgatggcaggttgggtattgggtgatgggaagaggcaaaggacgtggagcttggcaaaaaggggacttgtggggatttgggccatgtgagcatgtgggggagacagtgttccttccataacacgtgtccagggactgccagggctccgaggcagagcaggtgtagagaggttggctgtgaatgttggatgttgaaaacatatgtgtcaaatgtgggaggaaaaagcagtgtttccttgaatacaagctcctcctcaccttgcgaaaagtggcctctgagtgtagccctgaatgcatctcccaaggaataggaggaagcagcaaccttttcagagttaactgctttatttgggttttccatggcctcgtgccagccagcagggctgagccagtttcacccacactgagagggaactcagcaaagagcaagcagcatgccagctggtactcttccctctccattcactcagctcctgatctcaggagggcagcccctccccaggccagcacccctccccttctggccccaggtgtgggatgttgttgttttcttttctccgaaacatctcctgggtttgtcttttccatcactgtctttagactgaggcaagcagtccccatgccttcagccccatgttttgggggtaacctgtgctttgacatgctttgctaaaaactttctaagtctccctctggtgctgggaccagccatgaccaacaacgtcatccatgcaggccacccctaacatagtccaggcctcatgtgggtctcagttcccttttcttctttcaggaagttctccagtgcatgcatagggttgaccagatgtcccaaggtgctctaggacttatgcctatgaagctgttttagggcttcctagtcagtccctggttccaggaaagcagcctgatgaggagatcattcccgctggctggtgtggcatttcttttatggcactacctgggattgggccaccagacctgcgctaacatgctgatttgatggactcttaacatcataggacaaagaatcgtcatgtgaaccaattagacaataaacaaatgcctaagtgcc

SEQ ID NO: 146793 - DNA, 2386 bp, Homo sapiens
  Payload ID: 9045
  Gene Symbol: KIF6
  Gene Name: kinesin family member 6
  ENST ID: ENST00000538893
  CDS Start-End: 1505-2386
gggtcattgcagagccagggaggagatggtgaagcagactatccagatattcgcgagggtgaagccccctgtccggaagcaccaacaagggatttattccatagatgaagatgaaaaattaatacctagcttggaaatcatcttaccacgtgatttggcagatgggtttgtgaataataagcgagaaagctacaaatttaaatttcaaagaatttttgatcaggatgcaaaccaagagaccgtttttgaaaacattgccaaaccagttgctgggagtgtcctggcaggttacaatggtaccatctttgcatatgggcaaacaggcagcgggaagacattcactatcacagggggtgcagagcgttacagtgacagaggcattatcccaaggacactgtcatacatttttgaacagttacaaaaggacagcagcaaaatatatacaacacacatttcctatttggaaatctacaatgaatgtggttatgatcttttggatccaagacatgaagcctccagtttggaagatttgccgaaagtgacaatactggaggatcctgatcagaacattcacctgaaaaacttgactctccatcaggcaaccacagaggaagaagctctgaatttgctttttttaggagacaccaaccgaatgattgcagagactcctatgaaccaagcttcaacccgttcccactgcattttcaccattcatttgtcaagcaaggaaccaggatctgcaactgtacgacatgccaaactccatctggttgacctggctggttcagagcgagttgcaaagactggagtagggggccatcttctaacagaggccaagtatatcaacttgtcactacattacttagaacaggttatcattgccctttcagaaaagcaccgttcgcacattccttatagaaactccatgatgaccagtgtcctaagagacagtttgggagggaactgcatgacaactatgattgcaacactctccttggagaaaaggaatcttgatgagtctatatcaacctgcagatttgcacagcgagtggcactcataaagaatgaagctgttcttaatgaagaaattaaccccagattagtgattaaacgcctacaaaaggaaatccaggaactgaaggatgaactggccatggtcactggggagcagaggacagaggcactcacagaagcagagctccttcagctggaaaaactaataacatcctttttggaagaccaggattcagacagtagattagaggttggcgcggatatgcgtaaagttcatcactgttttcatcatttaaagaaactattgaatgacaagaagatccttgaaaacaatacagtctcctctgaaagcaaagaccaagattgtcaagaaccattaaaagaagaagaatatagaaagctacgagatattctgaaacagagagataacgaaatcagtatcctttctgaagtgatgaagaaacttcctctatcctggtttgaaaggggaatgagagaggaaatgtcattaggatgccaggaggcttttgaaatcttcaagagggaccacgctgacagcgttaccatcgatgacaacaaacagattctgaaacagagattttctgaagccaaggccctgggagaaagtataaatgaagcaagaagtaaaattggtcacctgaaggaagaaatcacccagcggcatatacagcaagtagccctaggaatctcggaaaacatggccgtgcctctgatgccagaccagcaggaggagaagctgcgatcacaactggaggaagaaaagagaaggtataaaacaatgttcactcgcctgaaagccctgaaggtggagatcgagcacttgcagctgctcatggacaaagccaaggtgaagctacagaaagagtttgaagtctggtgggcagaggaggccaccaacctgcaggtaaattctccagcagtgaattcactcgatcacacgaagccatttctccagacatctgactcccagcatgaatggtcccaactcctctctaacaaaagttctggaggctgggaagtccaagatcaaggcactggcagattcgatgtctgtgatgtgaatgccaggaaaatcctgccctcgccttgccccagtccacacagccagaaacagagcagcaccagcaccccactggaagacagcatccccaagaggccagtgtcgtccatccctctcaccggagacagccagacggactcggacatcatcgccttcatcaaggccagacagagcattctgcagaagcaatatcttcagctcctttgttctctgttcccaaagtcagctgtctcctctgctcaggcttctacaaacaggaaggggctgagtgatgttttggtaactcgttga

SEQ ID NO: 146794 - DNA, 4551 bp, Homo sapiens
  Payload ID: 9046
  Gene Symbol: KIF7
  Gene Name: kinesin family member 7
  Uniprot ID: Q2M1P5
  ENST ID: ENST00000394412
  CDS Start-End: 78-4109
ctggggatggaaacctgactgcctggcccgggacggcgcttgcagccaggcagggcccagagcagtcctccctcggcatggggctggaggctcagaggctgccaggggctgaggaggccccagtgcgggttgccctgcgagttcgaccactgctgcccaaggagctgctgcacgggcatcagagctgcctgcaggtggagccagggcttggccgcgtcactctgggccgtgaccgacactttggcttccacgtggtgctggccgaggatgcggggcaggaggccgtgtaccaggcctgcgttcagcccctccttgaggccttcttcgagggcttcaatgccactgtctttgcctatggtcagacgggctcagggaagacatacaccatgggggaggccagtgtggcctccctccttgaggatgagcagggcattgtcccgagggccatggccgaggccttcaagctcatcgatgagaacgacctgcttgactgtctggtacatgtgtcctacctggaagtgtacaaggaggagttccgagacctgctcgaggtgggcactgccagccgtgacatccagctccgggaagatgagcgcgggaatgttgtgctgtgcggggtgaaggaggtcgacgtggagggcctggatgaggtgctgagcctcctggagatgggcaacgcggcgcggcacacgggagccacgcacctcaaccacctgtctagccgctcacacacggtcttcaccgtgaccctggagcagcgggggcgcgcccccagccgcctaccccgccccgccccgggccagctgctcgtctccaagttccacttcgtggacctggcgggctcagagagggtgctcaagacgggcagcaccggcgagcggctcaaggagagcatccagatcaacagcagcctcctggcgctgggcaacgtcatcagcgccctgggggaccctcagcgccggggcagccacataccctaccgcgactccaagatcacccggatcctcaaagactcgctgggcgggaacgccaagacggtgatgatcgcctgcgtcagcccttcctcctccgacttcgacgagaccctcaacaccctcaactacgccagccgcgcccagaacatccgcaaccgcgccacggtcaactggcggcccgaggccgagcggccacccgaagagacggcgagcggcgcgcggggtccgccacggcaccgctccgagacccgcatcatccaccgcggccggcgcgccccaggcccagccaccgcctccgcggcggccgccatgcgcctgggcgccgagtgcgcgcgctaccgggcctgcaccgacgccgcctacagcctcttgcgcgagctgcaggccgagcccgggctgcccggcgccgccgcccgcaaggtgcgcgactggctgtgcgccgtcgagggcgagcgcagcgccctgagctccgcctccgggcccgatagcggcatcgagagcgcctccgtcgaggaccaggcggcgcagggggccggcgggcgaaaggaggatgagggggcgcagcagctgctgaccctgcagaaccaggtggcgcggctggaggaggagaaccgagactttctggctgcgctggaggacgccatggagcagtacaaactgcagagcgaccggctgcgtgagcagcaggaggagatggtggaactgcggctgcggttagagctggtgcggccaggctgggggggcccgcggctcctgaatggcctgcctcccgggtcctttgtgcctcgacctcatacagcccccctggggggtgcccacgcccatgtgctgggcatggtgccgcctgcctgcctccctggagatgaagttggctctgagcagaggggagagcaggtgacaaatggcagggaggctggagctgagttgctgactgaggtgaacaggctgggaagtggctcttcagctgcttcagaggaggaagaggaggaggaggagccgcccaggcggaccttacacctgcgcagaaataggatcagcaactgcagtcagagggcgggggcacgcccagggagtctgccagagaggaagggcccagagctttgccttgaggagttggatgcagccattccagggtccagagcagttggtgggagcaaggcccgagttcaggcccgccaggtcccccctgccacagcctcagagtggcggctggcccaggcccagcagaagatccgggagctggctatcaacatccgcatgaaggaggagcttattggcgagctggtccgcacaggaaaggcagctcaggccctgaaccgccagcacagccagcgtatccgggagctggagcaggaggcagagcaggtgcgggccgagctgagtgaaggccagaggcagctgcgggagctcgagggcaaggagctccaggatgctggcgagcggtctcggctccaggagttccgcaggagggtcgctgcggcccagagccaggtgcaggtgctgaaggagaagaagcaggctacggagcggctggtgtcactgtcggcccagagtgagaagcgactgcaggagctcgagcggaacgtgcagctcatgcggcagcagcagggacagctgcagaggcggcttcgcgaggagacggagcagaagcggcgcctggaggcagaaatgagcaagcggcagcaccgcgtcaaggagctggagctgaagcatgagcaacagcagaagatcctgaagattaagacggaagagatcgcggcattccagaggaagaggcgcagtggcagcaacggctctgtggtcagcctggaacagcagcagaagattgaggagcagaagaagtggctggaccaggagatggagaaggtgctacagcagcggcgggcgctggaggagctgggggaggagctccacaagcgggaggccatcctggccaagaaggaggccctgatgcaggagaagacggggctggagagcaagcgcctgagatccagccaggccctcaacgaggacatcgtgcgagtgtccagccggctggagcacctggagaaggagctgtccgagaagagcgggcagctgcggcagggcagcgcccagagccagcagcagatccgcggggagatcgacagcctgcgccaggagaaggactcgctgctcaagcagcgcctggagatcgacggcaagctgaggcaggggagtctgctgtcccccgaggaggagcggacgctgttccagttggatgaggccatcgaggccctggatgctgccattgagtataagaatgaggccatcacatgccgccagcgggtgcttcgggcctcagcctcgttgctgtcccagtgcgagatgaacctcatggccaagctcagctacctctcatcctcagagaccagagccctcctctgcaagtattttgacaaggtggtgacgctccgagaggagcagcaccagcagcagattgccttctcggaactggagatgcagctggaggagcagcagaggctggtgtactggctggaggtggccctggagcggcagcgcctggagatggaccgccagctgaccctgcagcagaaggagcacgagcagaacatgcagctgctcctgcagcagagtcgagaccacctcggtgaagggttagcagacagcaggaggcagtatgaggcccggattcaagctctggagaaggaactgggccgttacatgtggataaaccaggaactgaaacagaagctcggcggtgtgaacgctgtaggccacagcaggggtggggagaagaggagcctgtgctcggagggcagacaggctcctggaaatgaagatgagctccacctggcacccgagcttctctggctgtcccccctcactgagggggccccccgcacccgggaggagacgcgggacttggtccacgctccgttacccttgacctggaaacgctcgagcctgtgtggtgaggagcaggggtcccccgaggaactgaggcagcgggaggcggctgagcccctggtggggcgggtgcttcctgtgggtgaggcaggcctgccctggaactttgggcctttgtccaagccccggcgggaactgcgacgagccagcccggggatgattgatgtccggaaaaaccccctgtaagccctcggggcagaccctgccttggagggagactccgagcctgctgaaaggggcagctgcctgttttgcttctgtgaagggcagtccttaccgcacaccctaaatccaggccctcatctgtaccctcactgggatcaacaaatttgggccatggcccaaaagaactggaccctcatttaacaaaataatatgcaaattcccaccacttacttccatgaagctgtggtacccaattgccgccttgtgtcttgctcgaatctcaggacaattctggtttcaggcgtaaatggatgtgcttgtagttcaggggtttggccaagaatcatcacgaaagggtcggtggtaaccaggttgtggtttaaatggtcttatgtatataggggaaactgggagactttaggatcttaaaaaaccatttaataaaaaaaaatctttgaaggga

SEQ ID NO: 146795 - DNA, 1375 bp, Homo sapiens
  Payload ID: 9046
  Gene Symbol: KIF7
  Gene Name: kinesin family member 7
  ENST ID: ENST00000445906
  CDS Start-End: 78-521
ctggggatggaaacctgactgcctggcccgggacggcgcttgcagccaggcagggcccagagcagtcctccctcggcatggggctggaggctcagaggctgccaggggctgaggaggccccagtgcgggttgccctgcgagttcgaccactgctgcccaaggagctgctgcacgggcatcagagctgcctgcaggtggagccagggcttggccgcgtcactctgggccgtgaccgacactttggcttccacgtggtgctggccgaggatgcggggcaggaggccgtgtaccaggcctgcgttcagcccctccttgaggccttcttcgagggcttcaatgccactgtctttgcctatggtcagacgggctcagggaagacatacaccatgggggaggccagtgtggagcaccatcctccagctctggcaggggcctatgagcttccgggcctgggggccatgggccgtgtccagctgaagtggcaggaggccctgcggtgtctccccagcctccctccttgaggatgagcagggcattgtcccgagggccatggccgaggccttcaagctcatcgatgagaacgacctgcttgactgtctggtacatgtgtcctacctggaagtgtacaaggaggagttccgagacctgctcgaggtgggcactgccagccgtgacatccagctccgggaagatgagcgcgggaatgttgtgctgtgcggggtgaaggaggtcgacgtggagggcctggatgaggtgctgagcctcctggagatgggcaacgcggcgcggcacacgggagccacgcacctcaaccacctgtctagccgctcacacacggtcttcaccgtgaccctggagcagcgggggcgcgcccccagccgcctaccccgccccgccccgggccagctgctcgtctccaagttccacttcgtggacctggcgggctcagagagggtgctcaagacgggcagcaccggcgagcggctcaaggagagcatccagatcaacagcagcctcctggcgctgggcaacgtcatcagcgccctgggggaccctcagcgccggggcagccacataccctaccgcgactccaagatcacccggatcctcaaagactcgctgggcgggaacgccaagacggtgatgatcgcctgcgtcagcccttcctcctccgacttcgacgagaccctcaacaccctcaactacgccagccgcgcccagaacatccgcaaccgcgccacggtcaactggcggcccgaggccgagcggccacccgaagagacggcgagcggcgcgcggggtccgccacggcaccgctccgagacccgcatcatccaccgcggccggcgcgccccaggcccagccaccgcctccg

SEQ ID NO: 146796 - DNA, 3311 bp, Homo sapiens
  Payload ID: 9047
  Gene Symbol: KIF9
  Gene Name: kinesin family member 9
  Uniprot ID: Q9HAQ2
  ENST ID: ENST00000265529
  CDS Start-End: 682-3054
gtggtgcccatcagcatgtggagccggccaccgcccctgcctccatagaagcccgctgccgcccagtccgcggtaccttgagggtcacgtcgcacagcttgccctgccgccggatctcctccatgacgccgtagccgcgactaggcaactcagacacggagaagtgcaccagatcctccagctcctccgcgccgtcctccaccatcttccccggccgctgcaactgcgcaggcctcgccggccggctagacactaaccagggcggggcgatagcgcacgccgacagccgctcggagcgcggagcagcaatcggacgggcctccgcggccgccgtagttgaatctcctcggcgccggaagccccgccactccgcttcctggttcatgtgcggccttcgttccctcgctatctcgaccttgacttcgcatgtgcatccgccgaagtctttctagatcaatcggccccatctctcgtcttcccgattcggccatgacctcacccgtatcctcgacgtaggacctcggacttcatttccgccaccccgacacttccggaatccccggaagcgacccgttgccatggcgactatgtacacagccaggcagccccgcgtggggagtgcaggtggtttcggttgcggcagtcgcgtcccgggagcgtcgctgcctggtgaacgctagaatgggtactaggaaaaaagttcatgcatttgtccgtgtcaaacccaccgatgactttgctcatgaaatgatcagatacggagatgacaaaagaagcattgatattcacttaaaaaaagacattcggagaggagttgtcaataaccaacagacagactggtcgtttaagttggatggagttcttcacgatgcctcccaggacttggtttatgagacagttgcaaaggatgtggtttctcaggccctcgatggctataatggcaccatcatgtgttatgggcagacgggagctggcaagacatacaccatgatgggggcaactgagaattacaagcaccgggggatcctccctcgtgccctgcagcaggtttttaggatgatcgaagaacgccccacacatgccatcactgtgcgtgtttcctacttggaaatctataatgagagcctgtttgatctcctgtccactctgccctatgttggaccctcagtcacaccaatgaccatcgtggaaaaccctcaaggagtcttcattaagggcttgtcagttcacctcacaagtcaggaggaggatgcattcagcctcctttttgagggtgagaccaacaggattatagcctcccacactatgaacaaaaactcttccagatcacactgcattttcaccatctacttagaggcccattcccggaccttatcagaggaaaagtacatcacttccaaaattaacttggtggatctggcaggctcagagaggctggggaagtctgggtctgagggccaagtcctgaaggaagccacctacatcaacaaatcgctctcattcctggagcaggccatcattgcccttggggaccagaagcgggaccacatcccctttcggcagtgcaagctcacccacgctctgaaggactcgttagggggaaactgcaatatggtcctcgtgacaaacatctatggagaagctgcccagttagaagaaacgctatcttcactgagatttgccagcaggatgaagctagtcaccactgagcctgccatcaatgaaaagtatgatgctgagagaatggtcaagaacctggagaaggaactagcactactcaagcaggagctggctatccatgacagcctgaccaaccgcacctttgtgacctatgaccccatggatgaaatccagattgctgagatcaactcccaggtgcggaggtacctggaggggacactggacgagatcgacataatcagccttagacagatcaaggaggtgttcaaccagttccgggtggttctgagccaacaggaacaggaagtggagtccactttgcgcaggaagtacaccctcattgacaggaatgactttgcagccatttctgctatccagaaggcggggcttgtggatgttgatggccacctagtgggtgagcctgaaggacaaaactttggactcggagtcgcccctttctctaccaaacctgggaagaaagccaagtccaagaagacattcaaagagccactcagctccttggcaagaaaggaaggtgccagcagccctgtgaatgggaaggacttggattacgtttccacctccaagacccagctggtcccatcctccaaagatggggatgtcaaagacatgctttcgcgggaccgggaaacttccagcattgagccccttccctcagactccccgaaggaggaattacgcccaattaggcccgacaccccaccctccaaaccagtggcctttgaggagtttaagaatgagcaaggtagtgagatcaaccgaattttcaaagaaaacaaatccatcttgaatgaacggaggaaaagggccagcgagaccacacagcacatcaatgccatcaagcgggagattgatgtgaccaaggaggccctgaatttccagaagtcactacgggagaagcaaggcaagtacgaaaacaaggggctgatgatcatcgatgaggaagaattcctgctgatcctcaagctcaaagacctcaagaagcagtaccgcagcgagtaccaggacctgcgtgacctcagggctgagatccagtattgccagcacctagtggatcagtgtcgccaccgcctgctcatggaatttgacatctggtacaatgagtcctttgtcatccctgaggacatgcagatggcactgaagccaggcggcagcatccggccaggcatggtccctgtgaacaggattgtgtctctgggagaagatgaccaggacaaattcagccagctgcagcagagggtgcttcctgagggccctgattccatctccttctacaatgccaaagtcaagatagagcagaagcataattacttgaaaaccatgatgggcctccagcaggcacatagaaaatagaacctcatcgccagtaccttaaaggacaagaccagcaactcccacctactgtagtggagctgctcaaccacctgcccagagctgcagccccctctactccaatgctgggacccagcacagagaacacatttggcctgcatgttgggaggagcatcctccaaggacaaccttgctcatctccacagagcactttgggttttaattcactgtcttatatgcagggacaggataaaataactttctagtttggactttca

SEQ ID NO: 146797 - DNA, 3357 bp, Homo sapiens
  Payload ID: 9047
  Gene Symbol: KIF9
  Gene Name: kinesin family member 9
  Uniprot ID: Q9HAQ2
  ENST ID: ENST00000335044
  CDS Start-End: 359-2731
gcggccgccgtagttgaatctcctcggcgccggaagccccgccactccgcttcctggttcatgtgcggccttcgttccctcgctatctcgaccttgacttcgcatgtgcatccgccgaagtctttctagatcaatcggccccatctctcgtcttcccgattcggccatgacctcacccgtatcctcgacgtaggacctcggacttcatttccgccaccccgacacttccggaatccccggaagcgacccgttgccatggcgactatgtacacagccaggcagccccgcgtggggagtgcaggtggtttcggttgcggcagtcgcgtcccgggagcgtcgctgcctggtgaacgctagaatgggtactaggaaaaaagttcatgcatttgtccgtgtcaaacccaccgatgactttgctcatgaaatgatcagatacggagatgacaaaagaagcattgatattcacttaaaaaaagacattcggagaggagttgtcaataaccaacagacagactggtcgtttaagttggatggagttcttcacgatgcctcccaggacttggtttatgagacagttgcaaaggatgtggtttctcaggccctcgatggctataatggcaccatcatgtgttatgggcagacgggagctggcaagacatacaccatgatgggggcaactgagaattacaagcaccgggggatcctccctcgtgccctgcagcaggtttttaggatgatcgaagaacgccccacacatgccatcactgtgcgtgtttcctacttggaaatctataatgagagcctgtttgatctcctgtccactctgccctatgttggaccctcagtcacaccaatgaccatcgtggaaaaccctcaaggagtcttcattaagggcttgtcagttcacctcacaagtcaggaggaggatgcattcagcctcctttttgagggtgagaccaacaggattatagcctcccacactatgaacaaaaactcttccagatcacactgcattttcaccatctacttagaggcccattcccggaccttatcagaggaaaagtacatcacttccaaaattaacttggtggatctggcaggctcagagaggctggggaagtctgggtctgagggccaagtcctgaaggaagccacctacatcaacaaatcgctctcattcctggagcaggccatcattgcccttggggaccagaagcgggaccacatcccctttcggcagtgcaagctcacccacgctctgaaggactcgttagggggaaactgcaatatggtcctcgtgacaaacatctatggagaagctgcccagttagaagaaacgctatcttcactgagatttgccagcaggatgaagctagtcaccactgagcctgccatcaatgaaaagtatgatgctgagagaatggtcaagaacctggagaaggaactagcactactcaagcaggagctggctatccatgacagcctgaccaaccgcacctttgtgacctatgaccccatggatgaaatccagattgctgagatcaactcccaggtgcggaggtacctggaggggacactggacgagatcgacataatcagccttagacagatcaaggaggtgttcaaccagttccgggtggttctgagccaacaggaacaggaagtggagtccactttgcgcaggaagtacaccctcattgacaggaatgactttgcagccatttctgctatccagaaggcggggcttgtggatgttgatggccacctagtgggtgagcctgaaggacaaaactttggactcggagtcgcccctttctctaccaaacctgggaagaaagccaagtccaagaagacattcaaagagccactcagctccttggcaagaaaggaaggtgccagcagccctgtgaatgggaaggacttggattacgtttccacctccaagacccagctggtcccatcctccaaagatggggatgtcaaagacatgctttcgcgggaccgggaaacttccagcattgagccccttccctcagactccccgaaggaggaattacgcccaattaggcccgacaccccaccctccaaaccagtggcctttgaggagtttaagaatgagcaaggtagtgagatcaaccgaattttcaaagaaaacaaatccatcttgaatgaacggaggaaaagggccagcgagaccacacagcacatcaatgccatcaagcgggagattgatgtgaccaaggaggccctgaatttccagaagtcactacgggagaagcaaggcaagtacgaaaacaaggggctgatgatcatcgatgaggaagaattcctgctgatcctcaagctcaaagacctcaagaagcagtaccgcagcgagtaccaggacctgcgtgacctcagggctgagatccagtattgccagcacctagtggatcagtgtcgccaccgcctgctcatggaatttgacatctggtacaatgagtcctttgtcatccctgaggacatgcagatggcactgaagccaggcggcagcatccggccaggcatggtccctgtgaacaggattgtgtctctgggagaagatgaccaggacaaattcagccagctgcagcagagggtgcttcctgagggccctgattccatctccttctacaatgccaaagtcaagatagagcagaagcataattacttgaaaaccatgatgggcctccagcaggcacatagaaaatagaacctcatcgccagtaccttaaaggacaagaccagcaactcccacctactgtagtggagctgctcaaccacctgcccagagctgcagccccctctactccaatgctgggacccagcacagagaacacatttggcctgcatgttgggaggagcatcctccaaggacaaccttgctcatctccacagagcactttgggttttaattcactgtcttatatgcagggacaggataaaataactttctagtttggactttcagtgctcatctgagaactttgtcttatttcctgtctgaaaggacatattctctatgtatgtgtgaggtcagaactgagtctcaagtaggaaggcagaaaagtagctcagccaggctcctcctggcaggcctttgtcacactggtcagcccctttcctggatagacatcctagggtgggggtggtgagctcggtctgaggagctctgcttctcacagctccctcagaccctaagttctctcaagacatcttttctgtgtttctgagccagtgaagaagacaggaggaggccctccttcatttggcaaccaggggaggataaggtctagccacagagaccagaaagggatgaggcagagctggctccatgta

SEQ ID NO: 146798 - DNA, 741 bp, Homo sapiens
  Payload ID: 9047
  Gene Symbol: KIF9
  Gene Name: kinesin family member 9
  ENST ID: ENST00000456548
  CDS Start-End: 264-741
gacttcgcatgtgcatccgccgaagtctttctagatcaatcggccccatctctcgtcttcccgattcggccatgacctcacccgtatcctcgacgtaggacctcggacttcatttccgccaccccgacacttccggaatccccggaagcgacccgttgccatggcgactatgtacacagccaggcagccccgcgtggggagtgcaggtggtttcggttgcggcagtcgcgtcccgggagcgtcgctgcctggtgaacgctagaatgggtactaggaaaaaagttcatgcatttgtccgtgtcaaacccaccgatgactttgctcatgaaatgatcagatacggagatgacaaaagaagcattgatattcacttaaaaaaagacattcggagaggagttgtcaataaccaacagacagactggtcgtttaagttggatggagttcttcacgatgcctcccaggacttggtttatgagacagttgcaaaggatgtggtttctcaggccctcgatggctataatggcaccatcatgtgttatgggcagacgggagctggcaagacatacaccatgatgggggcaactgagaattacaagcaccgggggatcctccctcgtgccctgcagcagggtgagaccaacaggattatagcctcccacactatgaacaaaaactcttccagatcacactgcattttcaccatctacttagaggcccattcccggaccttatcagaggaaa

SEQ ID NO: 146799 - DNA, 633 bp, Homo sapiens
  Payload ID: 9047
  Gene Symbol: KIF9
  Gene Name: kinesin family member 9
  ENST ID: ENST00000432493
  CDS Start-End: 278-553
gctatctcgaccttgacttcgcatgtgcatccgccgaagtctttctagatcaatcggccccatctctcgtcttcccgattcggccatgacctcacccgtatcctcgacgtaggacctcggacttcatttccgccaccccgacacttccggaatccccggaagcgacccgttgccatggcgactatgtacacagccaggcagccccgcgtggggagtgcaggtggtttcggttgcggcagtcgcgtcccgggagcgtcgctgcctggtgaacgctagaatgggtactaggaaaaaagttcatgcatttgtccgtgtcaaacccaccgatgactttgctcatgaaatgatcagatacggagatgacaaaagaagcattgatattcacttaaaaaaagacattcggagaggagttgtcaataaccaacagacagactggtcgtttaagttggatggagttcttcacgatgcctcccaggacttggtttatgagacagttgcaaaggatgtggtttctcaggccctcgatggctataatggtaacttaattaattaaatgttgtcttatgtaagaacctgaggagtaagagatgcaaatattttatggtgaataaaataaaagctcactcactatca

SEQ ID NO: 146800 - DNA, 2707 bp, Homo sapiens
  Payload ID: 9047
  Gene Symbol: KIF9
  Gene Name: kinesin family member 9
  Uniprot ID: Q9HAQ2
  ENST ID: ENST00000452770
  CDS Start-End: 335-2707
acagccaggcagccccgcgtggggagtgcaggtggtttcggttgcggcagtcgcgtcccgggagcgtcgctgcctggtgaacgctgggtcgctcatctctgaaacccaggcgaaggagggctcgacgtcgcgggagtcctttcaacctgaccgcggcttacggtcttcggagctaatgttcattggtcccacaaaggggtcccacgtcgcgtccaggacatagaggccgtgaggcagggagccagaggtcgtctggactcttccgtactagtcagttttcgaactagagggggctttgggatcaccagtcggagcccttcgtgttacagctagaatgggtactaggaaaaaagttcatgcatttgtccgtgtcaaacccaccgatgactttgctcatgaaatgatcagatacggagatgacaaaagaagcattgatattcacttaaaaaaagacattcggagaggagttgtcaataaccaacagacagactggtcgtttaagttggatggagttcttcacgatgcctcccaggacttggtttatgagacagttgcaaaggatgtggtttctcaggccctcgatggctataatggcaccatcatgtgttatgggcagacgggagctggcaagacatacaccatgatgggggcaactgagaattacaagcaccgggggatcctccctcgtgccctgcagcaggtttttaggatgatcgaagaacgccccacacatgccatcactgtgcgtgtttcctacttggaaatctataatgagagcctgtttgatctcctgtccactctgccctatgttggaccctcagtcacaccaatgaccatcgtggaaaaccctcaaggagtcttcattaagggcttgtcagttcacctcacaagtcaggaggaggatgcattcagcctcctttttgagggtgagaccaacaggattatagcctcccacactatgaacaaaaactcttccagatcacactgcattttcaccatctacttagaggcccattcccggaccttatcagaggaaaagtacatcacttccaaaattaacttggtggatctggcaggctcagagaggctggggaagtctgggtctgagggccaagtcctgaaggaagccacctacatcaacaaatcgctctcattcctggagcaggccatcattgcccttggggaccagaagcgggaccacatcccctttcggcagtgcaagctcacccacgctctgaaggactcgttagggggaaactgcaatatggtcctcgtgacaaacatctatggagaagctgcccagttagaagaaacgctatcttcactgagatttgccagcaggatgaagctagtcaccactgagcctgccatcaatgaaaagtatgatgctgagagaatggtcaagaacctggagaaggaactagcactactcaagcaggagctggctatccatgacagcctgaccaaccgcacctttgtgacctatgaccccatggatgaaatccagattgctgagatcaactcccaggtgcggaggtacctggaggggacactggacgagatcgacataatcagccttagacagatcaaggaggtgttcaaccagttccgggtggttctgagccaacaggaacaggaagtggagtccactttgcgcaggaagtacaccctcattgacaggaatgactttgcagccatttctgctatccagaaggcggggcttgtggatgttgatggccacctagtgggtgagcctgaaggacaaaactttggactcggagtcgcccctttctctaccaaacctgggaagaaagccaagtccaagaagacattcaaagagccactcagctccttggcaagaaaggaaggtgccagcagccctgtgaatgggaaggacttggattacgtttccacctccaagacccagctggtcccatcctccaaagatggggatgtcaaagacatgctttcgcgggaccgggaaacttccagcattgagccccttccctcagactccccgaaggaggaattacgcccaattaggcccgacaccccaccctccaaaccagtggcctttgaggagtttaagaatgagcaaggtagtgagatcaaccgaattttcaaagaaaacaaatccatcttgaatgaacggaggaaaagggccagcgagaccacacagcacatcaatgccatcaagcgggagattgatgtgaccaaggaggccctgaatttccagaagtcactacgggagaagcaaggcaagtacgaaaacaaggggctgatgatcatcgatgaggaagaattcctgctgatcctcaagctcaaagacctcaagaagcagtaccgcagcgagtaccaggacctgcgtgacctcagggctgagatccagtattgccagcacctagtggatcagtgtcgccaccgcctgctcatggaatttgacatctggtacaatgagtcctttgtcatccctgaggacatgcagatggcactgaagccaggcggcagcatccggccaggcatggtccctgtgaacaggattgtgtctctgggagaagatgaccaggacaaattcagccagctgcagcagagggtgcttcctgagggccctgattccatctccttctacaatgccaaagtcaagatagagcagaagcataattacttgaaaaccatgatgggcctccagcaggcacatagaaaatag

SEQ ID NO: 146801 - DNA, 1521 bp, Homo sapiens
  Payload ID: 9047
  Gene Symbol: KIF9
  Gene Name: kinesin family member 9
  ENST ID: ENST00000443784
  CDS Start-End: 49-1050
gttgcggcagtcgcgtcccgggagcgtcgctgcctggtgaacgctagaatgggtactaggaaaaaagttcatgcatttgtccgtgtcaaacccaccgatgactttgctcatgaaatgatcagatacggagatgacaaaagaagcattgatattcacttaaaaaaagacattcggagaggagttgtcaataaccaacagacagactggtcgtttaagttggatggagttcttcacgatgcctcccaggacttggtttatgagacagttgcaaaggatgtggtttctcaggccctcgatggctataatggcaccatcatgtgttatgggcagacgggagctggcaagacatacaccatgatgggggcaactgagaattacaagcaccgggggatcctccctcgtgccctgcagcaggtttttaggatgatcgaagaacgccccacacatgccatcactgtgcgtgtttcctacttggaaatctataatgagagcctgtttgatctcctgtccactctgccctatgttggaccctcagtcacaccaatgaccatcgtggaaaaccctcaaggagtcttcattaagggcttgtcagttcacctcacaagtcaggaggaggatgcattcagcctcctttttgagggtgagaccaacaggattatagcctcccacactatgaacaaaaactcttccagatcacactgcattttcaccatctacttagaggcccattcccggaccttatcagaggaaaagtacatcacttccaaaattaacttggtggatctggcaggctcagagaggctggggaagtctgggtctgagggccaagtcctgaaggaagccacctacatcaacaaatcgctctcattcctggagcaggccatcattgcccttggggaccagaagcgggaccacatcccctttcggcagtgcaagctcacccacgctctgaaggactcgttagggggaaactgcaatatggtcctcgtgacaaacatctatggagaagctgcccagttagaagaaacgggttccaggctgtggttataaggccagtatgagcagatggtattaagcacctgccatgtgcaccatgctatcttcactgagatttgccagcaggatgaagctagtcaccactgagcctgccatcaatgaaaagtatgatgctgaggaatggccaggatgtctgggcacagaatgaggaattgtacttttgctgtggaagagacagggtagcttctctgatgatccttcctgtcggcccccaccctaccatgtttcccggcagagaatggtcaagaacctggagaaggaactagcactactcaagcaggagctggctatccatgacagcctgaccaaccgcacctttgtgacctatgaccccatggatgaaatccagattgctgagatcaactcccaggtgcggaggtacctggaggggacactggacgagatcgacataatcagccttagacagatcaaggaggtgttcaaccagttccgggtggttctgag

SEQ ID NO: 146802 - DNA, 640 bp, Homo sapiens
  Payload ID: 9047
  Gene Symbol: KIF9
  Gene Name: kinesin family member 9
  ENST ID: ENST00000425452
  CDS Start-End: 267-584
gtcagttttcgaactagagggggctttgggatcaccagtcggagcccttcgtgttacagtagtgactgaagatagacccacatatgaagattcagctgccctctgacttccagccattaccatcaccaaccaccgccatttcctgaatacctactctgtgctgggctctgccctggacattgtgaggggattcaaaagagataaaaagcacaatccttgccttcaagcagcttgtaatttaattttgggaactgaaacccactcaaatgaagcgacgtaagaatggtaacaagcagtatttcactagaatgggtactaggaaaaaagttcatgcatttgtccgtgtcaaacccaccgatgactttgctcatgaaatgatcagatacggagatgacaaaagaagcattgatattcacttaaaaaaagacattcggagaggagttgtcaataaccaacagacagactggtcgtttaagttggatggagttcttcacgatgcctcccaggacttggtttatgagacagttgcaaaggatgtggtttctcaggccctcgatggctataatggtaacttaattaattaaatgttgtcttatgtaagaacctgaggagtaagagatgcaaatattttatggtgaat

SEQ ID NO: 146803 - DNA, 740 bp, Homo sapiens
  Payload ID: 9047
  Gene Symbol: KIF9
  Gene Name: kinesin family member 9
  ENST ID: ENST00000425853
  CDS Start-End: 385-660
gggagcgtcgctgcctggtgaacggtgagcaggggctgctcgccggtgggagtggggagacgggaaaagggtgtgcgcccggactgctgaaagtggctggggtccaaaaaccgctttatctgggggttcccagctgggtcgctcatctctgaaacccaggcgaaggagggctcgacgtcgcgggagtcctttcaacctgaccgcggcttacggtcttcggagctaatgttcattggtcccacaaaggggtcccacgtcgcgtccaggacatagaggccgtgaggcagggagccagaggtcgtctggactcttccgtactagtcagttttcgaactagagggggctttgggatcaccagtcggagcccttcgtgttacagctagaatgggtactaggaaaaaagttcatgcatttgtccgtgtcaaacccaccgatgactttgctcatgaaatgatcagatacggagatgacaaaagaagcattgatattcacttaaaaaaagacattcggagaggagttgtcaataaccaacagacagactggtcgtttaagttggatggagttcttcacgatgcctcccaggacttggtttatgagacagttgcaaaggatgtggtttctcaggccctcgatggctataatggtaacttaattaattaaatgttgtcttatgtaagaacctgaggagtaagagatgcaaatattttatggtgaataaaataaaagctcactcactatca

SEQ ID NO: 146804 - DNA, 2791 bp, Homo sapiens
  Payload ID: 9047
  Gene Symbol: KIF9
  Gene Name: kinesin family member 9
  Uniprot ID: Q9HAQ2
  ENST ID: ENST00000444589
  CDS Start-End: 359-2536
gcggccgccgtagttgaatctcctcggcgccggaagccccgccactccgcttcctggttcatgtgcggccttcgttccctcgctatctcgaccttgacttcgcatgtgcatccgccgaagtctttctagatcaatcggccccatctctcgtcttcccgattcggccatgacctcacccgtatcctcgacgtaggacctcggacttcatttccgccaccccgacacttccggaatccccggaagcgacccgttgccatggcgactatgtacacagccaggcagccccgcgtggggagtgcaggtggtttcggttgcggcagtcgcgtcccgggagcgtcgctgcctggtgaacgctagaatgggtactaggaaaaaagttcatgcatttgtccgtgtcaaacccaccgatgactttgctcatgaaatgatcagatacggagatgacaaaagaagcattgatattcacttaaaaaaagacattcggagaggagttgtcaataaccaacagacagactggtcgtttaagttggatggagttcttcacgatgcctcccaggacttggtttatgagacagttgcaaaggatgtggtttctcaggccctcgatggctataatggcaccatcatgtgttatgggcagacgggagctggcaagacatacaccatgatgggggcaactgagaattacaagcaccgggggatcctccctcgtgccctgcagcaggtttttaggatgatcgaagaacgccccacacatgccatcactgtgcgtgtttcctacttggaaatctataatgagagcctgtttgatctcctgtccactctgccctatgttggaccctcagtcacaccaatgaccatcgtggaaaaccctcaaggagtcttcattaagggcttgtcagttcacctcacaagtcaggaggaggatgcattcagcctcctttttgagggtgagaccaacaggattatagcctcccacactatgaacaaaaactcttccagatcacactgcattttcaccatctacttagaggcccattcccggaccttatcagaggaaaagtacatcacttccaaaattaacttggtggatctggcaggctcagagaggctggggaagtctgggtctgagggccaagtcctgaaggaagccacctacatcaacaaatcgctctcattcctggagcaggccatcattgcccttggggaccagaagcgggaccacatcccctttcggcagtgcaagctcacccacgctctgaaggactcgttagggggaaactgcaatatggtcctcgtgacaaacatctatggagaagctgcccagttagaagaaacgctatcttcactgagatttgccagcaggatgaagctagtcaccactgagcctgccatcaatgaaaagtatgatgctgagagaatggtcaagaacctggagaaggaactagcactactcaagcaggagctggctatccatgacagcctgaccaaccgcacctttgtgacctatgaccccatggatgaaatccagattgctgagatcaactcccaggtgcggaggtacctggaggggacactggacgagatcgacataatcagccttagacagatcaaggaggtgttcaaccagttccgggtggttctgagccaacaggaacaggaagtggagtccactttgcgcaggaagtacaccctcattgacaggaatgactttgcagccatttctgctatccagaaggcggggcttgtggatgttgatggccacctagtgggtgagcctgaaggacaaaactttggactcggagtcgcccctttctctaccaaacctgggaagaaagccaagtccaagaagacattcaaagagccactcaggcccgacaccccaccctccaaaccagtggcctttgaggagtttaagaatgagcaaggtagtgagatcaaccgaattttcaaagaaaacaaatccatcttgaatgaacggaggaaaagggccagcgagaccacacagcacatcaatgccatcaagcgggagattgatgtgaccaaggaggccctgaatttccagaagtcactacgggagaagcaaggcaagtacgaaaacaaggggctgatgatcatcgatgaggaagaattcctgctgatcctcaagctcaaagacctcaagaagcagtaccgcagcgagtaccaggacctgcgtgacctcagggctgagatccagtattgccagcacctagtggatcagtgtcgccaccgcctgctcatggaatttgacatctggtacaatgagtcctttgtcatccctgaggacatgcagatggcactgaagccaggcggcagcatccggccaggcatggtccctgtgaacaggattgtgtctctgggagaagatgaccaggacaaattcagccagctgcagcagagggtgcttcctgagggccctgattccatctccttctacaatgccaaagtcaagatagagcagaagcataattacttgaaaaccatgatgggcctccagcaggcacatagaaaatagaacctcatcgccagtaccttaaaggacaagaccagcaactcccacctactgtagtggagctgctcaaccacctgcccagagctgcagccccctctactccaatgctgggacccagcacagagaacacatttggcctgcatgttgggaggagcatcctccaaggacaaccttgctcatctccacagagcactttgggttttaattcactgtcttatatgcagggacaggataaaataactttctagtttggacttt

SEQ ID NO: 146805 - DNA, 2694 bp, Homo sapiens
  Payload ID: 9048
  Gene Symbol: KIFC1
  Gene Name: kinesin family member C1
  Uniprot ID: Q9BW19
  ENST ID: ENST00000374523
  CDS Start-End: 451-2472
gcggcgacgtccacgcattttctgacgtagcgagcgacggcggggagccgagcggaagtccagcactattgccgctagaggaggggaggggtgagaagcataagtggcaccggaagtggaattaatccgcctacctctcctgcgcctgcgaaacagaaaagacaaggcgcctgtcgggcggggtgtggcttcgggtggcggagaacgctgcgattggccctcggctgtggcgacagcgacgattggtccctgcgtgcagagcgcggtgagagtgggtggtggccgttggaattcaaaagtggcgggtgtggcgcggggctggtagcggccggagccgtgcgagttctctaccctgcttcgcgagcgggcgagagaacgcgagtcccaggatccccggcacccagttctcttccactgcattcccccggcgcgtgtgggaccgaggtggacatggatccgcagaggtcccccctattggaagtaaaggggaacatagaactgaagagacctctgattaaggccccttcccagctgcctctctcaggaagcagactcaagaggaggcctgaccagatggaagatggcctggagcctgagaagaaacggacaagaggcctgggtgcaacgaccaaaattaccacatcccacccaagagttccatccctcactacagtgccacagacacaaggccagaccacagctcaaaaagtttccaagaagacaggaccccggtgttccacagctattgccacagggttgaagaaccagaagccagttcctgctgttcctgtccagaagtctggcacatcaggtgttcctcccatggcaggagggaagaaacccagcaaacgtccagcctgggacttaaagggtcagttatgtgacctaaatgcagaactaaaacggtgccgtgagaggactcaaacgttggaccaagagaaccagcagcttcaggaccagctcagagatgcccagcagcaggtcaaggccctggggacagagcgcacaacactggaggggcatttagccaaggtacaggcccaggctgagcagggccaacaggagctgaagaacttgcgtgcttgtgtcctggagctggaagagcggctgagcacgcaggagggcttggtgcaagagcttcagaaaaaacaggtggaattgcaggaagaacggaggggactgatgtcccaactagaggagaaggagaggaggctgcagacatcagaagcagccctgtcaagcagccaagcagaggtggcatctctgcggcaggagactgtggcccaggcagccttactgactgagcgggaagaacgtcttcatgggctagaaatggagcgccggcgactgcacaaccagctgcaggaactcaagggcaacatccgtgtattctgccgggtccgccctgtcctgccgggggagcccactccaccccctggcctcctcctgtttccctctggccctggtgggccctctgatcctccaacccgccttagcctctcccggtctgacgagcggcgtgggaccctgagtggggcaccagctcccccaactcgccatgatttttcctttgaccgggtattcccaccaggaagtggacaggatgaagtgtttgaagagattgccatgcttgtccagtcagccctggatggctatccagtatgcatctttgcctatggccagacaggcagtggcaagaccttcacaatggagggtgggcctgggggagacccccagttggaggggctgatccctcgggccctgcggcacctcttctctgtggctcaggagctgagtggtcagggctggacctacagctttgtagcaagctacgtagagatctacaatgagactgtccgggacctgctggccactggaacccggaagggtcaagggggcgagtgtgagattcgccgtgcagggccagggagtgaggagctcactgtcaccaatgctcgatatgtccctgtctcctgtgagaaagaagtggacgccctgcttcatctggcccgccagaatcgggctgtggcccgcacagcccagaatgaacggtcatcacgcagccacagtgtattccagctacagatttctggggagcactccagccgaggcctgcagtgtggggcccccctcagtcttgtggacctggccgggagtgagcgacttgaccccggcttagccctcggccccggggagcgggaacgccttcgggaaacacaggccattaacagcagcctgtccacgctggggctggttatcatggccctgagcaacaaggagtcccacgtgccttaccggaacagcaaactgacctacctgctgcagaactctctgggtggtagtgctaagatgctcatgtttgtgaacatttctccactggaagagaacgtctccgagtccctcaactctctacgctttgcctccaaggtgaaccagtgtgttattggtactgctcaggccaacaggaagtgaagacggatccagatctgtgtgtgtgtgtgtgtgtgtgtgtgtgtgtgtgtgtccctatgtctatgtatcgggtgaggggtgggagggttgctggagggtgctttattgggtggagggcaccatgtcccagggctatcaaataaagaatagtttggttttttttttaaataaaggttttattagcatttgcccaagaaggcagatactttcatatctgtaaaa

SEQ ID NO: 146806 - DNA, 2706 bp, Homo sapiens
  Payload ID: 9048
  Gene Symbol: KIFC1
  Gene Name: kinesin family member C1
  Uniprot ID: Q9BW19
  ENST ID: ENST00000428849
  CDS Start-End: 451-2472
gcggcgacgtccacgcattttctgacgtagcgagcgacggcggggagccgagcggaagtccagcactattgccgctagaggaggggaggggtgagaagcataagtggcaccggaagtggaattaatccgcctacctctcctgcgcctgcgaaacagaaaagacaaggcgcctgtcgggcggggtgtggcttcgggtggcggagaacgctgcgattggccctcggctgtggcgacagcgacgattggtccctgcgtgcagagcgcggtgagagtgggtggtggccgttggaattcaaaagtggcgggtgtggcgcggggctggtagcggccggagccgtgcgagttctctaccctgcttcgcgagcgggcgagagaacgcgagtcccaggatccccggcacccagttctcttccactgcattcccccggcgcgtgtgggaccgaggtggacatggatccgcagaggtcccccctattggaagtaaaggggaacatagaactgaagagacctctgattaaggccccttcccagctgcctctctcaggaagcagactcaagaggaggcctgaccagatggaagatggcctggagcctgagaagaaacggacaagaggcctgggtgcaacgaccaaaattaccacatcccacccaagagttccatccctcactacagtgccacagacacaaggccagaccacagctcaaaaagtttccaagaagacaggaccccggtgttccacagctattgccacagggttgaagaaccagaagccagttcctgctgttcctgtccagaagtctggcacatcaggtgttcctcccatggcaggagggaagaaacccagcaaacgtccagcctgggacttaaagggtcagttatgtgacctaaatgcagaactaaaacggtgccgtgagaggactcaaacgttggaccaagagaaccagcagcttcaggaccagctcagagatgcccagcagcaggtcaaggccctggggacagagcgcacaacactggaggggcatttagccaaggtacaggcccaggctgagcagggccaacaggagctgaagaacttgcgtgcttgtgtcctggagctggaagagcggctgagcacgcaggagggcttggtgcaagagcttcagaaaaaacaggtggaattgcaggaagaacggaggggactgatgtcccaactagaggagaaggagaggaggctgcagacatcagaagcagccctgtcaagcagccaagcagaggtggcatctctgcggcaggagactgtggcccaggcagccttactgactgagcgggaagaacgtcttcatgggctagaaatggagcgccggcgactgcacaaccagctgcaggaactcaagggcaacatccgtgtattctgccgggtccgccctgtcctgccgggggagcccactccaccccctggcctcctcctgtttccctctggccctggtgggccctctgatcctccaacccgccttagcctctcccggtctgacgagcggcgtgggaccctgagtggggcaccagctcccccaactcgccatgatttttcctttgaccgggtattcccaccaggaagtggacaggatgaagtgtttgaagagattgccatgcttgtccagtcagccctggatggctatccagtatgcatctttgcctatggccagacaggcagtggcaagaccttcacaatggagggtgggcctgggggagacccccagttggaggggctgatccctcgggccctgcggcacctcttctctgtggctcaggagctgagtggtcagggctggacctacagctttgtagcaagctacgtagagatctacaatgagactgtccgggacctgctggccactggaacccggaagggtcaagggggcgagtgtgagattcgccgtgcagggccagggagtgaggagctcactgtcaccaatgctcgatatgtccctgtctcctgtgagaaagaagtggacgccctgcttcatctggcccgccagaatcgggctgtggcccgcacagcccagaatgaacggtcatcacgcagccacagtgtattccagctacagatttctggggagcactccagccgaggcctgcagtgtggggcccccctcagtcttgtggacctggccgggagtgagcgacttgaccccggcttagccctcggccccggggagcgggaacgccttcgggaaacacaggccattaacagcagcctgtccacgctggggctggttatcatggccctgagcaacaaggagtcccacgtgccttaccggaacagcaaactgacctacctgctgcagaactctctgggtggtagtgctaagatgctcatgtttgtgaacatttctccactggaagagaacgtctccgagtccctcaactctctacgctttgcctccaaggtgaaccagtgtgttattggtactgctcaggccaacaggaagtgaagacggatccagatctgtgtgtgtgtgtgtgtgtgtgtgtgtgtgtgtgtgtgtgtgtgtgtgtccctatgtctatgtatcgggtgaggggtgggagggttgctggagggtgctttattgggtggagggcaccatgtcccagggctatcaaataaagaatagtttggttttttttttaaataaaggttttattagcatttgcccaagaaggcagatactttcatatctgtaaaa

SEQ ID NO: 146807 - DNA, 734 bp, Homo sapiens
  Payload ID: 9048
  Gene Symbol: KIFC1
  Gene Name: kinesin family member C1
  ENST ID: ENST00000411963
  CDS Start-End: 126-734
cggccggagccgtgcgagttctctaccctgcttcgcgagcgggcgagagaacgcgagtcccaggatccccggcacccagttctcttccactgcattcccccggcgcgtgtgggaccgaggtggacatggatccgcagaggtcccccctattggaagtaaaggggaacatagaactgaagagacctctgattaaggccccttcccagctgcctctctcaggaagcagactcaagaggaggcctgaccagatggaagatggcctggagcctgagaagaaacggacaagaggcctgggtgcaacgaccaaaattaccacatcccacccaagagttccatccctcactacagtgccacagacacaaggccagaccacaggcccttccagtcacccgttgccttggcaatgtcatcaccaaccttttttggtgacagacccagggggccgatcttgggggccagggcagaagtggcaccgacttcacctctggtgcacctcagctcaaaaagtttccaagaagacaggaccccggtgttccacagctattgccacagggttgaagaaccagaagccagttcctgctgttcctgtccagaagtctggcacatcaggtgttcctcccatggcaggagggaagaaacccagcaaacgtccagcctgggacttaaagggtcagttatgtgacctaaatgcagaactaaaacggtgccgtgagaggactcaaacgttggaccaa

SEQ ID NO: 146808 - DNA, 2706 bp, Homo sapiens; identical to SEQ ID NO: 146806
  Payload ID: 9048
  Gene Symbol: KIFC1
  Gene Name: kinesin family member C1
  Uniprot ID: Q9BW19
  ENST ID: ENST00000448818
  CDS Start-End: 451-2472

SEQ ID NO: 146809 - DNA, 734 bp, Homo sapiens
  Payload ID: 9048
  Gene Symbol: KIFC1
  Gene Name: kinesin family member C1
  ENST ID: ENST00000450504
  CDS Start-End: 126-734
cggccggagccgtgcgagttctctaccctgcttcgcgagcgggcgagagaacgcgagtcccaggatccccggcacccagttctcttccactgcattcccccggcgcgtgtgggaccgaggtggacatggatccgcagaggtcccccctattggaagtaaaggggaacatagaactgaagagacctctgattaaggccccttcccagctgcctctctcaggaagcagactcaagaggaggcctgaccagatggaagatggcctggagcctgagaagaaacggacaagaggcctgggtgcaacgaccaaaattaccacatcccacccaagagttccatccctcactacagtgccacagacacaaggccagaccacaggcccttccagtcacccgttgccttggcaatgtcatcaccaaccttttttggagacagacccagggggccgatcttgggggccagggcagaagtggcaccgacttcacctctggtgcacctcagctcaaaaagtttccaagaagacaggaccccggtgttccacagctattgccacagggttgaagaaccagaagccagttcctgctgttcctgtccagaagtctggcacatcaggtgttcctcccatggcaggagggaagaaacccagcaaacgtccagcctgggacttaaagggtcagttatgtgacctaaatgcagaactaaaacggtgccgtgagaggactcaaacgttggaccaa

SEQ ID NO: 146810 - DNA, 734 bp, Homo sapiens; identical to SEQ ID NO: 146809
  Payload ID: 9048
  Gene Symbol: KIFC1
  Gene Name: kinesin family member C1
  ENST ID: ENST00000426791
  CDS Start-End: 126-734

SEQ ID NO: 146811 - DNA, 631 bp, Homo sapiens
  Payload ID: 9048
  Gene Symbol: KIFC1
  Gene Name: kinesin family member C1
  ENST ID: ENST00000494554
  CDS Start-End: 1-464
gccagaatcgggctgtggcccgcacagcccagaatgaacggtcatcacgcagccacagtgtattccagctacagatttctggggagcactccagccgaggcctgcagtgtggggcccccctcagtcttgtggacctggccgggagtgagcgacttgaccccggcttagccctcggccccggggagcgggaacgccttcgggaaacacaggccattaacagcagcctgtccacgctggggctggttatcatggccctgagcaacaaggagtcccacgtgccttaccggaacagcaaactgacctacctgctgcagaactctctgggtggtagtgctaagatgctcatgtttgtgaacatttctccactggaagagaacgtctccgagtccctcaactctctacgctttgcctccaaggtgcgattaccacccgtcagccttgtcaggacccgtgggtggttgtaggcttctccattccaatcccttttgtcttctagggcagggagcacatttgtgcagaaaggttttgcaggtatctgaggcactgctcacctggttccatttttaattattagcttttgagttaagttttttaaaaaacgggtgattaatttaacctgagaaagctgatt

SEQ ID NO: 146812 - DNA, 3646 bp, Homo sapiens
  Payload ID: 9049
  Gene Symbol: KIFC2
  Gene Name: kinesin family member C2
  Uniprot ID: Q96AC6
  ENST ID: ENST00000301332
  CDS Start-End: 378-2894
ggggctgtagggagaggaaggagaaccccggcgtgttgaaggctccgcgaaaccggagcggtgggggactacgcggagggtgggagggattccgagaggagggtcgcgggagccgtgggcgctctcagcccggtgtccgcggtgtaggggttggggcgcgccgggcggcgccgtgagaaacggcgggtctccaggtgcggccgcgggcacctgtttctagtacccccgtccccgcgctcgccttccagccgtgggagccgggccgtgggggcggccgtcgcgagcatgcgcaccggcactgcggcgggcgggcgccgagtctgggcgcggggacgcggggcggcgcgaagcggggccctctgccgccccgcgctcccatgtacgccttttactcgttgctcatctacatcttctacagcctcttccgcagggatggtggcgccgcggcggccgcggagcccggggaccccgcccagagagcccgcaagccccggggtcgccggcgcccagacctgcccgcgccagagctgtggaccgagctgaccggcctggccgccagctccgagcctgaggatgggtcggaaggcgcagccgagggccgcgcggccgcggtgtccctggaagaggccctactgcgcctcgccgagttcctctccgtccagctgggggcggaagagagctgcgggggcccggcggacctgggccagtctggcgaggtcccctcactgttgacagtgaccagtcagctcttggcccttctggcatggcttcgaagccccagggggaggcaggccctgctccaggggactcagccagcccctcgggtccggcccccctctccagatggatccacatcccaagaagaaagcccttcccacttcaccgcagtcccaggcgagccactgggggatgagacccagggacagcagcccctccagttggaggaggatcagagggcgtggcagcggctggagcagctcatcctgggacagctggaggagctgaagcagcagctggaacagcaggaggaggagttgggtcgactgcgcctgggcgtgggggcgacggactcagagaaaagggttcagcatctgactctggagaacgaggccctgaagcagagcctgagtctcatgcgggacctcctgctgcactggggccccgggccccccatcagggctccgcaggaggaggcagaggcattgctagagctccagggccggcttcaggaggcccaagacaccacagaagccctccgagcccagctgggggtgcaggaggtgcagctgcagggccttcaaggggccctccagcagctccagcaggagacggagcagaactgcaggcgtgagctacagcagatgcatgggcagctggcaggacttcgggcacggatggccagcctgcgtcagggctgcggggacctccgaggtttggtcagcacctttacccagagctgtcagggttcgctgagtgaggcccggggccaggtgtcctgggccttgggggcactgtcatctggagggcctggcactcagctccctgaggggcagcaagggcccccagccggatgcccagggcggctgccagaactcaagggaaatatccgtgtgctgtgtcggctgaggccagggacatcttctagccttgtgagtgtggagcctggcccagggggcaccgtcaccacctgctaccgggggcgccatcgtcgattccgcctagactgggtcttccctccagacgccagccaggaggaggtcttcagagagctggaacctgcggtgctgtcctgcctccgaggctacagcgtctgcatcttcacctatggccagacaggcaccgggaagacctacagcatggagggccctcctgaggaccccggcatagttcctagggcgctgcagtcgctgttccgggagatgggggccggccggcagcaccgggtgacactcagcatggtggagatctacaatgaggctgtcagggacctccttgctccagggcctcccgagcgcctggccgtgaggcagggcccagaaggccagggcgggatccaggtggctggcctcacccactgggacgtgcccaacctggagacattgcaccagatgctgaaactggggaggagcaaccgggccaccgccgccaccgccatgaaccagcgcagctcccgctcgcatgccctggtcacgctgacgctgcgcgcggcgtctccaccgcgcgctccaggcaccgcaggcacgctgcacctggtggacctggcgggatccgaacgcgcacggaaggcaggggcggccggcccgccgcggggagacccagacggcgcccggcgcctgcgggaggcccagaccataaaccgctcgctgctggcgctaggaggcgtgatggccgcactgcgggcccaccggccgcacgtgcccttccgcgactcgcagctcacgcgactgctgcagccggcgctgggcccaggcaccaccgcggtgctgctgctgcaggtgggcgccggggcggggcaggtgtgtgcgtgccggtcgccgcccacccgggcccgcccacccgcgcctcttgcccgcagatctccacgcggccggaggatctcggggagacagtctgctccctcaagttcgccgaccgagtgggtcaagtggagctggggccagcccggcgccgcagggtcccgcgctcctccgggacgccttcttccctcagcaccgacactccgctcaccgggaccccctgcacccctacgccgtcccctggcagtcctccatgccccagtcccgacaacggctcgggctcggctctcgcgcccgcagagggcctgcccctctagtcctgggtcgcggccctgcccatggggtctcaggccaggtctctgctggcagaggcggtagtaaagtccctgtaccccgtctcccagggcacaagctccctagcctctttggatccattgcccctgagctcccagagtcacccctccacctccgcagccagtgaagtgtgttgtgcctgctgaagtgatcaccccccgcccccagccctgcatcaggccacaggtcttggctttctccttatcaccatttgctgttatcacggcacacagcagggaatcccaggcccccccgccaagtggttacccaagtcaccactcctgacccaaaaatcaggcatggcattaaaacgttgcaaattcctttactgttatcccccccaccaccaggaccatgtagggtgcagtctttactccctaacccgtttcccgaaaaaggtgctacctcctttccagacagatgagagagggcaggacttcaggctggatccaccactgggctctccctcccccagcctggagcacgggaggggaggtgacggctggtgactgatggatgggtagtgggctgagaagaggggactaggaagggctattccaggctcagccctgctcctgcagctttgccgctgagtgtaggaaaaacaggcatgacagaccagggtgagggttgtgcccagctgggccacggccatgcgtggggtggcccaataaacaccgtggactcccagcaaggctgctgcctggtgtttcgaggctgctgtggtcgcagacagccgcctcgccttggctccctgtcaacaaggtgggggtggg

SEQ ID NO: 146813 - DNA, 3427 bp, Homo sapiens
  Payload ID: 9050
  Gene Symbol: KIFC3
  Gene Name: kinesin family member C3
  Uniprot ID: Q9BVG8
  ENST ID: ENST00000379655
  CDS Start-End: 259-2760
gcgggcgcgcgccgccgccccccgccggggtcggagccggttgccatgggaacgcgccgcggcccgagttaatcatttcctgtggaaagtgtgcgggaggggcgcgagcgggctggccgaggaggaggcggcggcgtggagctgcctcctgccggcgggccgggccgggccgagccccgggcgctgcggcgacgcctggatcctgcctccgccaggccggctgcctggtgccccgaggaggctgctgagccccaggccatggtcccctctcgcaggacgtggaacctgggagccacgccctcgctgcggggcctgtggagagtgggccgggccccggagcccgagccggggatggctcgccccgccccagccccagccagcccggccgcccgccctttcccacacaccggcccggggaggttgagaactgggcgtggaaaagataccccagtctgcggtgacgaggactccagtgcccgaagtgcagctcgcccagccctagctcagtgccgagcccttagcgtggactgggctggccccggaagcccccacgggctctacctgaccctgcaggtagaacacctgaaggagaagctcattagccaggcccaggaagtgagccgactgcgatctgagctggggggcaccgacttggagaagcaccgggacctgctgatggtggagaatgagcgactgaggcaggagatgcggcgctgtgaggccgagctgcaagagctgcgcacaaagccagcaggtccctgcccaggttgtgagcacagccaggagagcgcccagctccgtgacaagctgtcccagctgcagctggagatggcggaaagcaaaggcatgctgtcagagctgaacctagaggtgcagcagaagaccgaccggctggctgaggtggagctgcgactcaaggactgcctggctgagaaggcacaggaggaggagcggcttagtcggcgcctgcgtgacagccacgagaccattgccagcctgcgggcccagtccccacctgtcaagtatgtcatcaagacagtggaggtggagtcgtccaagaccaagcaggccctcagcgagtcccaggcccggaaccagcacctgcaggagcaggtggctatgcagaggcaggtgctgaaggagatggaacagcagctgcagagctcacaccagctgaccgcgcggctccgggcgcagattgccatgtacgagtcagagctggagcgggcccatgggcagatgctggaggagatgcagtccctggaagaggacaagaaccgggccattgaggaggcctttgccagagcccaggtggagatgaaggctgtgcacgagaatctagcaggcgtccggaccaacttgctgaccttgcagccggcactgcggaccctcaccaacgactacaatgggctcaagcggcaggtgcgcggcttcccactgctgctgcaggaggccctcaggagtgtcaaggccgagataggccaggccatcgaggaggtcaacagcaacaaccaggagctgctgcgcaagtaccgccgcgagctgcagctgcgtaagaagtgccacaatgagctcgtgcggctgaaagggaacatccgagtgattgctcgtgtccggccagtcaccaaagaggatggggaaggacctgaggccaccaatgctgtgactttcgatgccgacgacgactccatcatccacctgctgcacaagggcaagcctgtgtccttcgagctggacaaggtcttctccccacaggcctcgcagcaggacgtgttccaggaggtgcaggccctggtcacctcttgcattgatggcttcaatgtctgcatctttgcgtacggccagacgggcgccggcaagacgtacacgatggaggggaccgctgagaacccaggtatcaaccagcgggccctgcagctgctcttctccgaggtgcaggagaaggcgtctgactgggagtacaccatcaccgtcagcgctgcggagatctacaatgaggtcctcagggacctgctagggaaagagcctcaggaaaaactggagatccggctgtgcccagacggcagtgggcagctgtatgtaccagggctgactgagttccaagtgcagagcgtggacgacatcaacaaggtgtttgagtttggccacactaatcgcacgaccgagttcaccaacctgaacgagcacagctcccgctcgcacgcgctgctcatcgtgacggtgcgaggcgtggactgcagcacaggcctccgcaccacggggaagctgaacctggtggacttggctggctcggagcgcgtgggcaagtcgggggccgagggcagccgcctgcgggaggcgcagcacatcaacaagtcgctgtcggctctgggggacgtcattgctgccctgcgctcccgccagggccacgtgcccttccgcaactccaagctcacctacctgctgcaggattcgcttagtggtgacagcaagaccctcatggtggtacaggtgtcccccgtggagaagaacactagcgagacgctctattccctcaagtttgctgagagggtgcgctctgtggagctggggcctgggctacgcagggcagagcttgggtcctggtcaagccaggagcatctagagtgggagccggcttgtcagacgccacagccctcggcacgggcccactcagcccccagctctgggaccagtagccgccctggatccatccggaggaagctgcagccctcggggaagtcgcggccactgcctgtgtgacggatgtgaccccgctgggcctgaagctgggccctcactggcctgtccctgctgcagcgccaggacccccggaggtagaggcgagagtggaggctcttcttctgccccgtctcccctcaaagatgagaaacatgttcagaaggaaacggtgtctctcggctgtggctctgagtgcaaattgcatgggcggaaaggcgggggtggctgctcttcctggcaggcctgggccatcagcgaactgggccccgtgaggagggcgggagtgtggaggagggtgggcctctcacccaggctttctcggcccctctcctcagcttgcagagctggccagccccctccttagggggtgggcgaggagcctctgggcagacccaagaaccatggggactggggtgggttggtggcaccaatggcagccctccccgcccctctccttcaaggagggttcccgcagctggggggtgtgcggaggcgcatggcctcccgccacggggccgtgctgtgtttatggctggcagaggcagccagcgggtgggggattctgctgctcgctcacctgcctggctcgctggtctctcgaattttcttccctctgaaatcctatttaagaacttttggaagcttagccatttttacttattaaaataaaagaagcctttttacacaa

SEQ ID NO: 146814 - DNA, 3128 bp, Homo sapiens
  Payload ID: 9050
  Gene Symbol: KIFC3
  Gene Name: kinesin family member C3
  Uniprot ID: Q9BVG8
  ENST ID: ENST00000421376
  CDS Start-End: 559-2622
agagatgagactgaggtttctcaccggttcctaagcccagtcagagctgtcaggtaattacagggtaaccgacagcccagagccaggcgggcgtggagccggagcgtcagtctcgccgggcgctccttccctgcgcccctgtctggaaaagaggagacctggaagccgggttaaactttaacacgggtcgggcacagagcagggggaatcagctgcattccctctggccaagctggtcagagctctgcgggctgccgtccttggccaagagcgtgtgggctagctccggtctctgcccaggctggtaaacaagggcgtggaaaagataccccagtctgcggtgacgaggactccagtgcccgaagtgcagctcgcccagccctagctcagtgccgagcccttagcgtggactgggctggccccggaagcccccacgggctctacctgaccctgcaggtagaacacctgaaggagaagctcattagccaggcccaggaagtgagccgactgcgatctgagctggggggcaccgacttggagaagcaccgggacctgctgatggtggagaatgagcgactgaggcaggagatgcggcgctgtgaggccgagctgcaagagctgcgcacaaagccagcaggtccctgcccaggttgtgagcacagccaggagagcgcccagctccgtgacaagctgtcccagctgcagctggagatggcggaaagcaaaggcatgctgtcagagctgaacctagaggtgcagcagaagaccgaccggctggctgaggtggagctgcgactcaaggactgcctggctgagaaggcacaggaggaggagcggcttagtcggcgcctgcgtgacagccacgagaccattgccagcctgcgggcccagtccccacctgtcaagtatgtcatcaagacagtggaggtggagtcgtccaagaccaagcaggccctcagcgagtcccaggcccggaaccagcacctgcaggagcaggtggctatgcagaggcaggtgctgaaggagatggaacagcagctgcagagctcacaccagctgaccgcgcggctccgggcgcagattgccatgtacgagtcagagctggagcgggcccatgggcagatgctggaggagatgcagtccctggaagaggacaagaaccgggccattgaggaggcctttgccagagcccaggtggagatgaaggctgtgcacgagaatctagcaggcgtccggaccaacttgctgaccttgcagccggcactgcggaccctcaccaacgactacaatgggctcaagcggcaggtgcgcggcttcccactgctgctgcaggaggccctcaggagtgtcaaggccgagataggccaggccatcgaggaggtcaacagcaacaaccaggagctgctgcgcaagtaccgccgcgagctgcagctgcgtaagaagtgccacaatgagctcgtgcggctgaaagggaacatccgagtgattgctcgtgtccggccagtcaccaaagaggatggggaaggacctgaggccaccaatgctgtgactttcgatgccgacgacgactccatcatccacctgctgcacaagggcaagcctgtgtccttcgagctggacaaggtcttctccccacaggcctcgcagcaggacgtgttccaggaggtgcaggccctggtcacctcttgcattgatggcttcaatgtctgcatctttgcgtacggccagacgggcgccggcaagacgtacacgatggaggggaccgctgagaacccaggtatcaaccagcgggccctgcagctgctcttctccgaggtgcaggagaaggcgtctgactgggagtacaccatcaccgtcagcgctgcggagatctacaatgaggtcctcagggacctgctagggaaagagcctcaggaaaaactggagatccggctgtgcccagacggcagtgggcagctgtatgtaccagggctgactgagttccaagtgcagagcgtggacgacatcaacaaggtgtttgagtttggccacactaatcgcacgaccgagttcaccaacctgaacgagcacagctcccgctcgcacgcgctgctcatcgtgacggtgcgaggcgtggactgcagcacaggcctccgcaccacggggaagctgaacctggtggacttggctggctcggagcgcgtgggcaagtcgggggccgagggcagccgcctgcgggaggcgcagcacatcaacaagtcgctgtcggctctgggggacgtcattgctgccctgcgctcccgccagggccacgtgcccttccgcaactccaagctcacctacctgctgcaggattcgcttagtggtgacagcaagaccctcatggtggtacaggtgtcccccgtggagaagaacactagcgagacgctctattccctcaagtttgctgagagggtgcgctctgtggagctggggcctgggctacgcagggcagagcttgggtcctggtcaagccaggagcatctagagtgggagccggcttgtcagacgccacagccctcggcacgggcccactcagcccccagctctgggaccagtagccgccctggatccatccggaggaagctgcagccctcggcctgacggctggggctgcagagtctctagggaagtcgcggccactgcctgtgtgacggatgtgaccccgctgggcctgaagctgggccctcactggcctgtccctgctgcagcgccaggacccccggaggtagaggcgagagtggaggctcttcttctgccccgtctcccctcaaagatgagaaacatgttcagaaggaaacggtgtctctcggctgtggctctgagtgcaaattgcatgggcggaaaggcgggggtggctgctcttcctggcaggcctgggccatcagcgaactgggccccgtgaggagggcgggagtgtggaggagggtgggcctctcacccaggctttctcggcccctctcctcagcttgcagagctggccagccccctccttagggggtgggcgaggagcctctgggcagacccaagaaccatggggactggggtgggttggtggcaccaatggcagccctccccgcccctctccttcaaggagggttcccgcagct

SEQ ID NO: 146815 - DNA, 3379 bp, Homo sapiens
  Payload ID: 9050
  Gene Symbol: KIFC3
  Gene Name: kinesin family member C3
  Uniprot ID: Q9BVG8
  ENST ID: ENST00000445690
  CDS Start-End: 184-2664
tttcctgtggaaagtgtgcgggaggggcgcgagcgggctggccgaggaggaggcggcggcgtggagctgcctcctgccggcgggccgggccgggccgagccccgggcgctgcggcgacgcctggatcctgcctccgccaggccggctgcctggtgccccgaggaggctgctgagccccaggccatggtcccctctcgcaggacgtggaacctgggagccacgccctcgctgcggggcctgtggagagtgggccgggccccggagcccgagccggggatggctcgccccgccccagccccagccagcccggccgcccgccctttcccacacaccggcccggggaggttgagaactgggcgtggaaaagataccccagtctgcggtgacgaggactccagtgcccgaagtgcagctcgcccagccctagctcagtgccgagcccttagcgtggactgggctggccccggaagcccccacgggctctacctgaccctgcaggtagaacacctgaaggagaagctcattagccaggcccaggaagtgagccgactgcgatctgagctggggggcaccgacttggagaagcaccgggacctgctgatggtggagaatgagcgactgaggcaggagatgcggcgctgtgaggccgagctgcaagagctgcgcacaaagccagcaggtccctgcccaggttgtgagcacagccaggagagcgcccagctccgtgacaagctgtcccagctgcagctggagatggcggaaagcaaaggcatgctgtcagagctgaacctagaggtgcagcagaagaccgaccggctggctgaggtggagctgcgactcaaggactgcctggctgagaaggcacaggaggaggagcggcttagtcggcgcctgcgtgacagccacgagaccattgccagcctgcgggcccagtccccacctgtcaagtatgtcatcaagacagtggaggtggagtcgtccaagaccaagcaggccctcagcgagtcccaggcccggaaccagcacctgcaggagcaggtggctatgcagaggcaggtgctgaaggagatggaacagcagctgcagagctcacaccagctgaccgcgcggctccgggcgcagattgccatgtacgagtcagagctggagcgggcccatgggcagatgctggaggagatgcagtccctggaagaggacaagaaccgggccattgaggaggcctttgccagagcccaggtggagatgaaggctgtgcacgagaatctagcaggcgtccggaccaacttgctgaccttgcagccggcactgcggaccctcaccaacgactacaatgggctcaagcggcaggtgcgcggcttcccactgctgctgcaggaggccctcaggagtgtcaaggccgagataggccaggccatcgaggaggtcaacagcaacaaccaggagctgctgcgcaagtaccgccgcgagctgcagctgcgtaagaagtgccacaatgagctcgtgcggctgaaagggaacatccgagtgattgctcgtgtccggccagtcaccaaagaggatggggaaggacctgaggccaccaatgctgtgactttcgatgccgacgacgactccatcatccacctgctgcacaagggcaagcctgtgtccttcgagctggacaaggtcttctccccacaggcctcgcagcaggacgtgttccaggaggtgcaggccctggtcacctcttgcattgatggcttcaatgtctgcatctttgcgtacggccagacgggcgccggcaagacgtacacgatggaggggaccgctgagaacccaggtatcaaccagcgggccctgcagctgctcttctccgaggtgcaggagaaggcgtctgactgggagtacaccatcaccgtcagcgctgcggagatctacaatgaggtcctcagggacctgctagggaaagagcctcaggaaaaactggagatccggctgtgcccagacggcagtgggcagctgtatgtaccagggctgactgagttccaagtgcagagcgtggacgacatcaacaaggtgtttgagtttggccacactaatcgcacgaccgagttcaccaacctgaacgagcacagctcccgctcgcacgcgctgctcatcgtgacggtgcgaggcgtggactgcagcacaggcctccgcaccacggggaagctgaacctggtggacttggctggctcggagcgcgtgggcaagtcgggggccgagggcagccgcctgcgggaggcgcagcacatcaacaagtcgctgtcggctctgggggacgtcattgctgccctgcgctcccgccagggccacgtgcccttccgcaactccaagctcacctacctgctgcaggattcgcttagtggtgacagcaagaccctcatggtggtacaggtgtcccccgtggagaagaacactagcgagacgctctattccctcaagtttgctgagagggtgcgctctgtggagctggggcctgggctacgcagggcagagcttgggtcctggtcaagccaggagcatctagagtgggagccggcttgtcagacgccacagccctcggcacgggcccactcagcccccagctctgggaccagtagccgccctggatccatccggaggaagctgcagccctcggcctgacggctggggctgcagagtctctagggaagtcgcggccactgcctgtgtgacggatgtgaccccgctgggcctgaagctgggccctcactggcctgtccctgctgcagcgccaggacccccggaggtagaggcgagagtggaggctcttcttctgccccgtctcccctcaaagatgagaaacatgttcagaaggaaacggtgtctctcggctgtggctctgagtgcaaattgcatgggcggaaaggcgggggtggctgctcttcctggcaggcctgggccatcagcgaactgggccccgtgaggagggcgggagtgtggaggagggtgggcctctcacccaggctttctcggcccctctcctcagcttgcagagctggccagccccctccttagggggtgggcgaggagcctctgggcagacccaagaaccatggggactggggtgggttggtggcaccaatggcagccctccccgcccctctccttcaaggagggttcccgcagctggggggtgtgcggaggcgcatggcctcccgccacggggccgtgctgtgtttatggctggcagaggcagccagcgggtgggggattctgctgctcgctcacctgcctggctcgctggtctctcgaattttcttccctctgaaatcctatttaagaacttttggaagcttagccatttttacttattaaaataaaagaagcctttttacac

SEQ ID NO: 146816 - DNA, 2781 bp, Homo sapiens
  Payload ID: 9050
  Gene Symbol: KIFC3
  Gene Name: kinesin family member C3
  ENST ID: ENST00000540079
  CDS Start-End: 132-2306
aaggacagaacagaaccctgggccgcaggcaggtggctggtgggtatcccgcctcccacccccagcaaacactggcaaaccccactctccctgcatcagggtctgagtgcctggcaggggcggcagtggagatgatcaaggtagaacacctgaaggagaagctcattagccaggcccaggaagtgagccgactgcgatctgagctggggggcaccgacttggagaagcaccgggacctgctgatggtggagaatgagcgactgaggcaggagatgcggcgctgtgaggccgagctgcaagagctgcgcacaaagccagcaggtccctgcccaggttgtgagcacagccaggagagcgcccagctccgtgacaagctgtcccagctgcagctggagatggcggaaagcaaaggcatgctgtcagagctgaacctagaggtgcagcagaagaccgaccggctggctgaggtggagctgcgactcaaggactgcctggctgagaaggcacaggaggaggagcggcttagtcggcgcctgcgtgacagccacgagaccattgccagcctgcgggcccagtccccacctgtcaagtatgtcatcaagacagtggaggtggagtcgtccaagaccaagcaggccctcagcgagtcccaggcccggaaccagcacctgcaggagcaggtggctatgcagaggcaggtgctgaaggagatggaacagcagctgcagagctcacaccagctgaccgcgcggctccgggcgcagattgccatgtacgagtcagagctggagcgggcccatgggcagatgctggaggagatgcagtccctggaagaggacaagaaccgggccattgaggaggcctttgccagagcccaggtggagatgaaggctgtgcacgagaatctagcaggcgtccggaccaacttgctgaccttgcagccggcactgcggaccctcaccaacgactacaatgggctcaagcggcaggtgcgcggcttcccactgctgctgcaggaggccctcaggagtgtcaaggccgagataggccaggccatcgaggaggtcaacagcaacaaccaggagctgctgcgcaagtaccgccgcgagctgcagctgcgtaagaagtgccacaatgagctcgtgcggctgaaagggaacatccgagtgattgctcgtgtccggccagtcaccaaagaggatggggaaggacctgaggccaccaatgctgtgactttcgatgccgacgacgactccatcatccacctgctgcacaagggcaagcctgtgtccttcgagctggacaaggtcttctccccacaggcctcgcagcaggacgtgttccaggaggtgcaggccctggtcacctcttgcattgatggcttcaatgtctgcatctttgcgtacggccagacgggcgccggcaagacgtacacgatggaggggaccgctgagaacccaggtatcaaccagcgggccctgcagctgctcttctccgaggtgcaggagaaggcgtctgactgggagtacaccatcaccgtcagcgctgcggagatctacaatgaggtcctcagggacctgctagggaaagagcctcaggaaaaactggagatccggctgtgcccagacggcagtgggcagctgtatgtaccagggctgactgagttccaagtgcagagcgtggacgacatcaacaaggtgtttgagtttggccacactaatcgcacgaccgagttcaccaacctgaacgagcacagctcccgctcgcacgcgctgctcatcgtgacggtgcgaggcgtggactgcagcacaggcctccgcaccacggggaagctgaacctggtggacttggctggctcggagcgcgtgggcaagtcgggggccgagggcagccgcctgcgggaggcgcagcacatcaacaagtcgctgtcggctctgggggacgtcattgctgccctgcgctcccgccagggccacgtgcccttccgcaactccaagctcacctacctgctgcaggattcgcttagtggtgacagcaagaccctcatggtggtacaggtgtcccccgtggagaagaacactagcgagacgctctattccctcaagtttgctgagagggtgcgctctgtggagctggggcctgggctacgcagggcagagcttgggtcctggtcaagccaggagcatctagagtgggagccggcttgtcagacgccacagccctcggcacgggcccactcagcccccagctctgggaccagtagccgccctggatccatccggaggaagctgcagccctcggcctgacggctggggctgcagagtctctagggaagtcgcggccactgcctgtgtgacggatgtgaccccgctgggcctgaagctgggccctcactggcctgtccctgctgcagcgccaggacccccggaggtagaggcgagagtggaggctcttcttctgccccgtctcccctcaaagatgagaaacatgttcagaaggaaacggtgtctctcggctgtggctctgagtgcaaattgcatgggcggaaaggcgggggtggctgctcttcctggcaggcctgggccatcagcgaactgggccccgtgaggagggcgggagtgtggaggagggtgggcctctcacccaggctttctcggcccctctcctcagcttgcagagctggccagccccctccttagggggtgggcgaggagcctctgggcagacccaagaaccatggggactggggtgggttggtggcaccaatggcagccctccccg

SEQ ID NO: 146817 - DNA, 3047 bp, Homo sapiens
  Payload ID: 9050
  Gene Symbol: KIFC3
  Gene Name: kinesin family member C3
  Uniprot ID: Q9BVG8
  ENST ID: ENST00000541240
  CDS Start-End: 12-2558
agtgtgagtgcatgtgcgccagcgcgtgcaaggacacggctgcctggtgccccgaggaggctgctgagccccaggccatggtcccctctcgcaggacgtggaacctgggagccacgccctcgctgcggggcctgtggagagtgggccgggccccggagcccgagccggggatggctcgccccgccccagccccagccagcccggccgcccgccctttcccacacaccggcccggggaggttgagaactgggcgtggaaaagataccccagtctgcggtgacgaggactccagtgcccgaagtgcagctcgcccagccctagctcagtgccgagcccttagcgtggactgggctggccccggaagcccccacgggctctacctgaccctgcaggtagaacacctgaaggagaagctcattagccaggcccaggaagtgagccgactgcgatctgagctggggggcaccgacttggagaagcaccgggacctgctgatggtggagaatgagcgactgaggcaggagatgcggcgctgtgaggccgagctgcaagagctgcgcacaaagccagcaggtccctgcccaggttgtgagcacagccaggagagcgcccagctccgtgacaagctgtcccagctgcagctggagatggcggaaagcaaaggcatgctgtcagagctgaacctagaggtgcagcagaagaccgaccggctggctgaggtggagctgcgactcaaggactgcctggctgagaaggcacaggaggaggagcggcttagtcggcgcctgcgtgacagccacgagaccattgccagcctgcgggcccagtccccacctgtcaagtatgtcatcaagacagtggaggtggagtcgtccaagaccaagcaggccctcagcgagtcccaggcccggaaccagcacctgcaggagcaggtggctatgcagaggcaggtgctgaaggagatggaacagcagctgcagagctcacaccagctgaccgcgcggctccgggcgcagattgccatgtacgagtcagagctggagcgggcccatgggcagatgctggaggagatgcagtccctggaagaggacaagaaccgggccattgaggaggcctttgccagagcccaggtggagatgaaggctgtgcacgagaatctagcaggcgtccggaccaacttgctgaccttgcagccggcactgcggaccctcaccaacgactacaatgggctcaagcggcaggtgcgcggcttcccactgctgctgcaggaggccctcaggagtgtcaaggccgagataggccaggccatcgaggaggtcaacagcaacaaccaggagctgctgcgcaagtaccgccgcgagctgcagctgcgtaagaagtgccacaatgagctcgtgcggctgaaagggaacatccgagtgattgctcgtgtccggccagtcaccaaagaggatggggaaggacctgaggccaccaatgctgtgactttcgatgccgacgacgactccatcatccacctgctgcacaagggcaagcctgtgtccttcgagctggacaaggtcttctccccacaggcctcgcagcaggacgtgttccaggaggtgcaggccctggtcacctcttgcattgatggcttcaatgtctgcatctttgcgtacggccagacgggcgccggcaagacgtacacgatggaggggaccgctgagaacccaggtatcaaccagcgggccctgcagctgctcttctccgaggtgcaggagaaggcgtctgactgggagtacaccatcaccgtcagcgctgcggagatctacaatgaggtcctcagggacctgctagggaaagagcctcaggaaaaactggagatccggctgtgcccagacggcagtgggcagctgtatgtaccagggctgactgagttccaagtgcagagcgtggacgacatcaacaaggtgtttgagtttggccacactaatcgcacgaccgagttcaccaacctgaacgagcacagctcccgctcgcacgcgctgctcatcgtgacggtgcgaggcgtggactgcagcacaggcctccgcaccacggggaagctgaacctggtggacttggctggctcggagcgcgtgggcaagtcgggggccgagggcagccgcctgcgggaggcgcagcacatcaacaagtcgctgtcggctctgggggacgtcattgctgccctgcgctcccgccagggccacgtgcccttccgcaactccaagctcacctacctgctgcaggattcgcttagtggtgacagcaagaccctcatggtggtacaggtgtcccccgtggagaagaacactagcgagacgctctattccctcaagtttgctgagagggtgcgctctgtggagctggggcctgggctacgcagggcagagcttgggtcctggtcaagccaggagcatctagagtgggagccggcttgtcagacgccacagccctcggcacgggcccactcagcccccagctctgggaccagtagccgccctggatccatccggaggaagctgcagccctcggcctgacggctggggctgcagagtctctagggaagtcgcggccactgcctgtgtgacggatgtgaccccgctgggcctgaagctgggccctcactggcctgtccctgctgcagcgccaggacccccggaggtagaggcgagagtggaggctcttcttctgccccgtctcccctcaaagatgagaaacatgttcagaaggaaacggtgtctctcggctgtggctctgagtgcaaattgcatgggcggaaaggcgggggtggctgctcttcctggcaggcctgggccatcagcgaactgggccccgtgaggagggcgggagtgtggaggagggtgggcctctcacccaggctttctcggcccctctcctcagcttgcagagctggccagccccctccttagggggtgggcgaggagcctctgggcagacccaagaaccatggggactggggtgggttggtggcaccaatggcagccctccccgcccctctccttcaa

SEQ ID NO: 146818 - DNA, 3018 bp, Homo sapiens
  Payload ID: 9050
  Gene Symbol: KIFC3
  Gene Name: kinesin family member C3
  ENST ID: ENST00000543930
  CDS Start-End: 562-2616
agctgggcagctgtaggaagtcacttcctctctgagccttcacttcccagtctctaaactggggctcacaaatgtcgcattgcagtttgggggtggatctgttgtaagaatggacagaaaaaagatggtcaactgtaatgtgtggtgcatcgtgagctgtcactcccgtgtgccctggtctcctgctggcctcactgtggtttgactcagacttggactttcctggaattctgaactttgcctctctaagcaaagcccgccagggggtacactctgccttgttttccatggtgccgtgtttccagccctatccaccactggcttctgatcggctgctttctcacactgctgttcctgcaaggctgtgtggccccatggttaagggtgagggttctgcaagggtcagccagatgcgagttccggtcctaggtccaccacttactggtcaggtgacctcaagtagaacacctgaaggagaagctcattagccaggcccaggaagtgagccgactgcgatctgagctggggggcaccgacttggagaagcaccgggacctgctgatggtggagaatgagcgactgaggcaggagatgcggcgctgtgaggccgagctgcaagagctgcgcacaaagccagcaggtccctgcccaggttgtgagcacagccaggagagcgcccagctccgtgacaagctgtcccagctgcagctggagatggcggaaagcaaaggcatgctgtcagagctgaacctagaggtgcagcagaagaccgaccggctggctgaggtggagctgcgactcaaggactgcctggctgagaaggcacaggaggaggagcggcttagtcggcgcctgcgtgacagccacgagaccattgccagcctgcgggcccagtccccacctgtcaagtatgtcatcaagacagtggaggtggagtcgtccaagaccaagcaggccctcagcgagtcccaggcccggaaccagcacctgcaggagcaggtggctatgcagaggcaggtgctgaaggagatggaacagcagctgcagagctcacaccagctgaccgcgcggctccgggcgcagattgccatgtacgagtcagagctggagcgggcccatgggcagatgctggaggagatgcagtccctggaagaggacaagaaccgggccattgaggaggcctttgccagagcccaggtggagatgaaggctgtgcacgagaatctagcaggcgtccggaccaacttgctgaccttgcagccggcactgcggaccctcaccaacgactacaatgggctcaagcggcaggtgcgcggcttcccactgctgctgcaggaggccctcaggagtgtcaaggccgagataggccaggccatcgaggaggtcaacagcaacaaccaggagctgctgcgcaagtaccgccgcgagctgcagctgcgtaagaagtgccacaatgagctcgtgcggctgaaagggaacatccgagtgattgctcgtgtccggccagtcaccaaagaggatggggaaggacctgaggccaccaatgctgtgactttcgatgccgacgacgactccatcatccacctgctgcacaagggcaagcctgtgtccttcgagctggacaaggtcttctccccacaggcctcgcagcaggacgaggtgcaggccctggtcacctcttgcattgatggcttcaatgtctgcatctttgcgtacggccagacgggcgccggcaagacgtacacgatggaggggaccgctgagaacccaggtatcaaccagcgggccctgcagctgctcttctccgaggtgcaggagaaggcgtctgactgggagtacaccatcaccgtcagcgctgcggagatctacaatgaggtcctcagggacctgctagggaaagagcctcaggaaaaactggagatccggctgtgcccagacggcagtgggcagctgtatgtaccagggctgactgagttccaagtgcagagcgtggacgacatcaacaaggtgtttgagtttggccacactaatcgcacgaccgagttcaccaacctgaacgagcacagctcccgctcgcacgcgctgctcatcgtgacggtgcgaggcgtggactgcagcacaggcctccgcaccacggggaagctgaacctggtggacttggctggctcggagcgcgtgggcaagtcgggggccgagggcagccgcctgcgggaggcgcagcacatcaacaagtcgctgtcggctctgggggacgtcattgctgccctgcgctcccgccagggccacgtgcccttccgcaactccaagctcacctacctgctgcaggattcgcttagtggtgacagcaagaccctcatggtggtacaggtgtcccccgtggagaagaacactagcgagacgctctattccctcaagtttgctgagagggtgcgctctgtggagctggggcctgggctacgcagggcagagcttgggtcctggtcaagccaggagcatctagagtgggagccggcttgtcagacgccacagccctcggcacgggcccactcagcccccagctctgggaccagtagccgccctggatccatccggaggaagctgcagccctcggcctgacggctggggctgcagagtctctagggaagtcgcggccactgcctgtgtgacggatgtgaccccgctgggcctgaagctgggccctcactggcctgtccctgctgcagcgccaggacccccggaggtagaggcgagagtggaggctcttcttctgccccgtctcccctcaaagatgagaaacatgttcagaaggaaacggtgtctctcggctgtggctctgagtgcaaattgcatgggcggaaaggcgggggtggctgctcttcctggcaggcctgggccatcagcgaactgggccccgtgaggagggcgggagtgtggaggagggtgggcctctcacccaggctttctcggcccctctcctcagcttgcagagctggccagccccctccttagggggtgggc

SEQ ID NO: 146819 - DNA, 551 bp, Homo sapiens
  Payload ID: 9050
  Gene Symbol: KIFC3
  Gene Name: kinesin family member C3
  ENST ID: ENST00000562984
  CDS Start-End: 374-551
ctcttctgaggctctaggtgccccagtagcagggccttctgcagcaaggccgggaactgctgcaccattgataccagagatgagactgaggtttctcaccggttcctaagcccagtcagagctgtcagggcgtggaaaagataccccagtctgcggtgacgaggactccagtgcccgaagtgcagctcgcccagccctagctcagtgccgagcccttagcgtggactgggctggccccggaagcccccacgggctctacctgaccctgcaggtagaacacctgaaggagaagctcattagccaggcccaggaagtgagccgactgcgatctgagctggggggcaccgacttggagaagcaccgggacctgctgatggtggagaatgagcgactgaggcaggagatgcggcgctgtgaggccgagctgcaagagctgcgcacaaagccagcaggtccctgcccaggttgtgagcacagccaggagagcgcccagctccgtgacaagctgtcccagctgcagctggagatggcggaaagcaaaggcatgctgt

SEQ ID NO: 146820 - DNA, 737 bp, Homo sapiens
  Payload ID: 9050
  Gene Symbol: KIFC3
  Gene Name: kinesin family member C3
  ENST ID: ENST00000562503
  CDS Start-End: 235-737
acacaccggcccggggaggttgagaactgggcgtggaaaagataccccagtctgcggtgacgaggactccagtgcccgaagtgcagctcgcccagccctagctcagtgccgagcccttagcgtggactgggctggccccggaagcccccacgggctctacctgaccctgcaggtgggcgtctctttggcagcaggaggtgctcgagcttgtcggggccaccaggtgcggcccccatggtgcttaggatggtggaggccatgtcccagctccaggacgagaagacccagctacaggaggagctggtggtcctacaggagaggctggccctccgcgacagtgaccagcaggccacgtccacccagctgcagaaccaggtagaacacctgaaggagaagctcattagccaggcccaggaagtgagccgactgcgatctgagctggggggcaccgacttggagaagcaccgggacctgctgatggtggagaatgagcgactgaggcaggagatgcggcgctgtgaggccgagctgcaagagctgcgcacaaagccagcaggtccctgcccaggttgtgagcacagccaggagagcgcccagctccgtgacaagctgtcccagctgcagctggagatggcggaaagcaaaggcatgctgtcagagctgaacctagaggtgcagcagaagaccgaccggctggctgaggtggagctgcgactcaaggactgcctggctgagaa

SEQ ID NO: 146821 - DNA, 777 bp, Homo sapiens
  Payload ID: 9050
  Gene Symbol: KIFC3
  Gene Name: kinesin family member C3
  ENST ID: ENST00000562311
  CDS Start-End: 568-777
gggaggggcgcgagcgggctggccgaggaggaggcggcggcgtggagctgcctcctgccggcgggccgggccgggccgagccccgggcgctgcggcgacgcctggatcctgcctccgccaggccgataccagagatgagactgaggtttctcaccggttcctaagcccagtcagagctgtcagggcgtggaaaagataccccagtctgcggtgacgaggactccagtgcccgaagtgcagctcgcccagccctagctcagtgccgagcccttagcgtggactgggctggccccggaagcccccacgggctctacctgaccctgcagcaggccctgcaggacaaggggtgcaagagccagagtcaggggacgaaagaagagaagctttggaagagacaggcgccggcccccaggcgggcccgggaggcccgggaagctggtggcaccatgaatgtagagaatacaggtagaacacctgaaggagaagctcattagccaggcccaggaagtgagccgactgcgatctgagctggggggcaccgacttggagaagcaccgggacctgctgatggtggagaatgagcgactgaggcaggagatgcggcgctgtgaggccgagctgcaagagctgcgcacaaagccagcaggtccctgcccaggttgtgagcacagccaggagagcgcccagctccgtgacaagctgtcccagctgcagctggagatggcggaaagcaaaggcatgctgtcagagctgaacctagaggtgcagcagaagacc

SEQ ID NO: 146822 - DNA, 577 bp, Homo sapiens
  Payload ID: 9050
  Gene Symbol: KIFC3
  Gene Name: kinesin family member C3
  ENST ID: ENST00000561524
  CDS Start-End: 314-577
gaatcagctgcattccctctggccaagctggtcagagctctgcgggctgccgtccttggccaagagcgtgtgggctagctccggtctctgcccaggctggtaaacaagggcgtggaaaagataccccagtctgcggtgacgaggactccagtgcccgaagtgcagctcgcccagccctagctcagtgccgagcccttagcgtggactgggctggccccggaagcccccacgggctctacctgaccctgcaggtgggcgtctctttggcagcaggaggtgctcgagcttgtcggggccaccaggtgcggcccccatggtgcttaggatggtggaggccatgtcccagctccaggacgagaagacccagctacaggaggagctggtggtcctacaggagaggctggccctccgcgacagtgaccagcaggccacgtccacccagctgcagaaccaggtagaacacctgaaggagaagctcattagccaggcccaggaagtgagccgactgcgatctgagctggggggcaccgacttggagaagcaccgggacctgctgatggtggagaatgagcgactg

SEQ ID NO: 146823 - DNA, 297 bp, Homo sapiens
  Payload ID: 9050
  Gene Symbol: KIFC3
  Gene Name: kinesin family member C3
  ENST ID: ENST00000565351
  CDS Start-End: 283-297
tgatgaaacctcttttctttataaattacccagtctcaggtatttctttatagcagtgtgaaaactgactaatacaccatccatctccagaactcttttcatcttctgctactgaaatttgggcctcattaaagagtaactcctcattcgccatctgtctccgtgggtttgactgctcatgtagaacacctgaaggagaagctcattagccaggcccaggaagtgagccgactgcgatctgagctggggggcaccgacttggagaagcaccgggacctgctgatggtggagaatgag

SEQ ID NO: 146824 - DNA, 3225 bp, Homo sapiens
  Payload ID: 9050
  Gene Symbol: KIFC3
  Gene Name: kinesin family member C3
  Uniprot ID: Q9BVG8
  ENST ID: ENST00000465878
  CDS Start-End: 445-2508
gccgtccttggccaagagcgtgtgggctagctccggtctctgcccaggctggtaaacaagggcgtggaaaagataccccagtctgcggtgacgaggactccagtgcccgaagtgcagctcgcccagccctagctcagtgccgagcccttagcgtggactgggctggccccggaagcccccacgggctctacctgaccctgcagcaggccctgcaggacaaggggtgcaagagccagagtcaggggacgaaagaagagaagctttggaagagacaggcgccggcccccaggcgggcccgggaggcccgggaagctggtggcaccatgaatgtagagaatacaggtagaacacctgaaggagaagctcattagccaggcccaggaagtgagccgactgcgatctgagctggggggcaccgacttggagaagcaccgggacctgctgatggtggagaatgagcgactgaggcaggagatgcggcgctgtgaggccgagctgcaagagctgcgcacaaagccagcaggtccctgcccaggttgtgagcacagccaggagagcgcccagctccgtgacaagctgtcccagctgcagctggagatggcggaaagcaaaggcatgctgtcagagctgaacctagaggtgcagcagaagaccgaccggctggctgaggtggagctgcgactcaaggactgcctggctgagaaggcacaggaggaggagcggcttagtcggcgcctgcgtgacagccacgagaccattgccagcctgcgggcccagtccccacctgtcaagtatgtcatcaagacagtggaggtggagtcgtccaagaccaagcaggccctcagcgagtcccaggcccggaaccagcacctgcaggagcaggtggctatgcagaggcaggtgctgaaggagatggaacagcagctgcagagctcacaccagctgaccgcgcggctccgggcgcagattgccatgtacgagtcagagctggagcgggcccatgggcagatgctggaggagatgcagtccctggaagaggacaagaaccgggccattgaggaggcctttgccagagcccaggtggagatgaaggctgtgcacgagaatctagcaggcgtccggaccaacttgctgaccttgcagccggcactgcggaccctcaccaacgactacaatgggctcaagcggcaggtgcgcggcttcccactgctgctgcaggaggccctcaggagtgtcaaggccgagataggccaggccatcgaggaggtcaacagcaacaaccaggagctgctgcgcaagtaccgccgcgagctgcagctgcgtaagaagtgccacaatgagctcgtgcggctgaaagggaacatccgagtgattgctcgtgtccggccagtcaccaaagaggatggggaaggacctgaggccaccaatgctgtgactttcgatgccgacgacgactccatcatccacctgctgcacaagggcaagcctgtgtccttcgagctggacaaggtcttctccccacaggcctcgcagcaggacgtgttccaggaggtgcaggccctggtcacctcttgcattgatggcttcaatgtctgcatctttgcgtacggccagacgggcgccggcaagacgtacacgatggaggggaccgctgagaacccaggtatcaaccagcgggccctgcagctgctcttctccgaggtgcaggagaaggcgtctgactgggagtacaccatcaccgtcagcgctgcggagatctacaatgaggtcctcagggacctgctagggaaagagcctcaggaaaaactggagatccggctgtgcccagacggcagtgggcagctgtatgtaccagggctgactgagttccaagtgcagagcgtggacgacatcaacaaggtgtttgagtttggccacactaatcgcacgaccgagttcaccaacctgaacgagcacagctcccgctcgcacgcgctgctcatcgtgacggtgcgaggcgtggactgcagcacaggcctccgcaccacggggaagctgaacctggtggacttggctggctcggagcgcgtgggcaagtcgggggccgagggcagccgcctgcgggaggcgcagcacatcaacaagtcgctgtcggctctgggggacgtcattgctgccctgcgctcccgccagggccacgtgcccttccgcaactccaagctcacctacctgctgcaggattcgcttagtggtgacagcaagaccctcatggtggtacaggtgtcccccgtggagaagaacactagcgagacgctctattccctcaagtttgctgagagggtgcgctctgtggagctggggcctgggctacgcagggcagagcttgggtcctggtcaagccaggagcatctagagtgggagccggcttgtcagacgccacagccctcggcacgggcccactcagcccccagctctgggaccagtagccgccctggatccatccggaggaagctgcagccctcggcctgacggctggggctgcagagtctctagggaagtcgcggccactgcctgtgtgacggatgtgaccccgctgggcctgaagctgggccctcactggcctgtccctgctgcagcgccaggacccccggaggtagaggcgagagtggaggctcttcttctgccccgtctcccctcaaagatgagaaacatgttcagaaggaaacggtgtctctcggctgtggctctgagtgcaaattgcatgggcggaaaggcgggggtggctgctcttcctggcaggcctgggccatcagcgaactgggccccgtgaggagggcgggagtgtggaggagggtgggcctctcacccaggctttctcggcccctctcctcagcttgcagagctggccagccccctccttagggggtgggcgaggagcctctgggcagacccaagaaccatggggactggggtgggttggtggcaccaatggcagccctccccgcccctctccttcaaggagggttcccgcagctggggggtgtgcggaggcgcatggcctcccgccacggggccgtgctgtgtttatggctggcagaggcagccagcgggtgggggattctgctgctcgctcacctgcctggctcgctggtctctcgaattttcttccctctgaaatcctatttaagaacttttggaagcttagccatttttacttattaaaataaaagaagcctttttacacaa

SEQ ID NO: 146825 - DNA, 424 bp, Homo sapiens
  Payload ID: 9050
  Gene Symbol: KIFC3
  Gene Name: kinesin family member C3
  ENST ID: ENST00000564891
  CDS Start-End: 110-424
ctcttctgaggctctaggtgccccagtagcagggccttctgcagcaaggccgggaactgctgcaccattggctgcctggtgccccgaggaggctgctgagccccaggccatggtcccctctcgcaggacgtggaacctgggagccacgccctcgctgcggggcctgtggagagtgggccgggccccggagcccgagccggggatggctcgccccgccccagccccagccagcccggccgcccgccctttcccacacaccggcccggggaggttgagaactgggcgtggaaaagataccccagtctgcggtgacgaggactccagtgcccgaagtgcagctcgcccagccctagctcagtgccgagcccttagcgtggactgggctggccccggaagcccccacgggctctacctgaccctgcag

SEQ ID NO: 146826 - DNA, 623 bp, Homo sapiens
  Payload ID: 9050
  Gene Symbol: KIFC3
  Gene Name: kinesin family member C3
  ENST ID: ENST00000565684
  CDS Start-End: 227-623
cagcgccttccaggcatctccgcccaggtggctgggtttcccagcagaacatcgcattccagtgtctgccgcaagccctcttctgttaggtcaccctccaccatccgccttcttcagccatcaggattctcatttagaaagactgcaaagccctgtgtccaggttggaggcagccgggaggccacaggctgcctggtgccccgaggaggctgctgagccccaggccatggtcccctctcgcaggacgtggaacctgggagccacgccctcgctgcggggcctgtggagagtgggccgggccccggagcccgagccggggatggctcgccccgccccagccccagccagcccggccgcccgccctttcccacacaccggcccggggaggttgagaactgggcgtggaaaagataccccagtctgcggtgacgaggactccagtgcccgaagtgcagctcgcccagccctagctcagtgccgagcccttagcgtggactgggctggccccggaagcccccacgggctctacctgaccctgcaggtagaacacctgaaggagaagctcattagccaggcccaggaagtgagccgactgcgatctgagctggggggcaccgacttgg

SEQ ID NO: 146827 - DNA, 3221 bp, Homo sapiens
  Payload ID: 9050
  Gene Symbol: KIFC3
  Gene Name: kinesin family member C3
  Uniprot ID: Q9BVG8
  ENST ID: ENST00000562903
  CDS Start-End: 944-3007
gtgccatgtgccagctgggcagctgtaggaagtcacttcctctctgagccttcacttcccagtctctaaactggggctcacaaatgtcgcattgcagtttgggggtggatctgttgtaagaatggacagaaaaaagatggtcaactgtaatgtgtggtgcatcgtgagctgtcactcccgtgtgccctggtctcctgctggcctcactgtggtttgactcagacttggactttcctggaattctgaactttgcctctctaagcaaagcccgccagggggtacactctgccttgttttccatggtgccgtgtttccagccctatccaccactggcttctgatcggctgctttctcacactgctgttcctgcaaggctgtgtggccccatggttaagggtgagggttctgcaagggtcagccagatgcgagttccggtcctaggtccaccacttactggtcaggtgacctcaaaagacatgctttgtgtctcctcctccttctgccaggattgtaagtttcctgaggcctccccagccatgtggaactaactcttttcatcttctgctactgaaatttgggcctcattaaagagtaactcctcattcgccatctgtctccgtgggtttgactgctcatgtacttactgaacacctactgtgtaccaggcactgttccaggcactgggagtacagtgctgaacacaacagacaaaaatccctgccttcgcatatatcatctcgtttaatcctcgagacagcttccatgaggtagcctcattatacaaataaggaaactaagagacatagagaacttaagagacttgtccaaggttacccagcaggtagaacacctgaaggagaagctcattagccaggcccaggaagtgagccgactgcgatctgagctggggggcaccgacttggagaagcaccgggacctgctgatggtggagaatgagcgactgaggcaggagatgcggcgctgtgaggccgagctgcaagagctgcgcacaaagccagcaggtccctgcccaggttgtgagcacagccaggagagcgcccagctccgtgacaagctgtcccagctgcagctggagatggcggaaagcaaaggcatgctgtcagagctgaacctagaggtgcagcagaagaccgaccggctggctgaggtggagctgcgactcaaggactgcctggctgagaaggcacaggaggaggagcggcttagtcggcgcctgcgtgacagccacgagaccattgccagcctgcgggcccagtccccacctgtcaagtatgtcatcaagacagtggaggtggagtcgtccaagaccaagcaggccctcagcgagtcccaggcccggaaccagcacctgcaggagcaggtggctatgcagaggcaggtgctgaaggagatggaacagcagctgcagagctcacaccagctgaccgcgcggctccgggcgcagattgccatgtacgagtcagagctggagcgggcccatgggcagatgctggaggagatgcagtccctggaagaggacaagaaccgggccattgaggaggcctttgccagagcccaggtggagatgaaggctgtgcacgagaatctagcaggcgtccggaccaacttgctgaccttgcagccggcactgcggaccctcaccaacgactacaatgggctcaagcggcaggtgcgcggcttcccactgctgctgcaggaggccctcaggagtgtcaaggccgagataggccaggccatcgaggaggtcaacagcaacaaccaggagctgctgcgcaagtaccgccgcgagctgcagctgcgtaagaagtgccacaatgagctcgtgcggctgaaagggaacatccgagtgattgctcgtgtccggccagtcaccaaagaggatggggaaggacctgaggccaccaatgctgtgactttcgatgccgacgacgactccatcatccacctgctgcacaagggcaagcctgtgtccttcgagctggacaaggtcttctccccacaggcctcgcagcaggacgtgttccaggaggtgcaggccctggtcacctcttgcattgatggcttcaatgtctgcatctttgcgtacggccagacgggcgccggcaagacgtacacgatggaggggaccgctgagaacccaggtatcaaccagcgggccctgcagctgctcttctccgaggtgcaggagaaggcgtctgactgggagtacaccatcaccgtcagcgctgcggagatctacaatgaggtcctcagggacctgctagggaaagagcctcaggaaaaactggagatccggctgtgcccagacggcagtgggcagctgtatgtaccagggctgactgagttccaagtgcagagcgtggacgacatcaacaaggtgtttgagtttggccacactaatcgcacgaccgagttcaccaacctgaacgagcacagctcccgctcgcacgcgctgctcatcgtgacggtgcgaggcgtggactgcagcacaggcctccgcaccacggggaagctgaacctggtggacttggctggctcggagcgcgtgggcaagtcgggggccgagggcagccgcctgcgggaggcgcagcacatcaacaagtcgctgtcggctctgggggacgtcattgctgccctgcgctcccgccagggccacgtgcccttccgcaactccaagctcacctacctgctgcaggattcgcttagtggtgacagcaagaccctcatggtggtacaggtgtcccccgtggagaagaacactagcgagacgctctattccctcaagtttgctgagagggtgcgctctgtggagctggggcctgggctacgcagggcagagcttgggtcctggtcaagccaggagcatctagagtgggagccggcttgtcagacgccacagccctcggcacgggcccactcagcccccagctctgggaccagtagccgccctggatccatccggaggaagctgcagccctcggcctgacggctggggctgcagagtctctagggaagtcgcggccactgcctgtgtgacggatgtgaccccgctgggcctgaagctgggccctcactggcctgtccctgctgcagcgccaggacccccggaggtagaggcgagagtggaggctcttcttctgccccgtctcccctcaaagatgagaaacatgttcagaaggaaacggtgtctctcggctgtg

SEQ ID NO: 146828 - DNA, 681 bp, Homo sapiens
  Payload ID: 9050
  Gene Symbol: KIFC3
  Gene Name: kinesin family member C3
  ENST ID: ENST00000563028
  CDS Start-End: 218-681
agtccaggcagacagcatcatgggtgaaggcttggagagctggtgaggcttggtggagacagcagctgattgtggctgatgaccaaagggcagggtcaaaggggcaggtggtaatctgggaaggaggggacggacttcatccgaggtgtcatgttcaggaatttgtactttatcctgaaggctacaggacaacccagtaaaacgtattgctcggaaaatggcacagatggagtttcttttcaggaagaacactctgacagctgcatggaagcccagacaccaggaaaccctcagattggaggctggtgtcccggagcagtgcaaggctgcctggtgccccgaggaggctgctgagccccaggccatggtcccctctcgcaggacgtggaacctgggagccacgccctcgctgcggggcctgtggagagtgggccgggccccggagcccgagccggggatggctcgccccgccccagccccagccagcccggccgcccgccctttcccacacaccggcccggggaggttgagaactgggcgtggaaaagataccccagtctgcggtgacgaggactccagtgcccgaagtgcagctcgcccagccctagctcagtgccgagcccttagcgtggactgggctggccccggaagcccccacgggctctacctgaccctgcaggt

SEQ ID NO: 146829 - DNA, 698 bp, Homo sapiens
  Payload ID: 9050
  Gene Symbol: KIFC3
  Gene Name: kinesin family member C3
  ENST ID: ENST00000569619
  CDS Start-End: 684-698
agcaggattctattctggctgtgccatgtgccagctgggcagctgtaggaagtcacttcctctctgagccttcacttcccagtctctaaactggggctcacaaatgtcgcattgcagtttgggggtggatctgttgtaagaatggacagaaaaaagatggtcaactgtaatgtgtggtgcatcgtgagctgtcactcccgtgtgccctggtctcctgctggcctcactgtggtttgactcagacttggactttcctggaattctgaactttgcctctctaagcaaagcccgccagggggtacactctgccttgttttccatggtgccgtgtttccagccctatccaccactggcttctgatcggctgctttctcacactgctgttcctgcaaggctgtgtggccccatggttaagggtgagggttctgcaagggtcagccagatgcgagttccggtcctaggtccaccacttactggtcaggtgacctcaaaactcttttcatcttctgctactgaaatttgggcctcattaaagagtaactcctcattcgccatctgtctccgtgggtttgactgctcatgtagaacacctgaaggagaagctcattagccaggcccaggaagtgagccgactgcgatctgagctggggggcaccgacttggagaagcaccgggacctgctgatggtggagaatgag

SEQ ID NO: 146830 - DNA, 651 bp, Homo sapiens
  Payload ID: 9050
  Gene Symbol: KIFC3
  Gene Name: kinesin family member C3
  ENST ID: ENST00000566648
  CDS Start-End: 80-651
agagtgacttgctttctcctcttccgcacccgggggtgtggagagtgagggagaatattgctgctggctctggaataaaatgctgcctctgtttgggagacaaagaacagagtggctcctccaggctgcctggtgccccgaggaggctgctgagccccaggccatggtcccctctcgcaggacgtggaacctgggagccacgccctcgctgcggggcctgtggagagtgggccgggccccggagcccgagccggggatggctcgccccgccccagccccagccagcccggccgcccgccctttcccacacaccggcccggggaggttgagaactgggcgtggaaaagataccccagtctgcggtgacgaggactccagtgcccgaagtgcagctcgcccagccctagctcagtgccgagcccttagcgtggactgggctggccccggaagcccccacgggctctacctgaccctgcaggtagaacacctgaaggagaagctcattagccaggcccaggaagtgagccgactgcgatctgagctggggggcaccgacttggagaagcaccgggacctgctgatggtggagaatgagcgactgaggcaggagatgcggcgctgtgaggccgagctgcaagagctgcgcacaaa

SEQ ID NO: 146831 - DNA, 509 bp, Homo sapiens
  Payload ID: 9050
  Gene Symbol: KIFC3
  Gene Name: kinesin family member C3
  ENST ID: ENST00000567059
  CDS Start-End: 13-509
cagtgtgagtgcatgtgcgccagcgcgtgcaaggacacggctgcctggtgccccgaggaggctgctgagccccaggccatggtcccctctcgcaggacgtggaacctgggagccacgccctcgctgcggggcctgtggagagtgggccgggccccggagcccgagccggggatggctcgccccgccccagccccagccagcccggccgcccgccctttcccacacaccggcccggggaggttgagaactgggcgtggaaaagataccccagtctgcggtgacgaggactccagtgcccgaagtgcagctcgcccagccctagctcagtgccgagcccttagcgtggactgggctggccccggaagcccccacgggctctacctgaccctgcagcaggccctgcaggacaaggggtgcaagagccagagtcaggggacgaaagaagagaagctttggaagagacaggcgccggcccccaggcgggcccgggaggcccgggaagctggtgg

SEQ ID NO: 146832 - DNA, 1081 bp, Homo sapiens
  Payload ID: 9050
  Gene Symbol: KIFC3
  Gene Name: kinesin family member C3
  ENST ID: ENST00000565270
  CDS Start-End: 242-1081
attgtgagctgagtgactgcagtaacacgtgatgtggtgttgctgaaggacagcatggttggggaggtggctggacttgtagctggtggtcccagcggccctggaagcccccccaccagcctccctcccaccaccctcccaggtgttccaggaggtgcaggccctggtcacctcttgcattgatggcttcaatgtctgcatctttgcgtacggccagacgggcgccggcaagacgtacacgatggaggggaccgctgagaacccaggtatcaaccagcgggccctgcagctgctcttctccgaggtgcaggagaaggcgtctgactgggagtacaccatcaccgtcagcgctgcggagatctacaatgaggtcctcagggacctgctagggaaagagcctcaggaaaaactggagatccggctgtgcccagacggcagtgggcagctgtatgtaccagggctgactgagttccaagtgcagagcgtggacgacatcaacaaggtgtttgagtttggccacactaatcgcacgaccgagttcaccaacctgaacgagcacagctcccgctcgcacgcgctgctcatcgtgacggtgcgaggcgtggactgcagcacaggcctccgcaccacggggaagctgaacctggtggacttggctggctcggagcgcgtgggcaagtcgggggccgagggcagccgcctgcgggaggcgcagcacatcaacaagtcgctgtcggctctgggggacgtcattgctgccctgcgctcccgccagggccacgtgcccttccgcaactccaagctcacctacctgctgcaggattcgcttagtggtgacagcaagaccctcatggtggtacaggtgtcccccgtggagaagaacactagcgagacgctctattccctcaagtttgctgagagggtgcgctctgtggagctggggcctgggctacgcagggcagagcttgggtcctggtcaagccaggagcatctagagtgggagccggcttgtcagacgccacagccctcggcacgggcccactcagcccccagctctgggaccagtagccgccctggatcc

SEQ ID NO: 146833 - DNA, 564 bp, Homo sapiens
  Payload ID: 9050
  Gene Symbol: KIFC3
  Gene Name: kinesin family member C3
  ENST ID: ENST00000569112
  CDS Start-End: 384-564
agctgcctcctgccggcgggccgggccgggccgagccccgggcgctgcggcgacgcctggatcctgcctccgccaggccgataccagagatgagactgaggtttctcaccggttcctaagcccagtcagagctgtcagggcgtggaaaagataccccagtctgcggtgacgaggactccagtgcccgaagtgcagctcgcccagccctagctcagtgccgagcccttagcgtggactgggctggccccggaagcccccacgggctctacctgaccctgcaggtagaacacctgaaggagaagctcattagccaggcccaggaagtgagccgactgcgatctgagctggggggcaccgacttggagaagcaccgggacctgctgatggtggagaatgagcgactgaggcaggagatgcggcgctgtgaggccgagctgcaagagctgcgcacaaagccagcaggtccctgcccaggttgtgagcacagccaggagagcgcccagctccgtgacaagctgtcccagctgcagctggagatggcggaaagcaaaggcatgctgtcag

SEQ ID NO: 146834 - DNA, 788 bp, Homo sapiens
  Payload ID: 9050
  Gene Symbol: KIFC3
  Gene Name: kinesin family member C3
  ENST ID: ENST00000565481
  CDS Start-End: 347-788
ggatgggaagacacgtactggtatgagagcccgcgtgagaagtataccagagatgagactgaggtttctcaccggttcctaagcccagtcagagctgtcagggcgtggaaaagataccccagtctgcggtgacgaggactccagtgcccgaagtgcagctcgcccagccctagctcagtgccgagcccttagcgtggactgggctggccccggaagcccccacgggctctacctgaccctgcaggtagaacacctgaaggagaagctcattagccaggcccaggaagtgagccgactgcgatctgagctggggggcaccgacttggagaagcaccgggacctgctgatggtggagaatgagcgactgaggcaggagatgcggcgctgtgaggccgagctgcaagagctgcgcacaaagccagcaggtccctgcccaggttgtgagcacagccaggagagcgcccagctccgtgacaagctgtcccagctgcagctggagatggcggaaagcaaaggcatgctgtcagagctgaacctagaggtgcagcagaagaccgaccggctggctgaggtggagctgcgactcaaggactgcctggctgagaaggcacaggaggaggagcggcttagtcggcgcctgcgtgacagccacgagaccattgccagcctgcgggcccagtccccacctgtcaagtatgtcatcaagacagtggaggtggagtcgtccaagaccaagcaggccctcagcgagtcccaggcccggaaccagcacctgcaggagcaggtgg

SEQ ID NO: 146835 - DNA, 810 bp, Homo sapiens
  Payload ID: 9050
  Gene Symbol: KIFC3
  Gene Name: kinesin family member C3
  ENST ID: ENST00000565397
  CDS Start-End: 1-589
cctggtggacttggctggctcggagcgcgtgggcaagtcgggggccgagggcagccgcctgcgggaggcgcagcacatcaacaagtcgctgtcggctctgggggacgtcattgctgccctgcgctcccgccagggccacgtgcccttccgcaactccaagctcacctacctgctgcaggattcgcttagtggtgacagcaagaccctcatggtggtacagggaagtcgcggccactgcctgtgtgacggatgtgaccccgctgggcctgaagctgggccctcactggcctgtccctgctgcagcgccaggacccccggaggtagaggcgagagtggaggctcttcttctgccccgtctcccctcaaagatgagaaacatgttcagaaggaaacggtgtctctcggctgtggctctgagtgcaaattgcatgggcggaaaggcgggggtggctgctcttcctggcaggcctgggccatcagcgaactgggccccgtgaggagggcgggagtgtggaggagggtgggcctctcacccaggctttctcggcccctctcctcagcttgcagagctggccagccccctccttagggggtgggcgaggagcctctgggcagacccaagaaccatggggactggggtgggttggtggcaccaatggcagccctccccgcccctctccttcaaggagggttcccgcagctggggggtgtgcggaggcgcatggcctcccgccacggggccgtgctgtgtttatggctggcagaggcagccagcgggtgggggattctgctgctcgctcacctgcctgg

SEQ ID NO: 146836 - DNA, 443 bp, Homo sapiens
  Payload ID: 9050
  Gene Symbol: KIFC3
  Gene Name: kinesin family member C3
  ENST ID: ENST00000569222
  CDS Start-End: 132-443
aaggacagaacagaaccctgggccgcaggcaggtggctggtgggtatcccgcctcccacccccagcaaacactggcaaaccccactctccctgcatcagggtctgagtgcctggcaggggcggcagtggagatgatcaaggtagaacacctgaaggagaagctcattagccaggcccaggaagtgagccgactgcgatctgagctgcaccgggacctgctgatggtggagaatgagcgactgaggcaggagatgcggcgctgtgaggccgagctgcaagagctgcgcacaaagccagcaggtccctgcccaggttgtgagcacagccaggagagcgcccagctccgtgacaagctgtcccagctgcagctggagatggcggaaagcaaaggcatgctgtcagagctgaacctagaggtgcagcagaagaccgaccggctggct

SEQ ID NO: 146837 - DNA, 3071 bp, Homo sapiens
  Payload ID: 9050
  Gene Symbol: KIFC3
  Gene Name: kinesin family member C3
  ENST ID: ENST00000564136
  CDS Start-End: 743-2239
ggctgtgccatgtgccagctgggcagctgtaggaagtcacttcctctctgagccttcacttcccagtctctaaactggggctcacaaatgtcgcattgcagtttgggggtggatctgttgtaagaatggacagaaaaaagatggtcaactgtaatgtgtggtgcatcgtgagctgtcactcccgtgtgccctggtctcctgctggcctcactgtggtttgactcagacttggactttcctggaattctgaactttgcctctctaagcaaagcccgccagggggtacactctgccttgttttccatggtgccgtgtttccagccctatccaccactggcttctgatcggctgctttctcacactgctgttcctgcaaggctgtgtggccccatggttaagggtgagggttctgcaagggtcagccagatgcgagttccggtcctaggtccaccacttactggtcaggtgacctcaaaagacatgctttgtgtctcctcctccttctgccaggattgtaagtttcctgaggcctccccagccatgtggaactaactcttttcatcttctgctactgaaatttgggcctcattaaagagtaactcctcattcgccatctgtctccgtgggtttgactgctcatgtagaacacctgaaggagaagctcattagccaggcccaggaagtgagccgactgcgatctgagctggggggcaccgacttggagaagcaccgggacctgctgatggtggagaatgagcgactgaggcaggagatgcggcgctgtgaggccgagctgcaagagctgcgcacaaagccagcaggtccctgcccaggttgtgagcacagccaggagagcgcccagctccgtgacaagctgtcccagctgcagctggagatggcggaaagcaaaggcatgctgtcagagctgaacctagaggtgcagcagaagaccgaccggctggctgaggtggagctgcgactcaaggactgcctggctgagaaggcacaggaggaggagcggcttagtcggcgcctgcgtgacagccacgagaccattgccagcctgcgggcccagtccccacctgtcaagtatgtcatcaagacagtggaggtggagtcgtccaagaccaagcaggccctcagcgagtcccaggcccggaaccagcacctgcaggagcaggtggctatgcagaggcaggtgctgaaggagatggaacagcagctgcagagctcacaccagctgaccgcgcggctccgggcgcagattgccatgtacgagtcagagctggagcgggcccatgggcagatgctggaggagatgcagtccctggaagaggacaagaaccgggccattgaggaggcctttgccagagcccaggtggagatgaaggctgtgcacgagaatctagcaggcgtccggaccaacttgctgaccttgcagccggcactgcggaccctcaccaacgactacaatgggctcaagcggcaggtgcgcggcttcccactgctgctgcaggaggccctcaggagtgtcaaggccgagataggccaggccatcgaggaggtcaacagcaacaaccaggagctgctgcgcaagtaccgccgcgagctgcagctgcgtaagaagtgccacaatgagctcgtgcggctgaaagggaacatccgagtgattgctcgtgtccggccagtcaccaaagaggatggggaaggacctgaggccaccaatgctgtgactttcgatgccgacgacgactccatcatccacctgctgcacaagggcaagcctgtgtccttcgagctggacaaggtcttctccccacaggcctcgcagcaggacgtgttccaggaggtgcaggccctggtcacctcttgcattgatggcttcaatgtctgcatctttgcgtacggccagacgggcgccggcaagacgtacacgatggaggggaccgctgagaacccaggtatcaaccagcgggccctgcagctgctcttctccgaggtgcaggagaaggcgtctgactgggagtacaccatcaccgtcagcgctgcggagatctacaatgaggtcctcagggacctgctagggaaagagcctcaggaaaaactggagatccggctgtgcccagacggcagtgggcagctgtatgtaccagggctgactgagttccaagtgcagagcgtggacgacatcaacaaggtgtggaggcgggagcccctgaccacagccacactgctctagaggacacaactgggtttgaatgtaggctctgctgtgtcctaagcacgcacccttgggtgtttgagtttggccacactaatcgcacgaccgagttcaccaacctgaacgagcacagctcccgctcgcacgcgctgctcatcgtgacggtgcgaggcgtggactgcagcacaggcctccgcaccacggggaagctgaacctggtggacttggctggctcggagcgcgtgggcaagtcgggggccgagggcagccgcctgcgggaggcgcagcacatcaacaagtcgctgtcggctctgggggacgtcattgctgccctgcgctcccgccagggccacgtgcccttccgcaactccaagctcacctacctgctgcaggattcgcttagtggtgacagcaagaccctcatggtggtacaggtgtcccccgtggagaagaacactagcgagacgctctattccctcaagtttgctgagagggtgcgctctgtggagctggggcctgggctacgcagggcagagcttgggtcctggtcaagccaggagcatctagagtgggagccggcttgtcagacgccacagccctcggcacgggcccactcagcccccagctctgggaccagtagccgccctggatccatccggaggaagctgcagccctcggggaagtcgcggccactgcctgtgtgacggatgtgaccccgctgggcctgaagctgggccctcactggcctgtccctgctgcagcgccaggacccccggaggtagaggcgagagtggaggctcttcttctgccccgtctcccctcaaagatgagaaacatgttcagaaggaaa

SEQ ID NO: 146838 - DNA, 3360 bp, Homo sapiens
  Payload ID: 9051
  Gene Symbol: KIF2A
  Gene Name: kinesin heavy chain member 2A
  Uniprot ID: O00139
  ENST ID: ENST00000381103
  CDS Start-End: 486-2546
gactacccggcgtgcgcgtcctcctgccggcctgcaggcccggggcctccgcctgcttccccacagctgctccttgcggccccgcttgcgttcacgctgtcgcccgggccggcgcggccgcgggcaaccgctccccctcccacacctaccccgccccctccccgccttttccgccctccggtccccctccctcggcccgctgctgctgctccagatgaggtgatggcaacggccaacttcggcaagatccagatcgggatttacgtggagatcaagcgcagcgatggtaaatacgagttcacagtataccagcaaaagtaggatttacatattattttgaagattctgggtgcacagcaacacctgtccctggtatacacccaagggagaggaaatcaccaccttgtgaagatatctgcactctcgcgttcattgcagcattattcacagtagccaagatagggaagcaacctaaatgtccatcgatgggccgaatacatcaagcaatggtaacatctttaaatgaagataatgaaagtgtaactgttgaatggatagaaaatggagatacaaaaggcaaagagattgacctggagagcatcttttcacttaaccctgaccttgttcctgatgaagaaattgaacccagtccagaaacacctccacctccagcatcctcagccaaagtaaacaaaattgtaaagaatcgacggactgtagcttctattaagaatgaccctccttcaagagataatagagtggttggttcagcacgtgcacggcccagtcaatttcctgaacagtcttcctctgcacaacagaatggtagtgtttcagatatatctccagttcaagctgcaaaaaaggaatttggacccccttcacgtagaaaatctaattgtgtgaaagaagtagaaaaactgcaagaaaaacgagagaaaaggagattgcaacagcaagaacttagagaaaaaagagcccaggacgttgatgctacaaacccaaattatgaaattatgtgtatgatcagagactttagaggaagtttggattatagaccattaacaacagcagatcctattgatgaacataggatatgtgtgtgtgtaagaaaacgaccactcaataaaaaagaaactcaaatgaaagatcttgatgtaatcacaattcctagtaaagatgttgtgatggtacatgaaccaaaacaaaaagtagatttaacaaggtacctagaaaaccaaacatttcgttttgattatgcctttgatgactcagctcctaatgaaatggtttacaggtttactgctagaccactagtggaaactatatttgaaaggggaatggctacatgctttgcttatgggcagactggaagtggaaaaactcatactatgggtggtgacttttcaggaaagaaccaagattgttctaaaggaatttatgcattagcagctcgagatgtctttttaatgctaaagaagccaaactataagaagctagaacttcaagtatatgcaaccttctttgaaatttatagtggaaaggtgtttgacttgctaaacaggaaaacaaaattaagagttctagaagatggaaaacagcaggttcaagtggtgggattacaggaacgggaggtcaaatgtgttgaagatgtactgaaactcattgacataggcaacagttgcagaacatccggtcaaacatctgcaaatgcacattcatctcggagccatgcagtgtttcagattattcttagaaggaaaggaaaactacatggcaaattttctctcattgatttggctggaaatgaaagaggagctgatacttccagtgcggacaggcaaactaggcttgaaggtgctgaaattaataaaagccttttagcactcaaggagtgcatcagagccttaggtagaaataaacctcatactcctttccgtgcaagtaaactcactcaggtgttaagagattctttcataggtgaaaactctcgtacctgcatgattgccacaatctctccaggaatggcatcctgtgaaaatactcttaatacattaagatatgcaaatagggtcaaagaattgactgtagatccaactgctgctggtgatgttcgtccaataatgcaccatccaccaaaccagattgatgacttagagacacagtggggtgtggggagttcccctcagagagatgatctaaaacttctttgtgaacaaaatgaagaagaagtctctccacagttgtttactttccacgaagctgtttcacaaatggtagaaatggaagaacaagttgtagaagatcacagggcagtgttccaggaatctattcggtggttagaagatgaaaaggccctcttagagatgactgaagaagtagattatgatgtcgattcatatgctacacaacttgaagctattcttgagcaaaaaatagacattttaactgaactgcgggataaagtgaaatctttccgtgcagctctacaagaggaggaacaagccagcaagcaaatcaacccgaagagaccccgtgccctttaaaccggcatttgctgctaaaggatacccagaaccctcactactgtaacatacaacggttcagctgtaagggccatttgaaagtttggaattttaagtgtctgtggaaaatgttttgtccttcacctgaattacatttcaattttgtgaaacactcttttgtctacaaaatgcttctagtccaggaggcacaaccaagaactgggattaatgaagcattttgtttcatttacacaaatagtgatttacttttggagatccttgtcagttttattttctatttgatgaagtaagactgtggactcaatccagagccagatagtagggggaagccacagcatttccttttaactcagttcaatttttgtagtgagactgagcagttttaaatcctttgcgtgcatgcatacctcatcagtgattgtacataccttgcccactcctagagacagctgtgctcaccttttcctgctttgtgccttgattaaggctactgaccctaaatttctgaagcacagccaagaaaaattacattccttgtcattgtaaattacctttgtgtgtacatttttactgtatttgagacattttttgtgtgtgactagttaattttgcaggatgtgccatatcattgaacggaactaaagtctgtgacagtggatatagctgctggaccattccatcttatatgtaaagaaatctggaattattattttaaaaccatataacatgtgattataatttttcttagcattttctttgtaaagaactacaatataaactagttggtgtataataaaaagtaatgaaattctga

SEQ ID NO: 146839 - DNA, 2315 bp, Homo sapiens
  Payload ID: 9051
  Gene Symbol: KIF2A
  Gene Name: kinesin heavy chain member 2A
  Uniprot ID: O00139
  ENST ID: ENST00000407818
  CDS Start-End: 22-2256
gctgctgctccagatgaggtgatggcaacggccaacttcggcaagatccagatcgggatttacgtggagatcaagcgcagcgatggccgaatacatcaagcaatggtaacatctttaaatgaagataatgaaagtgtaactgttgaatggatagaaaatggagatacaaaaggcaaagagattgacctggagagcatcttttcacttaaccctgaccttgttcctgatgaagaaattgaacccagtccagaaacacctccacctccagcatcctcagccaaagtaaacaaaattgtaaagaatcgacggactgtagcttctattaagaatgaccctccttcaagagataatagagtggttggttcagcacgtgcacggcccagtcaatttcctgaacagtcttcctctgcacaacagaatggtagtgtttcagatatatctccagttcaagctgcaaaaaaggaatttggacccccttcacgtagaaaatctaattgtgtgaaagaagtagaaaaactgcaagaaaaacgagagaaaaggagattgcaacagcaagaacttagagaaaaaagagcccaggacgttgatgctacaaacccaaattatgaaattatgtgtatgatcagagactttagaggaagtttggattatagaccattaacaacagcagatcctattgatgaacataggatatgtgtgtgtgtaagaaaacgaccactcaataaaaaagaaactcaaatgaaagatcttgatgtaatcacaattcctagtaaagatgttgtgatggtacatgaaccaaaacaaaaagtagatttaacaaggtacctagaaaaccaaacatttcgttttgattatgcctttgatgactcagctcctaatgaaatggtttacaggtttactgctagaccactagtggaaactatatttgaaaggggaatggctacatgctttgcttatgggcagactggaagtggaaaaactcatactatgggtggtgacttttcaggaaagaaccaagattgttctaaaggaatttatgcattagcagctcgagatgtctttttaatgctaaagaagccaaactataagaagctagaacttcaagtatatgcaaccttctttgaaatttatagtggaaaggtgtttgacttgctaaacaggaaaacaaaattaagagttctagaagatggaaaacagcaggttcaagtggtgggattacaggaacgggaggtcaaatgtgttgaagatgtactgaaactcattgacataggcaacagttgcagaacatccggtcaaacatctgcaaatgcacattcatctcggagccatgcagtgtttcagattattcttagaaggaaaggaaaactacatggcaaattttctctcattgatttggctggaaatgaaagaggagctgatacttccagtgcggacaggcaaactaggcttgaaggtgctgaaattaataaaagccttttagcactcaaggagtgcatcagagccttaggtagaaataaacctcatactcctttccgtgcaagtaaactcactcaggtgttaagagattctttcataggtgaaaactctcgtacctgcatgattgccacaatctctccaggaatggcatcctgtgaaaatactcttaatacattaagatatgcaaatagagtaaaggagtttggaattagtccatcagacattcccttctcacagggtagtggcagtcgccctgatctctctccttcttatgaatatgacgacttttctccttcagttaccagggtcaaagaattgactgtagatccaactgctgctggtgatgttcgtccaataatgcaccatccaccaaaccagattgatgacttagagacacagtggggtgtggggagttcccctcagagagatgatctaaaacttctttgtgaacaaaatgaagaagaagtctctccacagttgtttactttccacgaagctgtttcacaaatggtagaaatggaagaacaagttgtagaagatcacagggcagtgttccaggaatctattcggtggttagaagatgaaaaggccctcttagagatgactgaagaagtagattatgatgtcgattcatatgctacacaacttgaagctattcttgagcaaaaaatagacattttaactgaactgcgggataaagtgaaatctttccgtgcagctctacaagaggaggaacaagccagcaagcaaatcaacccgaagagaccccgtgccctttaaaccggcatttgctgctaaaggatacccagaaccctcactactgtaacatacaacggttc

SEQ ID NO: 146840 - DNA, 2539 bp, Homo sapiens
  Payload ID: 9051
  Gene Symbol: KIF2A
  Gene Name: kinesin heavy chain member 2A
  Uniprot ID: O00139
  ENST ID: ENST00000401507
  CDS Start-End: 312-2432
gcctccccagcgtcggctccccggcgggcggtgcgggccctcccactctaccccgcgccgtctcacggccccggccctagcttcaccccgactacccggcgtgcgcgtcctcctgccggcctgcaggcccggggcctccgcctgcttccccacagctgctccttgcggccccgcttgcgttcacgctgtcgcccgggccggcgcggccgcgggcaaccgctccccctcccacacctaccccgccccctccccgccttttccgccctccggtccccctccctcggcccgctgctgctgctccagatgaggtgatggcaacggccaacttcggcaagatccagatcgggatttacgtggagatcaagcgcagcgatggccgaatacatcaagcaatggtaacatctttaaatgaagataatgaaagtgtaactgttgaatggatagaaaatggagatacaaaaggcaaagagattgacctggagagcatcttttcacttaaccctgaccttgttcctgatgaagaaattgaacccagtccagaaacacctccacctccagcatcctcagccaaagtaaacaaaattgtaaagaatcgacggactgtagcttctattaagaatgaccctccttcaagagataatagagtggttggttcagcacgtgcacggcccagtcaatttcctgaacagtcttcctctgcacaacagaatggtagtgtttcagatatatctccagttcaagctgcaaaaaaggaatttggacccccttcacgtagaaaatctaattgtgtgaaagaagtagaaaaactgcaagaaaaacgagagaaaaggagattgcaacagcaagaacttagagaaaaaagagcccaggacgttgatgctacaaacccaaattatgaaattatgtgtatgatcagagactttagaggaagtttggattatagaccattaacaacagcagatcctattgatgaacataggatatgtgtgtgtgtaagaaaacgaccactcaataaaaaagaaactcaaatgaaagatcttgatgtaatcacaattcctagtaaagatgttgtgatggtacatgaaccaaaacaaaaagtagatttaacaaggtacctagaaaaccaaacatttcgttttgattatgcctttgatgactcagctcctaatgaaatggtttacaggtttactgctagaccactagtggaaactatatttgaaaggggaatggctacatgctttgcttatgggcagactggaagtggaaaaactcatactatgggtggtgacttttcaggaaagaaccaagattgttctaaaggaatttatgcattagcagctcgagatgtctttttaatgctaaagaagccaaactataagaagctagaacttcaagtatatgcaaccttctttgaaatttatagtggaaaggtgtttgacttgctaaacaggaaaacaaaattaagagttctagaagatggaaaacagcaggttcaagtggtgggattacaggaacgggaggtcaaatgtgttgaagatgtactgaaactcattgacataggcaacagttgcagaacatccggtcaaacatctgcaaatgcacattcatctcggagccatgcagtgtttcagattattcttagaaggaaaggaaaactacatggcaaattttctctcattgatttggctggaaatgaaagaggagctgatacttccagtgcggacaggcaaactaggcttgaaggtgctgaaattaataaaagccttttagcactcaaggagtgcatcagagccttaggtagaaataaacctcatactcctttccgtgcaagtaaactcactcaggtgttaagagattctttcataggtgaaaactctcgtacctgcatgattgccacaatctctccaggaatggcatcctgtgaaaatactcttaatacattaagatatgcaaatagggtcaaagaattgactgtagatccaactgctgctggtgatgttcgtccaataatgcaccatccaccaaaccagattgatgacttagagacacagtggggtgtggggagttcccctcagagagatgatctaaaacttctttgtgaacaaaatgaagaagaagtctctccacagttgtttactttccacgaagctgtttcacaaatggtagaaatggaagaacaagttgtagaagatcacagggcagtgttccaggaatctattcggtggttagaagatgaaaaggccctcttagagatgactgaagaagtagattatgatgtcgattcatatgctacacaacttgaagctattcttgagcaaaaaatagacattttaactgaactgcgggataaagtgaaatctttccgtgcagctctacaagaggaggaacaagccagcaagcaaatcaacccgaagagaccccgtgccctttaaaccggcatttgctgctaaaggatacccagaaccctcactactgtaacatacaacggttcagctgtaagggccatttgaaagtttggaattttaagtgtctgtggaaa

SEQ ID NO: 146841 - DNA, 392 bp, Homo sapiens
  Payload ID: 9051
  Gene Symbol: KIF2A
  Gene Name: kinesin heavy chain member 2A
  ENST ID: ENST00000512006
  CDS Start-End: 1-392
gggcagactggaagtggaaaaactcatgtgtttgacttgctaaacaggaaaacaaaattaagagttctagaagatggaaaacagcaggttcaagtggtgggattacaggaacgggaggtcaaatgtgttgaagatgtactgaaactcattgacataggcaacagttgcagggtcaaagaattgactgtagatccaactgctgctggtgatgttcgtccaataatgcaccatccaccaaaccagattgatgacttagagacacagtggggtgtggggagttcccctcagagagatgatctaaaacttctttgtgaacaaaatgaagaagaagtctctccacagttgtttactttccacgaagctgtttcacaaatggtagaaatggaagaaca

SEQ ID NO: 146842 - DNA, 874 bp, Homo sapiens
  Payload ID: 9051
  Gene Symbol: KIF2A
  Gene Name: kinesin heavy chain member 2A
  ENST ID: ENST00000514082
  CDS Start-End: 22-874
gctgctgctccagatgaggtgatggcaacggccaacttcggcaagatccagatcgggatttacgtggagatcaagcgcagcgatggccgaatacatcaagcaatggtaacatctttaaatgaagataatgaaagtgtaactgttgaatggatagaaaatggagatacaaaaggcaaagagattgacctggagagcatcttttcacttaaccctgaccttgttcctgatgaagaaattgaacccagtccagaaacacctccacctccagcatcctcagccaaagtaaacaaaattgtaaagaatcgacggactgtagcttctattaagaatgaccctccttcaagagataatagagtggttggttcagcacgtgcacggcccagtcaatttcctgaacagtcttcctctgcacaacagaatgcacgtagaaaatctaattgtgtgaaagaagtagaaaaactgcaagaaaaacgagagaaaaggagattgcaacagcaagaacttagagaaaaaagagcccaggacgttgatgctacaaacccaaattatgaaattatgtgtatgatcagagactttagaggaagtttggattatagaccattaacaacagcagatcctattgatgaacataggatatgtgtgtgtgtaagaaaacgaccactcaataaaaaagaaactcaaatgaaagatcttgatgtaatcacaattcctagtaaagatgttgtgatggtacatgaaccaaaacaaaaagtagatttaacaaggtacctagaaaaccaaacatttcgttttgattatgcctttgatgactcagctcctaatgaaatggtttacaggtttactgctagaccactagtggaaactatatttgaaa

SEQ ID NO: 146843 - DNA, 2219 bp, Homo sapiens
  Payload ID: 9051
  Gene Symbol: KIF2A
  Gene Name: kinesin heavy chain member 2A
  Uniprot ID: O00139
  ENST ID: ENST00000506857
  CDS Start-End: 87-2069
agggcttaatagttttccaagtgcttcaagacatgttagctaattggatcttcacaggaactctatgaggccgaatacatcaagcaatggtaacatctttaaatgaagataatgaaagtgtaactgttgaatggatagaaaatggagatacaaaaggcaaagagattgacctggagagcatcttttcacttaaccctgaccttgttcctgatgaagaaattgaacccagtccagaaacacctccacctccagcatcctcagccaaagtaaacaaaattgtaaagaatcgacggactgtagcttctattaagaatgaccctccttcaagagataatagagtggttggttcagcacgtgcacggcccagtcaatttcctgaacagtcttcctctgcacaacagaatgcacgtagaaaatctaattgtgtgaaagaagtagaaaaactgcaagaaaaacgagagaaaaggagattgcaacagcaagaacttagagaaaaaagagcccaggacgttgatgctacaaacccaaattatgaaattatgtgtatgatcagagactttagaggaagtttggattatagaccattaacaacagcagatcctattgatgaacataggatatgtgtgtgtgtaagaaaacgaccactcaataaaaaagaaactcaaatgaaagatcttgatgtaatcacaattcctagtaaagatgttgtgatggtacatgaaccaaaacaaaaagtagatttaacaaggtacctagaaaaccaaacatttcgttttgattatgcctttgatgactcagctcctaatgaaatggtttacaggtttactgctagaccactagtggaaactatatttgaaaggggaatggctacatgctttgcttatgggcagactggaagtggaaaaactcatactatgggtggtgacttttcaggaaagaaccaagattgttctaaaggaatttatgcattagcagctcgagatgtctttttaatgctaaagaagccaaactataagaagctagaacttcaagtatatgcaaccttctttgaaatttatagtggaaaggtgtttgacttgctaaacaggaaaacaaaattaagagttctagaagatggaaaacagcaggttcaagtggtgggattacaggaacgggaggtcaaatgtgttgaagatgtactgaaactcattgacataggcaacagttgcagaacatccggtcaaacatctgcaaatgcacattcatctcggagccatgcagtgtttcagattattcttagaaggaaaggaaaactacatggcaaattttctctcattgatttggctggaaatgaaagaggagctgatacttccagtgcggacaggcaaactaggcttgaaggtgctgaaattaataaaagccttttagcactcaaggagtgcatcagagccttaggtagaaataaacctcatactcctttccgtgcaagtaaactcactcaggtgttaagagattctttcataggtgaaaactctcgtacctgcatgattgccacaatctctccaggaatggcatcctgtgaaaatactcttaatacattaagatatgcaaatagggtcaaagaattgactgtagatccaactgctgctggtgatgttcgtccaataatgcaccatccaccaaaccagattgatgacttagagacacagtggggtgtggggagttcccctcagagagatgatctaaaacttctttgtgaacaaaatgaagaagaagtctctccacagttgtttactttccacgaagctgtttcacaaatggtagaaatggaagaacaagttgtagaagatcacagggcagtgttccaggaatctattcggtggttagaagatgaaaaggccctcttagagatgactgaagaagtagattatgatgtcgattcatatgctacacaacttgaagctattcttgagcaaaaaatagacattttaactgaactgcgggataaagtgaaatctttccgtgcagctctacaagaggaggaacaagccagcaagcaaatcaacccgaagagaccccgtgccctttaaaccggcatttgctgctaaaggatacccagaaccctcactactgtaacatacaacggttcagctgtaagggccatttgaaagtttggaattttaagtgtctgtggaaaatgttttgtccttcacctgaattacatttcaattttgtgaaac

SEQ ID NO: 146844 - DNA, 549 bp, Homo sapiens
  Payload ID: 9051
  Gene Symbol: KIF2A
  Gene Name: kinesin heavy chain member 2A
  ENST ID: ENST00000512541
  CDS Start-End: 310-549
gcattttaccggcttggcctctgacggggatggggatgggggtgggggagcgggaagaccagcgatttcacatttagagaaccgactgctggtcggaggccgagatggggggaaagagccagttccgtcgccttaaactgccgtctggttgtcaggcctccccggtttcgtcgtcgaccatgctgctttcttttttgccacttcttgggagaaaaatgtggagaatatcgcgctgagccatgaataagggtgggggagcaatgggaagaaatattcgatgggcttctccaaggccgaatacatcaagcaatggtaacatctttaaatgaagataatgaaagtgtaactgttgaatggatagaaaatggagatacaaaaggcaaagagattgacctggagagcatcttttcacttaaccctgaccttgttcctgatgaagaaattgaacccagtccagaaacacctccacctccagcatcctcagccaaagtaaacaaaattgtaaagaatcgacggactgtagcttctattaagaatgaccctccttca

SEQ ID NO: 146845 - DNA, 2294 bp, Homo sapiens
  Payload ID: 9052
  Gene Symbol: KLC1
  Gene Name: kinesin light chain 1
  Uniprot ID: Q07866
  ENST ID: ENST00000246489
  CDS Start-End: 256-2169
cgagcgggactggctgggtcggctgggctgctggtgcgaggagccgcggggctgtgctcggcggccaaggggacagcgcgtgggtggccgaggatgctgcggggcggtagctccggcgcccctagctggtgactgctgcgccgtgcctcacacagccgaggcgggctcggcgcacagtcgctgctccgcgcgcgcgcccggcggcgctccaggtgctgacagcgcgagagagcgcggccctcaggagcaaggcgaatgtatgacaacatgtccacaatggtgtacataaaggaagacaagttggagaagcttacacaggatgaaattatttctaagacaaagcaagtaattcaggggctggaagctttgaagaatgagcacaattccattttacaaagtttgctggagacactgaagtgtttgaagaaagatgatgaaagtaatttggtggaggagaaatcaaacatgatccggaagtcactggagatgttggagctcggcctgagtgaggcacaggttatgatggctttgtcaaatcacctgaatgctgtggagtccgagaagcagaaactgcgtgcgcaggttcgtcgtctgtgccaggagaatcagtggctacgggatgaactggccaacacgcagcagaaactgcagaagagtgagcagtctgtggctcaactggaggaggagaagaagcatctggagtttatgaatcagctaaaaaaatatgatgacgacatttccccatccgaggacaaagacactgattctaccaaagagcctctggatgaccttttccccaatgatgaagacgacccagggcaaggaatccagcagcagcacagcagtgcagccgcggctgcccagcagggcggctacgagatccccgcgcggctgcggacgctccacaacctggtgatccagtacgcctcgcaggggcgctacgaggtagctgtgcccctctgcaagcaggccctggaggacctggagaagacttcaggacacgaccacccggacgtggccaccatgctcaacatcctggccttggtgtacagggatcagaataaatacaaagatgcagctaacctactgaatgatgccttggctattcgtgagaaaactttgggcaaagatcatcctgcggtggcggcgactttgaataaccttgcagtcctttatggtaaaagagggaagtacaaagaagcagagccgttgtgtaaaagagctctggaaatccgagaaaaggttttggggaaggatcaccccgatgttgccaagcagttaaataacttggccttactgtgccagaaccagggcaagtatgaagaagtagaatattattatcaaagagccctcgagatctaccagacaaaactgggacctgatgaccccaacgtggctaagacgaaaaataacctggcatcctgctatttgaaacaaggaaagttcaagcaagcagaaacactgtacaaagagattctcactcgtgcacatgaaagggagtttggttctgtagatgatgaaaataaacccatctggatgcatgctgaagaaagagaagaatgcaaaggaaagcaaaaggatgggacatcttttggagagtatggcggctggtacaaagcctgcaaagttgatagtccaactgttacaaccactctaaaaaaccttggggcactttacagacgtcaaggcaaatttgaagctgcagaaacgttagaagaagctgctatgaggtctcgtaaacagggtcttgacaatgttcacaaacagagggtggcagaagtgctcaatgaccctgagaacatggagaagcgcaggagccgtgagagcctcaacgtggacgtggtcaagtacgagagtggccctgacggaggggaggaagtgagtatgagcgtagagtggaacggggatggcactggatctttaaaacgcagtggttcctttagcaaactccgggcttccattagacgcagcagtgagaagctggttaggaagctgaagggaggaagttcacgagagagtgagccaaagaaccccggcatgaagcgtgccagctctctgaatgtccttaacgtgggtggcaaggctgctgaagatcgctttcaagaacgaaataattgtctggccgactcgcgagctctgagtgccagccacactgacctggcccactgagagccagcagggctaggtaacctgtcttgggagtgtgagaccgccccgccctgccacgcccctcaccgccctgcccggaggcgccagccgcactccttggcttcctttcctagatagtgacgtcc

SEQ ID NO: 146846 - DNA, 2524 bp, Homo sapiens
  Payload ID: 9052
  Gene Symbol: KLC1
  Gene Name: kinesin light chain 1
  Uniprot ID: Q07866
  ENST ID: ENST00000334553
  CDS Start-End: 260-2179
cggccgagcgggactggctgggtcggctgggctgctggtgcgaggagccgcggggctgtgctcggcggccaaggggacagcgcgtgggtggccgaggatgctgcggggcggtagctccggcgcccctagctggtgactgctgcgccgtgcctcacacagccgaggcgggctcggcgcacagtcgctgctccgcgcgcgcgcccggcggcgctccaggtgctgacagcgcgagagagcgcggccctcaggagcaaggcgaatgtatgacaacatgtccacaatggtgtacataaaggaagacaagttggagaagcttacacaggatgaaattatttctaagacaaagcaagtaattcaggggctggaagctttgaagaatgagcacaattccattttacaaagtttgctggagacactgaagtgtttgaagaaagatgatgaaagtaatttggtggaggagaaatcaaacatgatccggaagtcactggagatgttggagctcggcctgagtgaggcacaggttatgatggctttgtcaaatcacctgaatgctgtggagtccgagaagcagaaactgcgtgcgcaggttcgtcgtctgtgccaggagaatcagtggctacgggatgaactggccaacacgcagcagaaactgcagaagagtgagcagtctgtggctcaactggaggaggagaagaagcatctggagtttatgaatcagctaaaaaaatatgatgacgacatttccccatccgaggacaaagacactgattctaccaaagagcctctggatgaccttttccccaatgatgaagacgacccagggcaaggaatccagcagcagcacagcagtgcagccgcggctgcccagcagggcggctacgagatccccgcgcggctgcggacgctccacaacctggtgatccagtacgcctcgcaggggcgctacgaggtagctgtgcccctctgcaagcaggccctggaggacctggagaagacttcaggacacgaccacccggacgtggccaccatgctcaacatcctggccttggtgtacagggatcagaataaatacaaagatgcagctaacctactgaatgatgccttggctattcgtgagaaaactttgggcaaagatcatcctgcggtggcggcgactttgaataaccttgcagtcctttatggtaaaagagggaagtacaaagaagcagagccgttgtgtaaaagagctctggaaatccgagaaaaggttttggggaaggatcaccccgatgttgccaagcagttaaataacttggccttactgtgccagaaccagggcaagtatgaagaagtagaatattattatcaaagagccctcgagatctaccagacaaaactgggacctgatgaccccaacgtggctaagacgaaaaataacctggcatcctgctatttgaaacaaggaaagttcaagcaagcagaaacactgtacaaagagattctcactcgtgcacatgaaagggagtttggttctgtagatgatgaaaataaacccatctggatgcatgctgaagaaagagaagaatgcaaaggaaagcaaaaggatgggacatcttttggagagtatggcggctggtacaaagcctgcaaagttgatagtccaactgttacaaccactctaaaaaaccttggggcactttacagacgtcaaggcaaatttgaagctgcagaaacgttagaagaagctgctatgaggtctcgtaaacagggtcttgacaatgttcacaaacagagggtggcagaagtgctcaatgaccctgagaacatggagaagcgcaggagccgtgagagcctcaacgtggacgtggtcaagtacgagagtggccctgacggaggggaggaagtgagtatgagcgtagagtggaacggggatggcactggatctttaaaacgcagtggttcctttagcaaactccgggcttccattagacgcagcagtgagaagctggttaggaagctgaagggaggaagttcacgagagagtgagccaaagaaccccggcatgaagcgtgccagctctctgaatgtccttaacgtgggtggcaaggctgctgaagatcgctttcaaggcgtctctggccgagcctctttttgtggaaaacgacagcagcagcagtggcctggaagacgccaccgctaactgaccccgacctggccccgctccaggatgggactgccgagtgtggcccggagctggcccgggacagccagggcggcagggagggcccctggccgggagccgcagcgctcactcatttctcctgcgtctgtgtgcataggacatgatactaataaccacacggctggcgtgaccttggggctggggctgggcctaagctggtgccctggtgcggcgtggtctctcccaggagacctggggcatgagctgggcccacggctcccttcccatgtgtaacttcctcacgttgtgtgcgataacgtattttattgtacatttttttaaattaaaagtttatatgcctta

SEQ ID NO: 146847 - DNA, 2271 bp, Homo sapiens
  Payload ID: 9052
  Gene Symbol: KLC1
  Gene Name: kinesin light chain 1
  Uniprot ID: Q07866
  ENST ID: ENST00000347839
  CDS Start-End: 260-2146
cggccgagcgggactggctgggtcggctgggctgctggtgcgaggagccgcggggctgtgctcggcggccaaggggacagcgcgtgggtggccgaggatgctgcggggcggtagctccggcgcccctagctggtgactgctgcgccgtgcctcacacagccgaggcgggctcggcgcacagtcgctgctccgcgcgcgcgcccggcggcgctccaggtgctgacagcgcgagagagcgcggccctcaggagcaaggcgaatgtatgacaacatgtccacaatggtgtacataaaggaagacaagttggagaagcttacacaggatgaaattatttctaagacaaagcaagtaattcaggggctggaagctttgaagaatgagcacaattccattttacaaagtttgctggagacactgaagtgtttgaagaaagatgatgaaagtaatttggtggaggagaaatcaaacatgatccggaagtcactggagatgttggagctcggcctgagtgaggcacaggttatgatggctttgtcaaatcacctgaatgctgtggagtccgagaagcagaaactgcgtgcgcaggttcgtcgtctgtgccaggagaatcagtggctacgggatgaactggccaacacgcagcagaaactgcagaagagtgagcagtctgtggctcaactggaggaggagaagaagcatctggagtttatgaatcagctaaaaaaatatgatgacgacatttccccatccgaggacaaagacactgattctaccaaagagcctctggatgaccttttccccaatgatgaagacgacccagggcaaggaatccagcagcagcacagcagtgcagccgcggctgcccagcagggcggctacgagatccccgcgcggctgcggacgctccacaacctggtgatccagtacgcctcgcaggggcgctacgaggtagctgtgcccctctgcaagcaggccctggaggacctggagaagacttcaggacacgaccacccggacgtggccaccatgctcaacatcctggccttggtgtacagggatcagaataaatacaaagatgcagctaacctactgaatgatgccttggctattcgtgagaaaactttgggcaaagatcatcctgcggtggcggcgactttgaataaccttgcagtcctttatggtaaaagagggaagtacaaagaagcagagccgttgtgtaaaagagctctggaaatccgagaaaaggttttggggaaggatcaccccgatgttgccaagcagttaaataacttggccttactgtgccagaaccagggcaagtatgaagaagtagaatattattatcaaagagccctcgagatctaccagacaaaactgggacctgatgaccccaacgtggctaagacgaaaaataacctggcatcctgctatttgaaacaaggaaagttcaagcaagcagaaacactgtacaaagagattctcactcgtgcacatgaaagggagtttggttctgtagatgatgaaaataaacccatctggatgcatgctgaagaaagagaagaatgcaaaggaaagcaaaaggatgggacatcttttggagagtatggcggctggtacaaagcctgcaaagttgatagtccaactgttacaaccactctaaaaaaccttggggcactttacagacgtcaaggcaaatttgaagctgcagaaacgttagaagaagctgctatgaggtctcgtaaacagggtcttgacaatgttcacaaacagagggtggcagaagtgctcaatgaccctgagaacatggagaagcgcaggagccgtgagagcctcaacgtggacgtggtcaagtacgagagtggccctgacggaggggaggaagatggcactggatctttaaaacgcagtggttcctttagcaaactccgggcttccattagacgcagcagtgagaagctggttaggaagctgaagggaggaagttcacgagagagtgagccaaagaaccccggcatgaagcgtgccagctctctgaatgtccttaacgtgggtggcaaggctgctgaagatcgctttcaagaacgaaataattgtctggccgactcgcgagctctgagtgccagccacactgacctggcccactgagagccagcagggctaggtaacctgtcttgggagtgtgagaccgccccgccctgccacgcccctcaccgccctgcccggaggcgccagccgcactccttggcttcctttcctagatagtgacgtcc

SEQ ID NO: 146848 - DNA, 15091 bp, Homo sapiens
  Payload ID: 9052
  Gene Symbol: KLC1
  Gene Name: kinesin light chain 1
  Uniprot ID: Q07866
  ENST ID: ENST00000348520
  CDS Start-End: 320-2041
ggcggggcgccggggggagcaacactgagacgccattttcggcggcgggagcggcgcaggcggccgagcgggactggctgggtcggctgggctgctggtgcgaggagccgcggggctgtgctcggcggccaaggggacagcgcgtgggtggccgaggatgctgcggggcggtagctccggcgcccctagctggtgactgctgcgccgtgcctcacacagccgaggcgggctcggcgcacagtcgctgctccgcgcgcgcgcccggcggcgctccaggtgctgacagcgcgagagagcgcggccctcaggagcaaggcgaatgtatgacaacatgtccacaatggtgtacataaaggaagacaagttggagaagcttacacaggatgaaattatttctaagacaaagcaagtaattcaggggctggaagctttgaagaatgagcacaattccattttacaaagtttgctggagacactgaagtgtttgaagaaagatgatgaaagtaatttggtggaggagaaatcaaacatgatccggaagtcactggagatgttggagctcggcctgagtgaggcacaggttatgatggctttgtcaaatcacctgaatgctgtggagtccgagaagcagaaactgcgtgcgcaggttcgtcgtctgtgccaggagaatcagtggctacgggatgaactggccaacacgcagcagaaactgcagaagagtgagcagtctgtggctcaactggaggaggagaagaagcatctggagtttatgaatcagctaaaaaaatatgatgacgacatttccccatccgaggacaaagacactgattctaccaaagagcctctggatgaccttttccccaatgatgaagacgacccagggcaaggaatccagcagcagcacagcagtgcagccgcggctgcccagcagggcggctacgagatccccgcgcggctgcggacgctccacaacctggtgatccagtacgcctcgcaggggcgctacgaggtagctgtgcccctctgcaagcaggccctggaggacctggagaagacttcaggacacgaccacccggacgtggccaccatgctcaacatcctggccttggtgtacagggatcagaataaatacaaagatgcagctaacctactgaatgatgccttggctattcgtgagaaaactttgggcaaagatcatcctgcggtggcggcgactttgaataaccttgcagtcctttatggtaaaagagggaagtacaaagaagcagagccgttgtgtaaaagagctctggaaatccgagaaaaggttttggggaaggatcaccccgatgttgccaagcagttaaataacttggccttactgtgccagaaccagggcaagtatgaagaagtagaatattattatcaaagagccctcgagatctaccagacaaaactgggacctgatgaccccaacgtggctaagacgaaaaataacctggcatcctgctatttgaaacaaggaaagttcaagcaagcagaaacactgtacaaagagattctcactcgtgcacatgaaagggagtttggttctgtagatgatgaaaataaacccatctggatgcatgctgaagaaagagaagaatgcaaaggaaagcaaaaggatgggacatcttttggagagtatggcggctggtacaaagcctgcaaagttgatagtccaactgttacaaccactctaaaaaaccttggggcactttacagacgtcaaggcaaatttgaagctgcagaaacgttagaagaagctgctatgaggtctcgtaaacagggtcttgacaatgttcacaaacagagggtggcagaagtgctcaatgaccctgagaacatggagaagcgcaggagccgtgagagcctcaacgtggacgtggtcaagtacgagagtggccctgacggaggggaggaagtgagtatgagcgtagagtggaacgggggcgtctctggccgagcctctttttgtggaaaacgacagcagcagcagtggcctggaagacgccaccgctaactgaccccgacctggccccgctccaggatgggactgccgagtgtggcccggagctggcccgggacagccagggcggcagggagggcccctggccgggagccgcagcgctcactcatttctcctgcgtctgtgtgcataggacatgatactaataaccacacggctggcgtgaccttggggctggggctgggcctaagctggtgccctggtgcggcgtggtctctcccaggagacctggggcatgagctgggcccacggctcccttcccatgtgtaacttcctcacgttgtgtgcgataacgtattttattgtacatttttttaaattaaaagtttatatgccttatgctttacttgaaagtttttataagacctcttagaagtgggggaaggctggcgggcgcggtggctcacgcctgtaatcccagcactttgggaggccgaggtgggcggatcaccaggtcaggagatcgagaccatcctggctaacatggtgaaaccccgtctctattaaagatacaaagaattagctgggcgtgttggtgggcgcctgtagtcccacctactctggaggctaaggcaagagaatggcgtgaacccgggaggtggagcttgcagtgagctgagattgcaccactgtactccagcctgggcgacagagcgagactgtcttaaaaaaaaaaaagagaagtgggggaaggcccacccaggagctgctctgccaggccacagccatgtctagggtgggctggacatggcagccgctccccctgcacagggtggaatttccttacttgcctttggtcaggggtttactcccaaacgtcccatcttttcttctgcgtcttttctacttcatcacttctccctcccaggatgatgtctataaactaagcactgacagctcacagcactgctgccccagctgcagggatgggtcccagcctctcttgcctgcttcttggctacaggacggactccactggcccccggtgagtggcccctgctctctgcaaggccctgccataggtccctcctccaagcccagccagtgtctgcagggaagccagcagccaggcagtggtcaaggatctgaggtcacctgtctgagctgggtgcccagcaggccttggccaggtggagcccctgtgcccctagtgagggccgtcttcccctcaggggcaaggggaaaccaacacagctatctcaccagggcagcagcctggagagcaggtcgcatccttctcagggcggtggtctcctggggcagctggtcaggggcccacagcccagaggaggtccttgccacccgcctggggcttctcttccccactccgtcttcatgggcaaggttgacagatggtgtacaggcgcccagttacatctgagtttcagatcatgaagaaagttgatctgaatatgggcatcctcattctagaacacgcttcaaagctgcctgagattcagatgtaactgggtgtcgcagcctgccgccctgcctgcctggcccacagccactcctggccaggattctgtttggccaaactgccgtcaggctcctgagcctcctcctaggcccatctgtgcacgtcctcatgaaatccagttttggcaatccctgctgagattgtagcaggacccctgctctccgtatccagtcgccctcagtagctgactggtccatcctccacagtccccagaggccgtctgatccccaaggcacaccttcagcaagggtcctggcaggatgctttagccagaattccctcccctgccagttcctctcagtcactctccatcctctgaccccacctgctcctcgggcgtaaacccccatgacccatgctgtgttcagagctgagccccaactctccctgccctgctgtgagaccccattgccgtggtggctacacctgccccaatggtcctgaatagcttgccttgggggtgtcatggggcttctcccacactcaccacatcggccacgtgctcgatgaagatctggctgccaaatcggagcttctgaagcagctctcctggaacgtcagtgcgcagccgcggctgctgggccatgagctgctgcaggcgcttgtgcgggaaggcgtcttccgtgcagatgtagacggctcctgggaagcaagagtgcctgatgtgcccaggggactccagacgggcctgtgactgccacacaaatcaagtgcagatgtctcccgccatttctaactctctgcccctcacaggttctttgcccctcgcctggggagggaggaggctggtgctttttctcaccctcccactggcagccacctccggggccaggtgacccctcaggaggaatatgggctgggtctccacttctgacacccaggcaaggacttcccctgtcctgggccctgggctggaatggccacagatgggaggcctctcctgctccaccctgcccctccttccccctgtgaacctccgttccccactgcagggcagggagcaagtggcagcatcagggcaacgccttctggaaatggcccctgagccccgacacatggccaccctcaaggcccccactgagcaagcgtttcctctcttcaaagctcctgcaatctgggctccatggtgaaattcaaaaagccagcttgaaaagacacgtgttggtgaggatgtgtaggaggcagacccctgacccctgtgcactgccgctaggaatgtaaaatggtgcagctcggaaaacaatcggtacttccttaaaaagttaaacaaatcacatgactcagcagccccactcctaggtagatacccaagagaaagaacgtccaccgtagcacgtttcatgacagcccggggggagacggcccaaaggccatcaactgaggagtggacgaatgaagtgcggcccatccttacagtgggatgatcgaatcttaaaagggaaggcagttctgacacctgctccagcacggatgaacctcgaaaacacaatgccaatgcaggaagcctgtcacgagaccacgtgctgtccggctgcacttgcatggagctcccaggacaggaagagtcacaggtagggaaaggggaggcaggctgctgggggtgggggctgactgctcatgggtagggtttccttttggggtgagggaactgttctggaattggatagtggtgacgggcacagaactttgtgcttctattaaaagccactgaatttatttattttattttaatttttgagagacaagagactcactctgtcgcccaggctggagtgcagtggtgcgatctcggctcactgcaacctctgcctcccgggttcaagtgattctcctgcctcagccttctgagtagctgggattacaaggcgtgcgctaccacgcccagctaatttttgtatttttagtagagactgggtttcaccatgttggtcaggctgctctcgaactcctgacttcatgatccgcctgcctcagcctcggcctcccaaagtgctgggattacaggcatgaggtactgcgcctatcaggccgaactgtacacttttagagggaattttatggcatgtaaattacatctcaatttaaaaaacaggaaggcttagggggactgatttgagtaataataaaactccagtttcctgcaaaacaaaaacaaaaagacaaggccggcgagctctctaagcactgactatgccaggaaggctgcccagccaggaccccgtggcccacggggcgtcgtcctgttcctgcagtggcacatgcagttgtgggagagccagtgcccccacgccgtgtcatgcagcctgtttgtgagtgtccgcgtaacctttaattctgagctgattttgctttgacagaatttcaaacgtaaagaagagttgcaaaaatgggtcaggaaccccccgccccattctgtgtcagaactaagcttctgagaagcatctggcccgcttgaggccaggaacgtataaatactgccttgggaggccacatcccttttgtggctggttcccttccccaccagtgtccccagcagtgactgtgcccctagtcaggagccacaggaaggtcggggccctgggcttcctccgtcctgttggctggagagaggctgggctggaaggctcggaagcaggtggaaccggtcaagcagcgtgtttttgttggggtgacgttatgtaggggctgcacagtcatggggacatcgtgaagctggcaggagggtggctgtggacagcccagcggtgggcggggccccagcaggcctgggagagcctcacgcggcttaagcacgggagtcggaatcacttcagagcccgcctgccgctttcttttcaaaattcgggcctttagattggatccaggaaaggaagtcatttccccaggaaagcacatctgacccctaaccttgcatgtggtcacggtggccgtggggccccctcccttcccctggcccgcaaggctggactgtgctgtcatcccgcagcagtcactgggctgggcacagctgggggattcagggagggtgtcctaaggcttctgtgtccctgggtatcggggagtgtgggcttcactgaaaaggccaacggggtggaagctgagggggagtcattgcacaaatcagatttgcacgaagcctggcacggaggacgctggagaatgagggcggctcccgtcccgttcctgagcacgctcgagtcccgcctccacctcacagcagctcttccgtgcggtaagcgggagactcccattttcaaggccaactcctgtcctcccggcttctggctgtctccaggctcatccccaagaccagccgcagggactcaggcacctgacaagagggtgccctcccctgggctgcagggacaaaaatgcctgtggcgtgagcagaccccagctgggctctcaggagacccctcaccctccacccgacacggaggctcaggagacccctcaccctccacccagcactgaagctcaggcaggcacagcacaccctgggtcctggggatgacgctgacctgagggtggcagaggtgaggttcccagccacaccgctgctggcaggtcaggcccgtgaggaggtggctggctgggcctgtgggtccagggcctggggtccggccctgtgtgggaagtgagcctagcagatgtgctcggaggtgccaccgatgaaaaaatactgccactctgttcacgtggagtttaagacaacgtgggaatcgcatgttgacaccagggaattagtttaaaagttaaggagctactgagaaacatctctcctcctcacagctcacagtttaaaactacgtgaacttttaacacctgagagacccaggcaggcatgctctgaacgctttagtccaatgcagggaaccctcgtttcacagacagagcgtacaggctcacggggccgcgccaggagcatacctggcctggcggcggggcacccggggaaaggctgtgctgccctccctgcgttgctggctctgtggactctgggcttggcagctgtgcggaacgtgggccggcatcgctgtgctcagccagcgacccctgggggcctagctctgctgagggccggctgcctggtggtggggttcgtaccctcccacccctcctgctgtcagctgagcccagcctcacttccccctccctgttctggaaggagcgagggcaatcagggtgagaaggagggagacgcaatggtaggaacagcgcaagaggcggccactgccccacctcaacggaaagctgtcccacacaaagcaggggccgcccacctgcccagaccccacggaaggggtggccactcaccagcctccaggcctccgtgctgccgcgggaactgcacagccaggcagagctgcagcgccagctgggtcttccctgccgagctgcgtccggccagctcagtgatgccgtccaggggcaggccaccgcggagcagcgcgtccagcaccgggcagcccaggctcaggcgctggtgctgcgtggggaaccgctccttctgctggtgcagctgcagtgctaaagggcagggatagtgtcaggcctgactctcctgggcctgcgggcagggctggggactgcgggaggcatggtcagcctgcctgtgccaggtgcagtgtggctggagcacaggtgcctgcggtcatgggggtgagcaaggtgctgagggcagggaggggggcccagccgggaagggcgggtgcacctgagatgcagagtcagggggagccccagggccaccatcacatgcccgcagggatccccctatggggcaattgcagcaccagacgccttcagccaaagcttccagagagccccgaggcgctccctaacagcctccatgtgaagaaaaaggcacagctctgtccagctgggatgccctggggtgctgaacagttctcaagcggctttaatgggctcccgcaggcgcgcacacatgcacaccacatgccgtcagttctctgtgacagataccattctggagcaatgctggtctcagcctcttggctaaagggccttggatgagccatttgacacagcctcctccacgacaccgaagcccctcagggcaaggctcaaggtgggacatgcggtgcaggctgcgctcttggcctggggcctgggccgggaggagcagcccctcccttggagtctgcacactgccttgggcaccccgtccaggtggagcaggccaccctgactgtgaggcctgcccagagccctgcccacagcaccgtgtgtgtggccgtggcacctgcccaccacggcagccccaagttcagcacgttcctcggggcctgggccactgagccacctgcaggggagagagggccctgctcatgccaggaccccgctgcctactagggcctgctgagatgcagggatggaaaccttgtccgtccaggcgcatggggttccctgggtacctccttcccctgctgagacctggtttcccacacgtggtggtgggaccgtggccagggccccatctcacaccgttcccaccctgccagagcctgaagggctctgggtgctgactgccaaatccacccctgcttcctgcaccccctcctctggtccatggagcaaggtccccaggaggtcccacagcccgtgtccacctcacgcatcttctgacccgatgctgtgaccacagccccatgggtgtaggacaagcaagatgggaactctggggctggagcagctgccacacgccctgaggctggtccctgggtgaagtctgcacagcccctgccctgcaccactgggaccatgatgctggagccacatgtcacccctggcagagatgccagggcccacctacctgtaaggatgctgcttccccgcaagtgtaaggaggccgttctcagcaagtgccagacctcggggctggagaggttggtcagtctcttcaagtctggtccagaaaagtgtaaaacctcctttaccgatttcagtttggctgaaataacacagataaattacaggaaaatgtcagactgtcacaacgcagggcaacacagtgacaaaaggtgctttgttaagagcactgtgagagcaccgtgcttccgattctggggacaaggtgggtagggaccggatcccctgctccctggaaaccctggacacagtgtggccgatgcacaggcacgaggaaagggctgctggacactgcgccctgagtcctggcactcggacagataccagcctcgtgagctggggcagaagccagaagacagggctgggcaggtcccggtgctgagagcaggttccggtactgagaagaaacgacaggcacccagttccatgccagctggagacagtgctccagaagggggcaggaaaaaaccagcaccgagctttccaccacccgcccaccaggcatggatctgggctgagccgcgggagaggacatgtgccctggggaggggagcgctgggagggtagcagagcccaggtccaaacgccagctgcgcagggcagtcagggcagggggcagagcatgtgcgaatcagaacggcggtggcagcagttacaggggtgcagatccccaggacctgccatctggggaggagggcaaggaagttaattttggactcagataagtgcatcactttctaatttcaaacttgtagaaagacgacaaatgctgcagactgatcagccgatcagggaagtgcgaggaagcgcacacgagagggagcagtggtggacgaagcgccccacccggccacggggacttacacccaccacatcagaaaccccctcaacacgggtgcgctgaacgctgcagtgaaaagacaaccattgtgcggctggaaaacagtaagcactggtgtgatcttcagaaaagccacacagaaaacacaaggagatggaagggtgggaatgaagaaagcgcccctgggtttcaccagatccagcggagggggcttcccgcagacaggctgctccagaaggctctgtgggccctgaggactcaccgggatcggggctgtggcagggcgctccccctggtaagcctcacagccccagcccccttcacagccgtgaagtctgcagggacttctggaaacattggtttttggataagagacacaggtgagaaaggaactccctggctgagcccttctctgtccctggtctgcaagcgtcgtgtctgcagctgtggcagcagctgtgatcacaaggccaccaacaggaggataaaaaccaacagccaaggatggagggtcaggacagcgaggccctgccctgtcaccaggctgctgcggcagctccatgagcactccggcttctcgccacagacagcgtgctgaggttcacgtagctgaggcccggggagacgggggaggatggaagctggcaggagggtccccggatgacagccaggcggctggcatggggagcagggggcaggggctgcacgtggggcctgagttttgagcatttactaactcgggcgaaaaaagatgctgtaagaaagaaaaccatcccctgcaccaccacaccaggttcaacaatggccagtatgcacccagtcacaaccctgacagctgatgtcacccaaactaggttctaagtatgggcagggagctggggggagaggaagttggggtacacaggtgtaggcacgctcagtcctcacagcccccaagagaagtccatggataatcagtaacactgacaaatcaaacattacaacataaacacgtttaggagcccagatgtaaatattttttaaaaaaataactaaaagacggccgggtgcggtggctcatgcctgtaatcccagcactttgggaggctgaggcgggcggatcacgaggtcaggagatcaagaccatcctggctaaaacagtgaaaccctgtctctactaaatttacaaaaaaattagccgggcgtggtgactggcgcctgtagtcccagctactcgggaggctgaggcaggagaatggtgtgaaccccgggaggcggagcttgcactgagctgagatcgcaccactgcactcaagcctgggtgacagagcgagaccccgtctccaaaaaaaaaaaactaaaagactttatgtggctccattttaccttttagacaatatgcatgtattactttgataaaaataaaagtaactgaaagaaatccatgtagttaagaacacacacacacacacacacacacacacacctgaaaatcccatagtacatcccgccctcggtttaataatcagggtaggcaaaggaaggaaggcttagccagccagcgttttgttaacctgccttatataaactgcacacacccacccacaccctttatgtaaatagaaataaatgtacctttcttaattgcagcaataattctgggattcaggtccagtagatccaaatccattttgtcggtgggctggccaccaggatgaataacttcccaggaaagacagaacaatggatgcaaattctgaggcactcgccttcaattcaaagcctgtgggaggcccgaaccagggaagtgacagcagccgaggtgtccgtgtcatcggggctctgtcactgagggtggaggagacttcactgtagagggaaggctgtctagctacatctagggcaacatgtctgtcatttacctctaagaattatttagcagcttagaacccattccagacactgatgcatttgaaaaaccccccaaacccaccacatttacctcctgtggaaagtgctagaaataagaccatcctcctgcagcagttgagtgccctgcccgactcacctctctggggcttggggatgacccgcgtgtttttggctgacttgactgaggcatctcttgcactctgcagtttaatttcccttaagtgtctccctggggactctggaaagagtgggaaggtgagtctgggattggcagggtgctcagggatccaaacatcagtcgcccccagcagccaacagcagaagacagcttcctgtgggacgggaggaaggtgctgtggaccccacccagcctctcccaggaagggagctggcagccattccacagcccgagcctggcccagcaagggagaagctcagctcttctcccctccggcctcagcaggctgctcagggactcagcctggggtcacataaggcctttccaacaggccactctgcatcccctgtcggcctcccaaatggtgagaccaagagtgtccaggacatggggaaactggaaggcagcagcctcgagggccgggtccaggatccatgtcctccagtgaggcctggcgcccttggccgtaacccagcagaggaaagggcgggccgtggacttggagaaggttttcccttggaccacacagaatgcggcactggcctggacacgatcacgctggtcactcgtatgcccatgttcagcctgctcagggagacaggaacagactacaggagcagcaggctgaggcacgcccccaggcaccccgtgaggcgggcagggcagggaagctggtgctccaggatgcgtttcctgcccgcgcaccaggcttggctcccgggcccccacagcctgtgggttttctgagcaagggacagggaggtgcccaggcctggttgcccaggcaggcctgacaggaactggcgagaagccaccctggagggccgggcgcaggccaaggcagggcggtggggcgctgaaccagctccaaactgctggcagagctggccagagtgaggaagtgaggttcccaagcacagaaggcaaatcaaaaaggaatgccacctccagggaagacactacactgccaaaggagatgcggccttgcccggctcgaaaagaggtcattttcagaacatgggactctccaagccctgaggacaggaggcagcctggggagtatgaacctcgcacctggtaggggaccccacacccgaggtaccacccaaaacacagcccagatctgcacggagggatggttccctgagcaggcgtgactgtcacagacaggctgggcctgggggctgtcgggaggctgctgtcccaggctgggtctggatacaaaacttggactgtgtcaagcagcgggacgctggcaggagcaccgggaaggccagcacgtggctgcaacgtctcccgccttcaggacgcgggccgaggccaaggcacctggaagcagagtgtccactgacggataacagactcaccggttggccaacggcagtccggctcctgaggctcctcctgggccctctgtgcacatcctgctgagaacttggtttaacaggcctggctcaaagtctgtttagtgacgacctcctcccgtgtcccatcacccttgacagctgattaggcgcctcatcttccactgtcccccgggcggcctgatctggcaggtcagttgaacctgcatccccttcgcccctgggggttcctcttagcaaccttccatcctctgcccctgcccagctctggagctgtaagccgccaccagcccatggcctgttcagagctgagcccagcctctctcccactgcaagaccgcagtgtggtggttcccacatctctcaaaggttctgaatgaaagcctggtctctgcctaacgtgctttcacagatatcctggaatattttccctttaacaccaagcacctgccgcatcccagacactggcctgggagctccacagacagcccggcacatgcctctgtcctctcgccgctgtgaggggcaggggtgtgaccagcccatctctctacaccggggtgaaggccacacacagggagcagcccacagcaggcaaggggctggcccaagacagacctgtatgtcttcctgcagcacccgagctgagcaatgacttcagggggagagctgatgtcacgtgctgctaggtgagtacggacggtcacaccagagctgttaggctcacacaccagactctggaaatgccgtggttactgcctggagctgctctgagccttccgaggtggactcactcctctgccttgggccctgggacctgctgtgtagctttgaagtgattcacagcacttacatagtctgatgttttggggtgacctgacccccctgcaagagtgtgatgtcttatcagaccacatatgtgaggacttgagtgaactccgcaaccttgggaatgccacttaaaccttgtcagacactcccttatgtgagttactgaccctgactgctggactgcaaaaacagacatcagcttgaaggttgtgcagatgctttgaggcaagctatacgctgctggcctgggagctggacctcggtcccagcttctcagagagctcccgctctcacgctctccactgctaccaaggcaaacctcgaactctcaccagatctcactctccaggggcccgctccatcccagcagagcaaccggaccctggccgttctgccactcacctccctgccgtgaatgcaccccatccatggaggccctgcttccctgccaggtgtcttcacctcctcccctctcctcccctctgagcactgtgaacccgagaacaaatcttctttgacaataaaccgtgtgattcgtggaatcata

SEQ ID NO: 146849 - DNA, 2322 bp, Homo sapiens
  Payload ID: 9052
  Gene Symbol: KLC1
  Gene Name: kinesin light chain 1
  ENST ID: ENST00000380038
  CDS Start-End: 294-2024
gagacgccattttcggcggcgggagcggcgcaggcggccgagcgggactggctgggtcggctgggctgctggtgcgaggagccgcggggctgtgctcggcggccaaggggacagcgcgtgggtggccgaggatgctgcggggcggtagctccggcgcccctagctggtgactgctgcgccgtgcctcacacagccgaggcgggctcggcgcacagtcgctgctccgcgcgcgcgcccggcggcgctccaggtgctgacagcgcgagagagcgcggccctcaggagcaaggcgaatgtatgacaacatgtccacaatggtgtacataaaggaagacaagttggagaagcttacacaggatgaaattatttctaagacaaagcaagtaattcaggggctggaagctttgaagaatgagcacaattccattttacaaagtttgctggagacactgaagtgtttgaagaaagatgatgaaagtaatttggtggaggagaaatcaaacatgatccggaagtcactggagatgttggagctcggcctgagtgaggcacaggttatgatggctttgtcaaatcacctgaatgctgtggagtccgagaagcagaaactgcgtgcgcaggttcgtcgtctgtgccaggagaatcagtggctacgggatgaactggccaacacgcagcagaaactgcagaagagtgagcagtctgtggctcaactggaggaggagaagaagcatctggagtttatgaatcagctaaaaaaatatgatgacgacatttccccatccgaggacaaagacactgattctaccaaagagcctctggatgaccttttccccaatgatgaagacgacccagggcaaggaatccagcagcagcacagcagtgcagccgcggctgcccagcagggcggctacgagatccccgcgcggctgcggacgctccacaacctggtgatccagtacgcctcgcaggggcgctacgaggtagctgtgcccctctgcaagcaggccctggaggacctggagaagacttcaggacacgaccacccggacgtggccaccatgctcaacatcctggccttggtgtacagggatcagaataaatacaaagatgcagctaacctactgaatgatgccttggctattcgtgagaaaactttgggcaaagatcatcctgcggtggcggcgactttgaataaccttgcagtcctttatggtaaaagagggaagtacaaagaagcagagccgttgtgtaaaagagctctggaaatccgagaaaaggttttggggaaggatcaccccgatgttgccaagcagttaaataacttggccttactgtgccagaaccagggcaagtatgaagaagtagaatattattatcaaagagccctcgagatctaccagacaaaactgggacctgatgaccccaacgtggctaagacgaaaaataacctggcatcctgctatttgaaacaaggaaagttcaagcaagcagaaacactgtacaaagagattctcactcgtgcacatgaaagggagtttggttctgtagatgatgaaaataaacccatctggatgcatgctgaagaaagagaagaatgcaaaggaaagcaaaaggatgggacatcttttggagagtatggcggctggtacaaagcctgcaaagttgatagtccaactgttacaaccactctaaaaaaccttggggcactttacagacgtcaaggcaaatttgaagctgcagaaacgttagaagaagctgctatgaggtctcgtaaacagcgaagtatctcagaaatacctaagaaaatcttaagtgctaatgggtcaaaccattttcccctgcctggctcacagggtcttgacaatgttcacaaacagagggtggcagaagtgctcaatgaccctgagaacatggagaagcgcaggagccgtgagagcctcaacgtggacgtggtcaagtacgagagtggccctgacggaggggaggaaatgaggaaaatgaagctcgggctggttaactgacttgctcagcgtcccatggtgagtccgagcgggcggggcgcaggccctgccgtctggcgcttctgtcgagacgtcggctttccaacctggcaggacccaggacgcattgctgcctgtggaaattaattttcttttggattatcaactgcatgtttaaaatgggctgtagacttttaaagtccgtggtttcctaaagtttctgaaatgtctaaaatgtgtttttaagagaatgaaagtcatacctgtagcctttattttggtccctatgtttttcattgcataatctccttatatacag

SEQ ID NO: 146850 - DNA, 3250 bp, Homo sapiens
  Payload ID: 9052
  Gene Symbol: KLC1
  Gene Name: kinesin light chain 1
  Uniprot ID: Q07866
  ENST ID: ENST00000389744
  CDS Start-End: 270-1952
gcggcgcaggcggccgagcgggactggctgggtcggctgggctgctggtgcgaggagccgcggggctgtgctcggcggccaaggggacagcgcgtgggtggccgaggatgctgcggggcggtagctccggcgcccctagctggtgactgctgcgccgtgcctcacacagccgaggcgggctcggcgcacagtcgctgctccgcgcgcgcgcccggcggcgctccaggtgctgacagcgcgagagagcgcggccctcaggagcaaggcgaatgtatgacaacatgtccacaatggtgtacataaaggaagacaagttggagaagcttacacaggatgaaattatttctaagacaaagcaagtaattcaggggctggaagctttgaagaatgagcacaattccattttacaaagtttgctggagacactgaagtgtttgaagaaagatgatgaaagtaatttggtggaggagaaatcaaacatgatccggaagtcactggagatgttggagctcggcctgagtgaggcacaggttatgatggctttgtcaaatcacctgaatgctgtggagtccgagaagcagaaactgcgtgcgcaggttcgtcgtctgtgccaggagaatcagtggctacgggatgaactggccaacacgcagcagaaactgcagaagagtgagcagtctgtggctcaactggaggaggagaagaagcatctggagtttatgaatcagctaaaaaaatatgatgacgacatttccccatccgaggacaaagacactgattctaccaaagagcctctggatgaccttttccccaatgatgaagacgacccagggcaaggaatccagcagcagcacagcagtgcagccgcggctgcccagcagggcggctacgagatccccgcgcggctgcggacgctccacaacctggtgatccagtacgcctcgcaggggcgctacgaggtagctgtgcccctctgcaagcaggccctggaggacctggagaagacttcaggacacgaccacccggacgtggccaccatgctcaacatcctggccttggtgtacagggatcagaataaatacaaagatgcagctaacctactgaatgatgccttggctattcgtgagaaaactttgggcaaagatcatcctgcggtggcggcgactttgaataaccttgcagtcctttatggtaaaagagggaagtacaaagaagcagagccgttgtgtaaaagagctctggaaatccgagaaaaggttttggggaaggatcaccccgatgttgccaagcagttaaataacttggccttactgtgccagaaccagggcaagtatgaagaagtagaatattattatcaaagagccctcgagatctaccagacaaaactgggacctgatgaccccaacgtggctaagacgaaaaataacctggcatcctgctatttgaaacaaggaaagttcaagcaagcagaaacactgtacaaagagattctcactcgtgcacatgaaagggagtttggttctgtagatgatgaaaataaacccatctggatgcatgctgaagaaagagaagaatgcaaaggaaagcaaaaggatgggacatcttttggagagtatggcggctggtacaaagcctgcaaagttgatagtccaactgttacaaccactctaaaaaaccttggggcactttacagacgtcaaggcaaatttgaagctgcagaaacgttagaagaagctgctatgaggtctcgtaaacagggtcttgacaatgttcacaaacagagggtggcagaagtgctcaatgaccctgagaacatggagaagcgcaggagccgtgagagcctcaacgtggacgtggtcaagtacgagagtggccctgacggaggggaggaagtgagtatgagcgtagagtggaacgggatgaggaaaatgaagctcgggctggttaactgacttgctcagcgtcccatggcctagccgcccgtgactctcacactgtctcctgcatgacgggtggcgcctcccgcagcttcccttctctctccagtgctgcccgctgtgtctagcagcctctaggatcttgtcagagctgcacctctctgtgaactggccattcctttcggtgctgctgtcctttttgggggggttcctgatttctgtatacatgtagctttgccagatatgtacttagtaatataaactgtattaataaaatccatttactgtgtaatacacgagtttaaaaattaagagcgattagctgttcactttggtaacaggtagttaagtgtcacacaaggtgttgttgcaatggcatgacggtgacctgttgacgtaactaagccttacagcaaggcatgtgccgcacgtgctccgtggtacttagagccctgggggccccgctcggactccgggtctccctaggatatgccccagtagcatttgctgtgtagtctgtgtgtgaaatttgggcattctgcttttctctactaatcttgaagtgctcagtgatttgtgtatttgtgtctttctaacttctaataaactcactccgactgacctgtgtcttggtgtctgtctgcttggtagaacttctcactctttatccatgaaacgccgcatggcacagctgctaggggtcatggggtgacagttcatctcaccaaggagttccttccaagaagaaatgctgctgtatgcacatcttcttcactctgtgttttttattttcatgttcagatactgccaagtatttcacttattaatacctgaatcaattaagatgagagctgggcactctcacctccctacaaggttgtctgaggatttttagttatttgtatagaatgggcattttatttaattttccaaccacctttgtagttaacatttaatgaaactgttctgtaaaatttactgaaggaaacagtacctccaactattgcatttagacgaaactgttaaaaggaagagcctctgtcagatccaaatggtttgggtcctgtactgtgttacttgtaccagatgcttatgtatctgttaaatgtggaagtcgattttgatgatattcttagaagctgctttaattttcctgagactttgtgtgttggcttttgtctcaaaatagcaggattcacattgcttttgggatgcgatcacttgtttgaatgagcttccttatgtccaaaggttttcatgatcattggattatctttaatgaaacttaaaaagaacaatttctagttaaagta

SEQ ID NO: 146851 - DNA, 2416 bp, Homo sapiens
  Payload ID: 9052
  Gene Symbol: KLC1
  Gene Name: kinesin light chain 1
  ENST ID: ENST00000445352
  CDS Start-End: 200-1849
ctcggcggccaaggggacagcgcgtgggtggccgaggatgctgcggggcggtagctccggcgcccctagctggtgactgctgcgccgtgcctcacacagccgaggcgggctcggcgcacagtcgctgctccgcgcgcgcgcccggcggcgctccaggtgctgacagcgcgagagagcgcggccctcaggagcaaggcgaatgtatgacaacatgtccacaatggtgtacataaaggaagacaagttggagaagcttacacaggatgaaattatttctaagacaaagcaagtaattcaggggctggaagctttgaagaatgagcacaattccattttacaaagtttgctggagacactgaagtgtttgaagaaagatgatgaaagtaatttggtggaggagaaatcaaacatgatccggaagtcactggagatgttggagctcggcctgagtgaggcacaggttatgatggctttgtcaaatcacctgaatgctgtggagtccgagaagcagaaactgcgtgcgcaggttcgtcgtctgtgccaggagaatcagtggctacgggatgaactggccaacacgcagcagaaactgcagaagagtgagcagtctgtggctcaactggaggaggagaagaagcatctggagtttatgaatcagctaaaaaaatatgatgacgacatttccccatccgaggacaaagacactgattctaccaaagagcctctggatgaccttttccccaatgatgaagacgacccagggcaaggaatccagcagcagcacagcagtgcagccgcggctgcccagcagggcggctacgagatccccgcgcggctgcggacgctccacaacctggtgatccagtacgcctcgcaggggcgctacgaggtagctgtgcccctctgcaagcaggccctggaggacctggagaagacttcaggacacgaccacccggacgtggccaccatgctcaacatcctggccttggtggatcagaataaatacaaagatgcagctaacctactgaatgatgccttggctattcgtgagaaaactttgggcaaagatcatcctgcggtggcggcgactttgaataaccttgcagtcctttatggtaaaagagggaagtacaaagaagcagagccgttgtgtaaaagagctctggaaatccgagaaaaggttttggggaaggatcaccccgatgttgccaagcagttaaataacttggccttactgtgccagaaccagggcaagtatgaagaagtagaatattattatcaaagagccctcgagatctaccagacaaaactgggacctgatgaccccaacgtggctaagacgaaaaataacctggcatcctgctatttgaaacaaggaaagttcaagcaagcagaaacactgtacaaagagattctcactcgtgcacatgaaagggagtttggttctgtagatgatgaaaataaacccatctggatgcatgctgaagaaagagaagaatgcaaaggaaagcaaaaggatgggacatcttttggagagtatggcggctggtacaaagcctgcaaagttgatagtccaactgttacaaccactctaaaaaaccttggggcactttacagacgtcaaggcaaatttgaagctgcagaaacgttagaagaagctgctatgaggtctcgtaaacagggtcttgacaatgttcacaaacagagggtggcagaagtgctcaatgaccctgagaacatggagaagcgcaggagccgtgagagcctcaacgtggacgtggtcaagtacgagagtggccctgacggaggggaggaaatgaggaaaatgaagctcgggctggttaactgacttgctcagcgtcccatggcctagccgcccgtgactctcacactgtctcctgcatgacgggtggcgcctcccgcagcttcccttctctctccagtgctgcccgctgtgtctagcagcctctaggatcttgtcagagctgcacctctctgtgaactggccattcctttcggtgctgctgtcctttttgggggggttcctgatttctgtatacatgtagctttgccagatatgtacttagtaatataaactgtattaataaaatccatttactgtgtaatacacgagtttaaaaattaagagcgattagctgttcactttggtaacaggtagttaagtgtcacacaaggtgttgttgcaatggcatgacggtgacctgttgacgtaactaagccttacagcaaggcatgtgccgcacgtgctccgtggtacttagagccctgggggccccgctcggactccgggtctccctaggatatgccccagtagcatttgctgtgtagtctgtgtgtgaaatttgggcattctgcttttctctactaatcttgaagtgctcagtgatttgtgtat

SEQ ID NO: 146852 - DNA, 2453 bp, Homo sapiens
  Payload ID: 9052
  Gene Symbol: KLC1
  Gene Name: kinesin light chain 1
  Uniprot ID: Q07866
  ENST ID: ENST00000452929
  CDS Start-End: 256-2112
cgagcgggactggctgggtcggctgggctgctggtgcgaggagccgcggggctgtgctcggcggccaaggggacagcgcgtgggtggccgaggatgctgcggggcggtagctccggcgcccctagctggtgactgctgcgccgtgcctcacacagccgaggcgggctcggcgcacagtcgctgctccgcgcgcgcgcccggcggcgctccaggtgctgacagcgcgagagagcgcggccctcaggagcaaggcgaatgtatgacaacatgtccacaatggtgtacataaaggaagacaagttggagaagcttacacaggatgaaattatttctaagacaaagcaagtaattcaggggctggaagctttgaagaatgagcacaattccattttacaaagtttgctggagacactgaagtgtttgaagaaagatgatgaaagtaatttggtggaggagaaatcaaacatgatccggaagtcactggagatgttggagctcggcctgagtgaggcacaggttatgatggctttgtcaaatcacctgaatgctgtggagtccgagaagcagaaactgcgtgcgcaggttcgtcgtctgtgccaggagaatcagtggctacgggatgaactggccaacacgcagcagaaactgcagaagagtgagcagtctgtggctcaactggaggaggagaagaagcatctggagtttatgaatcagctaaaaaaatatgatgacgacatttccccatccgaggacaaagacactgattctaccaaagagcctctggatgaccttttccccaatgatgaagacgacccagggcaaggaatccagcagcagcacagcagtgcagccgcggctgcccagcagggcggctacgagatccccgcgcggctgcggacgctccacaacctggtgatccagtacgcctcgcaggggcgctacgaggtagctgtgcccctctgcaagcaggccctggaggacctggagaagacttcaggacacgaccacccggacgtggccaccatgctcaacatcctggccttggtgtacagggatcagaataaatacaaagatgcagctaacctactgaatgatgccttggctattcgtgagaaaactttgggcaaagatcatcctgcggtggcggcgactttgaataaccttgcagtcctttatggtaaaagagggaagtacaaagaagcagagccgttgtgtaaaagagctctggaaatccgagaaaaggttttggggaaggatcaccccgatgttgccaagcagttaaataacttggccttactgtgccagaaccagggcaagtatgaagaagtagaatattattatcaaagagccctcgagatctaccagacaaaactgggacctgatgaccccaacgtggctaagacgaaaaataacctggcatcctgctatttgaaacaaggaaagttcaagcaagcagaaacactgtacaaagagattctcactcgtgcacatgaaagggagtttggttctgtagatgatgaaaataaacccatctggatgcatgctgaagaaagagaagaatgcaaaggaaagcaaaaggatgggacatcttttggagagtatggcggctggtacaaagcctgcaaagttgatagtccaactgttacaaccactctaaaaaaccttggggcactttacagacgtcaaggcaaatttgaagctgcagaaacgttagaagaagctgctatgaggtctcgtaaacagggtcttgacaatgttcacaaacagagggtggcagaagtgctcaatgaccctgagaacatggagaagcgcaggagccgtgagagcctcaacgtggacgtggtcaagtacgagagtggccctgacggaggggaggaagtgagtatgagcgtagagtggaacggggatggcactggatctttaaaacgcagtggttcctttagcaaactccgggcttccattagacgcagcagtgagaagctggttaggaagctgaagggaggaagttcacgagagagtgagccaaagaaccccggggcgtctctggccgagcctctttttgtggaaaacgacagcagcagcagtggcctggaagacgccaccgctaactgaccccgacctggccccgctccaggatgggactgccgagtgtggcccggagctggcccgggacagccagggcggcagggagggcccctggccgggagccgcagcgctcactcatttctcctgcgtctgtgtgcataggacatgatactaataaccacacggctggcgtgaccttggggctggggctgggcctaagctggtgccctggtgcggcgtggtctctcccaggagacctggggcatgagctgggcccacggctcccttcccatgtgtaacttcctcacgttgtgtgcgataacgtattttattgtacatttttttaaattaaaagtttatatgcctta

SEQ ID NO: 146853 - DNA, 875 bp, Homo sapiens
  Payload ID: 9052
  Gene Symbol: KLC1
  Gene Name: kinesin light chain 1
  ENST ID: ENST00000537046
  CDS Start-End: 1-805
aaagttcaagcaagcagaaacactgtacaaagagattctcactcgtgcacatgaaagggagtttggttctgtagatgatgaaaataaacccatctggatgcatgctgaagaaagagaagaatgcaaaggaaagcaaaaggatgggacatcttttggagagtatggcggctggtacaaagcctgcaaagttgatagtccaactgttacaaccactctaaaaaaccttggggcactttacagacgtcaaggcaaatttgaagctgcagaaacgttagaagaagctgctatgaggtctcgtaaacagcgaagtatctcagaaatacctaagaaaatcttaagtgctaatgggtcaaaccattttcccctgcctggctcacagggtcttgacaatgttcacaaacagagggtggcagaagtgctcaatgaccctgagaacatggagaagcgcaggagccgtgagagcctcaacgtggacgtggtcaagtacgagagtggccctgacggaggggaggaagtgagtatgagcgtagagtggaacggggatggcactggatctttaaaacgcagtggttcctttagcaaactccgggcttccattagacgcagcagtgagaagctggttaggaagctgaagggaggaagttcacgagagagtgagccaaagaaccccggcatgaagcgtgccagctctctgaatgtccttaacgtgggtggcaaggctgctgaagatcgctttcaagaacgaaataattgtctggccgactcgcgagctctgagtgccagccacactgacctggcccactgagagccagcagggctaggtaacctgtcttgggagtgtgagaccgccccgccctgccacgcccctcaccgcc

SEQ ID NO: 146854 - DNA, 710 bp, Homo sapiens
  Payload ID: 9052
  Gene Symbol: KLC1
  Gene Name: kinesin light chain 1
  ENST ID: ENST00000535194
  CDS Start-End: 1-181
tcacaaacagagggtggcagaagtgctcaatgaccctgagaacatggagaagcgcaggagccgtgagagcctcaacgtggacgtggtcaagtacgagagtggccctgacggaggggaggaagtgagtatgagcgtagagtggaacgggcatgaagcgtgccagctctctgaatgtccttaacgtgggtggcaaggctgctgaagatcgctttcaagaacgaaataattgtctggccgactcgcgagctctgagtgccagccacactgacctggcccactgagagccagcagggctaggtaacctgtcttgggagtgtgagaccgccccgccctgccacgcccctcaccgccctgcccggaggcgccagccgcactccttggcttcctttcctagatagtgacgtccaccaaccttggaggtgccttttcaaaacacccgggaggccgtgcctcagcattctgttactcggcctgcagccccagtgccaggagccaccccgaccgcgacccggccaggctggctcagggaggccgaggtggcgctgaggtggcttcagcacgctggggattggctcctgctcacggatgctgttgcatttcctgcctgccacctttttgccatgacaccagactctcttttaaattgtaatattgtaataaggctgtaaattaagaatctggaaacataaagtacccctttcagaacgata

SEQ ID NO: 146855 - DNA, 2555 bp, Homo sapiens
  Payload ID: 9052
  Gene Symbol: KLC1
  Gene Name: kinesin light chain 1
  Uniprot ID: Q07866
  ENST ID: ENST00000554228
  CDS Start-End: 256-1938
cgagcgggactggctgggtcggctgggctgctggtgcgaggagccgcggggctgtgctcggcggccaaggggacagcgcgtgggtggccgaggatgctgcggggcggtagctccggcgcccctagctggtgactgctgcgccgtgcctcacacagccgaggcgggctcggcgcacagtcgctgctccgcgcgcgcgcccggcggcgctccaggtgctgacagcgcgagagagcgcggccctcaggagcaaggcgaatgtatgacaacatgtccacaatggtgtacataaaggaagacaagttggagaagcttacacaggatgaaattatttctaagacaaagcaagtaattcaggggctggaagctttgaagaatgagcacaattccattttacaaagtttgctggagacactgaagtgtttgaagaaagatgatgaaagtaatttggtggaggagaaatcaaacatgatccggaagtcactggagatgttggagctcggcctgagtgaggcacaggttatgatggctttgtcaaatcacctgaatgctgtggagtccgagaagcagaaactgcgtgcgcaggttcgtcgtctgtgccaggagaatcagtggctacgggatgaactggccaacacgcagcagaaactgcagaagagtgagcagtctgtggctcaactggaggaggagaagaagcatctggagtttatgaatcagctaaaaaaatatgatgacgacatttccccatccgaggacaaagacactgattctaccaaagagcctctggatgaccttttccccaatgatgaagacgacccagggcaaggaatccagcagcagcacagcagtgcagccgcggctgcccagcagggcggctacgagatccccgcgcggctgcggacgctccacaacctggtgatccagtacgcctcgcaggggcgctacgaggtagctgtgcccctctgcaagcaggccctggaggacctggagaagacttcaggacacgaccacccggacgtggccaccatgctcaacatcctggccttggtgtacagggatcagaataaatacaaagatgcagctaacctactgaatgatgccttggctattcgtgagaaaactttgggcaaagatcatcctgcggtggcggcgactttgaataaccttgcagtcctttatggtaaaagagggaagtacaaagaagcagagccgttgtgtaaaagagctctggaaatccgagaaaaggttttggggaaggatcaccccgatgttgccaagcagttaaataacttggccttactgtgccagaaccagggcaagtatgaagaagtagaatattattatcaaagagccctcgagatctaccagacaaaactgggacctgatgaccccaacgtggctaagacgaaaaataacctggcatcctgctatttgaaacaaggaaagttcaagcaagcagaaacactgtacaaagagattctcactcgtgcacatgaaagggagtttggttctgtagatgatgaaaataaacccatctggatgcatgctgaagaaagagaagaatgcaaaggaaagcaaaaggatgggacatcttttggagagtatggcggctggtacaaagcctgcaaagttgatagtccaactgttacaaccactctaaaaaaccttggggcactttacagacgtcaaggcaaatttgaagctgcagaaacgttagaagaagctgctatgaggtctcgtaaacagggtcttgacaatgttcacaaacagagggtggcagaagtgctcaatgaccctgagaacatggagaagcgcaggagccgtgagagcctcaacgtggacgtggtcaagtacgagagtggccctgacggaggggaggaagtgagtatgagcgtagagtggaacgggatgaggaaaatgaagctcgggctggttaactgacttgctcagcgtcccatggatggcactggatctttaaaacgcagtggttcctttagcaaactccgggcttccattagacgcagcagtgagaagctggttaggaagctgaagggaggaagttcacgagagagtgagccaaagaaccccggcatgaagcgtgccagctctctgaatgtccttaacgtgggtggcaaggctgctgaagatcgctttcaagaacgaaataattgtctggccgactcgcgagctctgagtgccagccacactgacctggcccactgagagccagcagggctaggtaacctgtcttgggagtgtgagaccgccccgccctgccacgcccctcaccgccctgcccggaggcgccagccgcactccttggcttcctttcctagatagtgacgtccaccaaccttggaggtgccttttcaaaacacccgggaggccgtgcctcagcattctgttactcggcctgcagccccagtgccaggagccaccccgaccgcgacccggccaggctggctcagggaggccgaggtggcgctgaggtggcttcagcacgctggggattggctcctgctcacggatgctgttgcatttcctgcctgccacctttt

SEQ ID NO: 146856 - DNA, 2188 bp, Homo sapiens
  Payload ID: 9052
  Gene Symbol: KLC1
  Gene Name: kinesin light chain 1
  ENST ID: ENST00000557575
  CDS Start-End: 260-1915
cggccgagcgggactggctgggtcggctgggctgctggtgcgaggagccgcggggctgtgctcggcggccaaggggacagcgcgtgggtggccgaggatgctgcggggcggtagctccggcgcccctagctggtgactgctgcgccgtgcctcacacagccgaggcgggctcggcgcacagtcgctgctccgcgcgcgcgcccggcggcgctccaggtgctgacagcgcgagagagcgcggccctcaggagcaaggcgaatgtatgacaacatgtccacaatggtgtacataaaggaagacaagttggagaagcttacacaggatgaaattatttctaagacaaagcaagtaattcaggggctggaagctttgaagaatgagcacaattccattttacaaagtttgctggagacactgaagtgtttgaagaaagatgatgaaagtaatttggtggaggagaaatcaaacatgatccggaagtcactggagatgttggagctcggcctgagtgaggcacaggttatgatggctttgtcaaatcacctgaatgctgtggagtccgagaagcagaaactgcgtgcgcaggttcgtcgtctgtgccaggagaatcagtggctacgggatgaactggccaacacgcagcagaaactgcagaagagtgagcagtctgtggctcaactggaggaggagaagaagcatctggagtttatgaatcagctaaaaaaatatgatgacgacatttccccatccgaggacaaagacactgattctaccaaagagcctctggatgaccttttccccaatgatgaagacgacccagggcaaggaatccagcagcagcacagcagtgcagccgcggctgcccagcagggcggctacgagatccccgcgcggctgcggacgctccacaacctggtgatccagtacgcctcgcaggggcgctacgaggtagctgtgcccctctgcaagcaggccctggaggacctggagaagacttcaggacacgaccacccggacgtggccaccatgctcaacatcctggccttggtgtacagggatcagaataaatacaaagatgcagctaacctactgaatgatgccttggctattcgtgagaaaactttgggcaaagatcatcctgcggtggcggcgactttgaataaccttgcagtcctttatggtaaaagagggaagtacaaagaagcagagccgttgtgtaaaagagctctggaaatccgagaaaaggttttggggaaggatcaccccgatgttgccaagcagttaaataacttggccttactgtgccagaaccagggcaagtatgaagaagtagaatattattatcaaagagccctcgagatctaccagacaaaactgggacctgatgaccccaacgtggctaagacgaaaaataacctggcatcctgctatttgaaacaaggaaagttcaagcaagcagaaacactgtacaaagagattctcactcgtgcacatgaaagggagtttggttctgtagatgatgaaaataaacccatctggatgcatgctgaagaaagagaagaatgcaaaggaaagcaaaaggatgggacatcttttggagagtatggcggctggtacaaagcctgcaaagttgatagtccaactgttacaaccactctaaaaaaccttggggcactttacagacgtcaaggcaaatttgaagctgcagaaacgttagaagaagctgctatgaggtctcgtaaacagggtcttgacaatgttcacaaacagagggtggcagaagtgctcaatgaccctgagaacatggagaagcgcaggagccgtgagagcctcaacgtggacgtggtcaagtacgagagtggccctgacggaggggaggaagtgagtatgagcgtagagtggaacggggcctagccgcccgtgactctcacactgtctcctgcatgacgggtggcgcctcccgcagcttcccttctctctccagtgctgcccgctgtgtctagcagcctctaggatcttgtcagagctgcacctctctgtgaactggccattcctttcggtgctgctgtcctttttgggggggttcctgatttctgtatacatgtagctttgccagatatgtacttagtaatataaactgtattaataaaatccatttactgtgtaatacacgagtttaaaaattaa

SEQ ID NO: 146857 - DNA, 2265 bp, Homo sapiens
  Payload ID: 9052
  Gene Symbol: KLC1
  Gene Name: kinesin light chain 1
  Uniprot ID: Q07866
  ENST ID: ENST00000557450
  CDS Start-End: 256-1950
cgagcgggactggctgggtcggctgggctgctggtgcgaggagccgcggggctgtgctcggcggccaaggggacagcgcgtgggtggccgaggatgctgcggggcggtagctccggcgcccctagctggtgactgctgcgccgtgcctcacacagccgaggcgggctcggcgcacagtcgctgctccgcgcgcgcgcccggcggcgctccaggtgctgacagcgcgagagagcgcggccctcaggagcaaggcgaatgtatgacaacatgtccacaatggtgtacataaaggaagacaagttggagaagcttacacaggatgaaattatttctaagacaaagcaagtaattcaggggctggaagctttgaagaatgagcacaattccattttacaaagtttgctggagacactgaagtgtttgaagaaagatgatgaaagtaatttggtggaggagaaatcaaacatgatccggaagtcactggagatgttggagctcggcctgagtgaggcacaggttatgatggctttgtcaaatcacctgaatgctgtggagtccgagaagcagaaactgcgtgcgcaggttcgtcgtctgtgccaggagaatcagtggctacgggatgaactggccaacacgcagcagaaactgcagaagagtgagcagtctgtggctcaactggaggaggagaagaagcatctggagtttatgaatcagctaaaaaaatatgatgacgacatttccccatccgaggacaaagacactgattctaccaaagagcctctggatgaccttttccccaatgatgaagacgacccagggcaaggaatccagcagcagcacagcagtgcagccgcggctgcccagcagggcggctacgagatccccgcgcggctgcggacgctccacaacctggtgatccagtacgcctcgcaggggcgctacgaggtagctgtgcccctctgcaagcaggccctggaggacctggagaagacttcaggacacgaccacccggacgtggccaccatgctcaacatcctggccttggtgtacagggatcagaataaatacaaagatgcagctaacctactgaatgatgccttggctattcgtgagaaaactttgggcaaagatcatcctgcggtggcggcgactttgaataaccttgcagtcctttatggtaaaagagggaagtacaaagaagcagagccgttgtgtaaaagagctctggaaatccgagaaaaggttttggggaaggatcaccccgatgttgccaagcagttaaataacttggccttactgtgccagaaccagggcaagtatgaagaagtagaatattattatcaaagagccctcgagatctaccagacaaaactgggacctgatgaccccaacgtggctaagacgaaaaataacctggcatcctgctatttgaaacaaggaaagttcaagcaagcagaaacactgtacaaagagattctcactcgtgcacatgaaagggagtttggttctgtagatgatgaaaataaacccatctggatgcatgctgaagaaagagaagaatgcaaaggaaagcaaaaggatgggacatcttttggagagtatggcggctggtacaaagcctgcaaagttgatagtccaactgttacaaccactctaaaaaaccttggggcactttacagacgtcaaggcaaatttgaagctgcagaaacgttagaagaagctgctatgaggtctcgtaaacagggtcttgacaatgttcacaaacagagggtggcagaagtgctcaatgaccctgagaacatggagaagcgcaggagccgtgagagcctcaacgtggacgtggtcaagtacgagagtggccctgacggaggggaggaaggcgtctctggccgagcctctttttgtggaaaacgacagcagcagcagtggcctggaagacgccaccgctaactgaccccgacctggccccgctccaggatgggactgccgagtgtggcccggagctggcccgggacagccagggcggcagggagggcccctggccgggagccgcagcgctcactcatttctcctgcgtctgtgtgcataggacatgatactaataaccacacggctggcgtgaccttggggctggggctgggcctaagctggtgccctggtgcggcgtggtctctcccaggagacctggggcatgagctgggcccacggctcccttcccatgtgtaacttcctcacgttgtgtgcgataacgtattttattgtaca

SEQ ID NO: 146858 - DNA, 540 bp, Homo sapiens
  Payload ID: 9052
  Gene Symbol: KLC1
  Gene Name: kinesin light chain 1
  ENST ID: ENST00000557172
  CDS Start-End: 91-540
ataattcattcactcgcctcccactgggagtccacaatggcctaatgcacgtttcaagctcttggtttctatcaaacggctcgctcaagaatgtatgacaacatgtccacaatggtgtacataaaggaagacaagttggagaagcttacacaggatgaaattatttctaagacaaagcaagtaattcaggggctggaagctttgaagaatgagcacaattccattttacaaagtttgctggagacactgaagtgtttgaagaaagatgatgaaagtaatttggtggaggagaaatcaaacatgatccggaagtcactggagatgttggagctcggcctgagtgaggcacaggttatgatggctttgtcaaatcacctgaatgctgtggagtccgagaagcagaaactgcgtgcgcaggttcgtcgtctgtgccaggagaatcagtggctacgggatgaactggccaacacgcagcagaaactgcagaagagtgagcagtctgtggctcaactggaggaggagaagaagcatctggagttt

SEQ ID NO: 146859 - DNA, 2426 bp, Homo sapiens
  Payload ID: 9052
  Gene Symbol: KLC1
  Gene Name: kinesin light chain 1
  ENST ID: ENST00000554280
  CDS Start-End: 256-2085
cgagcgggactggctgggtcggctgggctgctggtgcgaggagccgcggggctgtgctcggcggccaaggggacagcgcgtgggtggccgaggatgctgcggggcggtagctccggcgcccctagctggtgactgctgcgccgtgcctcacacagccgaggcgggctcggcgcacagtcgctgctccgcgcgcgcgcccggcggcgctccaggtgctgacagcgcgagagagcgcggccctcaggagcaaggcgaatgtatgacaacatgtccacaatggtgtacataaaggaagacaagttggagaagcttacacaggatgaaattatttctaagacaaagcaagtaattcaggggctggaagctttgaagaatgagcacaattccattttacaaagtttgctggagacactgaagtgtttgaagaaagatgatgaaagtaatttggtggaggagaaatcaaacatgatccggaagtcactggagatgttggagctcggcctgagtgaggcacaggttatgatggctttgtcaaatcacctgaatgctgtggagtccgagaagcagaaactgcgtgcgcaggttcgtcgtctgtgccaggagaatcagtggctacgggatgaactggccaacacgcagcagaaactgcagaagagtgagcagtctgtggctcaactggaggaggagaagaagcatctggagtttatgaatcagctaaaaaaatatgatgacgacatttccccatccgaggacaaagacactgattctaccaaagagcctctggatgaccttttccccaatgatgaagacgacccagggcaaggaatccagcagcagcacagcagtgcagccgcggctgcccagcagggcggctacgagatccccgcgcggctgcggacgctccacaacctggtgatccagtacgcctcgcaggggcgctacgaggtagctgtgcccctctgcaagcaggccctggaggacctggagaagacttcaggacacgaccacccggacgtggccaccatgctcaacatcctggccttggtgtacagggatcagaataaatacaaagatgcagctaacctactgaatgatgccttggctattcgtgagaaaactttgggcaaagatcatcctgcggtggcggcgactttgaataaccttgcagtcctttatggtaaaagagggaagtacaaagaagcagagccgttgtgtaaaagagctctggaaatccgagaaaaggttttggggaaggatcaccccgatgttgccaagcagttaaataacttggccttactgtgccagaaccagggcaagtatgaagaagtagaatattattatcaaagagccctcgagatctaccagacaaaactgggacctgatgaccccaacgtggctaagacgaaaaataacctggcatcctgctatttgaaacaaggaaagttcaagcaagcagaaacactgtacaaagagattctcactcgtgcacatgaaagggagtttggttctgtagatgatgaaaataaacccatctggatgcatgctgaagaaagagaagaatgcaaaggaaagcaaaaggatgggacatcttttggagagtatggcggctggtacaaagcctgcaaagttgatagtccaactgttacaaccactctaaaaaaccttggggcactttacagacgtcaaggcaaatttgaagctgcagaaacgttagaagaagctgctatgaggtctcgtaaacagggtcttgacaatgttcacaaacagagggtggcagaagtgctcaatgaccctgagaacatggagaagcgcaggagccgtgagagcctcaacgtggacgtggtcaagtacgagagtggccctgacggaggggaggaagatggcactggatctttaaaacgcagtggttcctttagcaaactccgggcttccattagacgcagcagtgagaagctggttaggaagctgaagggaggaagttcacgagagagtgagccaaagaaccccggggcgtctctggccgagcctctttttgtggaaaacgacagcagcagcagtggcctggaagacgccaccgctaactgaccccgacctggccccgctccaggatgggactgccgagtgtggcccggagctggcccgggacagccagggcggcagggagggcccctggccgggagccgcagcgctcactcatttctcctgcgtctgtgtgcataggacatgatactaataaccacacggctggcgtgaccttggggctggggctgggcctaagctggtgccctggtgcggcgtggtctctcccaggagacctggggcatgagctgggcccacggctcccttcccatgtgtaacttcctcacgttgtgtgcgataacgtattttattgtacatttttttaaattaaaagtttatatgcctta

SEQ ID NO: 146860 - DNA, 535 bp, Homo sapiens
  Payload ID: 9052
  Gene Symbol: KLC1
  Gene Name: kinesin light chain 1
  ENST ID: ENST00000557686
  CDS Start-End: 1-133
catgaagcgtgccagctctctgaatgtccttaacgtgggtggcaaggctgctgaagatcgctttcaagaacgaaataattgtctggccgactcgcgagctctgagtgccagccacactgacctggcccactgagagccagcagggctagggcgtctctggccgagcctctttttgtggaaaacgacagcagcagcagtggcctggaagacgccaccgctaactgaccccgacctggccccgctccaggatgggactgccgagtgtggcccggagctggcccgggacagccagggcggcagggagggcccctggccgggagccgcagcgctcactcatttctcctgcgtctgtgtgcataggacatgatactaataaccacacggctggcgtgaccttggggctggggctgggcctaagctggtgccctggtgcggcgtggtctctcccaggagacctggggcatgagctgggcccacggctcccttcccatgtgtaacttcctcacgttgtgtgcgataacgtattttattgtac

SEQ ID NO: 146861 - DNA, 535 bp, Homo sapiens
  Payload ID: 9052
  Gene Symbol: KLC1
  Gene Name: kinesin light chain 1
  ENST ID: ENST00000555856
  CDS Start-End: 1-452
ggatgcatgctgaagaaagagaagaatgcaaaggaaagcaaaaggatgggacatcttttggagagtatggcggctggtacaaagcctgcaaagttgatagtccaactgttacaaccactctaaaaaaccttggggcactttacagacgtcaaggcaaatttgaagctgcagaaacgttagaagaagctgctatgaggtctcgtaaacagcgaagtatctcagaaatacctaagaaaatcttaagtgctaatgggtcaaaccattttcccctgcctggctcacagggtcttgacaatgttcacaaacagagggtggcagaagtgctcaatgaccctgagaacatggagaagcgcaggagccgtgagagcctcaacgtggacgtggtcaagtacgagagtggccctgacggaggggaggaaatgaggaaaatgaagctcgggctggttaactgacttgctcagcgtcccatggcctagccgcccgtgactctcacactgtctcctgcatgacgggtggcgcctcccgcagcttccct

SEQ ID NO: 146862 - DNA, 630 bp, Homo sapiens
  Payload ID: 9052
  Gene Symbol: KLC1
  Gene Name: kinesin light chain 1
  ENST ID: ENST00000553436
  CDS Start-End: 1-485
ccatctggatgcatgctgaagaaagagaagaatgcaaaggaaagcaaaaggatgggacatcttttggagagtatggcggctggtacaaagcctgcaaagttgatagtccaactgttacaaccactctaaaaaaccttggggcactttacagacgtcaaggcaaatttgaagctgcagaaacgttagaagaagctgctatgaggtctcgtaaacagggtcttgacaatgttcacaaacagagggtggcagaagtgctcaatgaccctgagaacatggagaagcgcaggagccgtgagagcctcaacgtggacgtggtcaagtacgagagtggccctgacggaggggaggaagtgagtatgagcgtagagtggaacggggtaagtacagtacacagcgggcacgtgctccgggaggcgcccccaagtggcgcttgccaggccttcctcctgtctcatgtgctagaccttctgcttttctcaaattaagtgccaattaagctttctgtaagttcttcacttctgctaatactgaagtctgttatttgtttaaagtggtaattttcttctcaggaatccatgaaagctgtttggcttaactttgagcacttaaatgctgattgagtgtcctggc

SEQ ID NO: 146863 - DNA, 976 bp, Homo sapiens
  Payload ID: 9052
  Gene Symbol: KLC1
  Gene Name: kinesin light chain 1
  ENST ID: ENST00000553325
  CDS Start-End: 1-395
atgaaaataaacccatctggatgcatgctgaagaaagagaagaatgcaaaggaaagcaaaaggatgggacatcttttggagagtatggcggctggtacaaagcctgcaaagttgatagtccaactgttacaaccactctaaaaaaccttggggcactttacagacgtcaaggcaaatttgaagctgcagaaacgttagaagaagctgctatgaggtctcgtaaacagggtcttgacaatgttcacaaacagagggtggcagaagtgctcaatgaccctgagaacatggagaagcgcaggagccgtgagagcctcaacgtggacgtggtcaagtacgagagtggccctgacggaggggaggaaatgaggaaaatgaagctcgggctggttaactgacttgctcagcgtcccatggcctagccgcccgtgactctcacactgtctcctgcatgacgggtggcgcctcccgcagcttcccttctctctccagtgctgcccgctgtgtctagcagcctctaggatcttgtcagagctgcacctctctgtgaactggccattcctttcggtgctgctgtcctttttgggggggttcctgatttctgtatacatgtagctttgccagatatgtacttagtaatataaactgtattaataaaatccatttactgtgtaatacacgagtttaaaaattaagagcgattagctgttcactttggtaacaggtagttaagtgtcacacaaggtgttgttgcaatggcatgacggtgacctgttgacgtaactaagccttacagcaaggcatgtgccgcacgtgctccgtggtacttagagccctgggggccccgctcggactccgggtctccctaggatatgccccagtagcatttgctgtgtagtctgtgtgtgaaatttgggcattctgcttttctctactaatcttgaagtgctcagtgatttgtgtatttgtgtctttctaa

SEQ ID NO: 146864 - DNA, 2467 bp, Homo sapiens
  Payload ID: 9052
  Gene Symbol: KLC1
  Gene Name: kinesin light chain 1
  ENST ID: ENST00000555836
  CDS Start-End: 260-2152
cggccgagcgggactggctgggtcggctgggctgctggtgcgaggagccgcggggctgtgctcggcggccaaggggacagcgcgtgggtggccgaggatgctgcggggcggtagctccggcgcccctagctggtgactgctgcgccgtgcctcacacagccgaggcgggctcggcgcacagtcgctgctccgcgcgcgcgcccggcggcgctccaggtgctgacagcgcgagagagcgcggccctcaggagcaaggcgaatgtatgacaacatgtccacaatggtgtacataaaggaagacaagttggagaagcttacacaggatgaaattatttctaagacaaagcaagtaattcaggggctggaagctttgaagaatgagcacaattccattttacaaagtttgctggagacactgaagtgtttgaagaaagatgatgaaagtaatttggtggaggagaaatcaaacatgatccggaagtcactggagatgttggagctcggcctgagtgaggcacaggttatgatggctttgtcaaatcacctgaatgctgtggagtccgagaagcagaaactgcgtgcgcaggttcgtcgtctgtgccaggagaatcagtggctacgggatgaactggccaacacgcagcagaaactgcagaagagtgagcagtctgtggctcaactggaggaggagaagaagcatctggagtttatgaatcagctaaaaaaatatgatgacgacatttccccatccgaggacaaagacactgattctaccaaagagcctctggatgaccttttccccaatgatgaagacgacccagggcaaggaatccagcagcagcacagcagtgcagccgcggctgcccagcagggcggctacgagatccccgcgcggctgcggacgctccacaacctggtgatccagtacgcctcgcaggggcgctacgaggtagctgtgcccctctgcaagcaggccctggaggacctggagaagacttcaggacacgaccacccggacgtggccaccatgctcaacatcctggccttggtgtacagggatcagaataaatacaaagatgcagctaacctactgaatgatgccttggctattcgtgagaaaactttgggcaaagatcatcctgcggtggcggcgactttgaataaccttgcagtcctttatggtaaaagagggaagtacaaagaagcagagccgttgtgtaaaagagctctggaaatccgagaaaaggttttggggaaggatcaccccgatgttgccaagcagttaaataacttggccttactgtgccagaaccagggcaagtatgaagaagtagaatattattatcaaagagccctcgagatctaccagacaaaactgggacctgatgaccccaacgtggctaagacgaaaaataacctggcatcctgctatttgaaacaaggaaagttcaagcaagcagaaacactgtacaaagagattctcactcgtgcacatgaaagggagtttggttctgtagatgatgaaaataaacccatctggatgcatgctgaagaaagagaagaatgcaaaggaaagcaaaaggatgggacatcttttggagagtatggcggctggtacaaagcctgcaaagttgatagtccaactgttacaaccactctaaaaaaccttggggcactttacagacgtcaaggcaaatttgaagctgcagaaacgttagaagaagctgctatgaggtctcgtaaacagggtcttgacaatgttcacaaacagagggtggcagaagtgctcaatgaccctgagaacatggagaagcgcaggagccgtgagagcctcaacgtggacgtggtcaagtacgagagtggccctgacggaggggaggaagatggcactggatctttaaaacgcagtggttcctttagcaaactccgggcttccattagacgcagcagtgagaagctggttaggaagctgaagggaggaagttcacgagagagtgagccaaagaaccccggcatgaagcgtgccagctctctgaatgtccttaacgtgggtggcaaggctgctgaagatcgctttcaaggcgtctctggccgagcctctttttgtggaaaacgacagcagcagcagtggcctggaagacgccaccgctaactgaccccgacctggccccgctccaggatgggactgccgagtgtggcccggagctggcccgggacagccagggcggcagggagggcccctggccgggagccgcagcgctcactcatttctcctgcgtctgtgtgcataggacatgatactaataaccacacggctggcgtgaccttggggctggggctgggcctaagctggtgccctggtgcggcgtggtctctcccaggagacctggggcatgagctgggcccacggctcccttcccatgtgtaacttcctcacgttgtgtgcgataacgtattttattgtaca

SEQ ID NO: 146865 - DNA, 3135 bp, Homo sapiens
  Payload ID: 9052
  Gene Symbol: KLC1
  Gene Name: kinesin light chain 1
  Uniprot ID: Q07866
  ENST ID: ENST00000553286
  CDS Start-End: 260-1942
cggccgagcgggactggctgggtcggctgggctgctggtgcgaggagccgcggggctgtgctcggcggccaaggggacagcgcgtgggtggccgaggatgctgcggggcggtagctccggcgcccctagctggtgactgctgcgccgtgcctcacacagccgaggcgggctcggcgcacagtcgctgctccgcgcgcgcgcccggcggcgctccaggtgctgacagcgcgagagagcgcggccctcaggagcaaggcgaatgtatgacaacatgtccacaatggtgtacataaaggaagacaagttggagaagcttacacaggatgaaattatttctaagacaaagcaagtaattcaggggctggaagctttgaagaatgagcacaattccattttacaaagtttgctggagacactgaagtgtttgaagaaagatgatgaaagtaatttggtggaggagaaatcaaacatgatccggaagtcactggagatgttggagctcggcctgagtgaggcacaggttatgatggctttgtcaaatcacctgaatgctgtggagtccgagaagcagaaactgcgtgcgcaggttcgtcgtctgtgccaggagaatcagtggctacgggatgaactggccaacacgcagcagaaactgcagaagagtgagcagtctgtggctcaactggaggaggagaagaagcatctggagtttatgaatcagctaaaaaaatatgatgacgacatttccccatccgaggacaaagacactgattctaccaaagagcctctggatgaccttttccccaatgatgaagacgacccagggcaaggaatccagcagcagcacagcagtgcagccgcggctgcccagcagggcggctacgagatccccgcgcggctgcggacgctccacaacctggtgatccagtacgcctcgcaggggcgctacgaggtagctgtgcccctctgcaagcaggccctggaggacctggagaagacttcaggacacgaccacccggacgtggccaccatgctcaacatcctggccttggtgtacagggatcagaataaatacaaagatgcagctaacctactgaatgatgccttggctattcgtgagaaaactttgggcaaagatcatcctgcggtggcggcgactttgaataaccttgcagtcctttatggtaaaagagggaagtacaaagaagcagagccgttgtgtaaaagagctctggaaatccgagaaaaggttttggggaaggatcaccccgatgttgccaagcagttaaataacttggccttactgtgccagaaccagggcaagtatgaagaagtagaatattattatcaaagagccctcgagatctaccagacaaaactgggacctgatgaccccaacgtggctaagacgaaaaataacctggcatcctgctatttgaaacaaggaaagttcaagcaagcagaaacactgtacaaagagattctcactcgtgcacatgaaagggagtttggttctgtagatgatgaaaataaacccatctggatgcatgctgaagaaagagaagaatgcaaaggaaagcaaaaggatgggacatcttttggagagtatggcggctggtacaaagcctgcaaagttgatagtccaactgttacaaccactctaaaaaaccttggggcactttacagacgtcaaggcaaatttgaagctgcagaaacgttagaagaagctgctatgaggtctcgtaaacagggtcttgacaatgttcacaaacagagggtggcagaagtgctcaatgaccctgagaacatggagaagcgcaggagccgtgagagcctcaacgtggacgtggtcaagtacgagagtggccctgacggaggggaggaagtgagtatgagcgtagagtggaacgggatgaggaaaatgaagctcgggctggttaactgacttgctcagcgtcccatggtgagtccgagcgggcggggcgcaggccctgccgtctggcgcttctgtcgagacgtcggctttccaacctggcaggacccaggacgcattgctgcctgtggaaattaattttcttttggattatcaactgcatgtttaaaatgggctgtagacttttaaagtccgtggtttcctaaagtttctgaaatgtctaaaatgtgtttttaagagaatgaaagtcatacctgtagcctttattttggtccctatgtttttcattgcataatctccttatatacagttacttgtaaagccttttacaccaagtgtcaaggagatttctaatacgttgccaatctttacgcttaaagtgttgacatttactttgatgaccattgggaatggaccagtctggattctgtgaaatgcaccatgaggcccagcacctgctttatgctggactggtagaagcaggcagaaggtcatcccagtcctaaagccactcagaaggctgctgagacttgtgacctagaaatactgtaagccaggctgttatgcagagcctgttgcctttcctcgccgcggtttcacgtgggttttctctctcctttctgtctgacaggcctagccgcccgtgactctcacactgtctcctgcatgacgggtggcgcctcccgcagcttcccttctctctccagtgctgcccgctgtgtctagcagcctctaggatcttgtcagagctgcacctctctgtgaactggccattcctttcggtgctgctgtcctttttgggggggttcctgatttctgtatacatgtagctttgccagatatgtacttagtaatataaactgtattaataaaatccatttactgtgtaatacacgagtttaaaaattaagagcgattagctgttcactttggtaacaggtagttaagtgtcacacaaggtgttgttgcaatggcatgacggtgacctgttgacgtaactaagccttacagcaaggcatgtgccgcacgtgctccgtggtacttagagccctgggggccccgctcggactccgggtctccctaggatatgccccagtagcatttgctgtgtagtctgtgtgtgaaatttgggcattctgcttttctctactaatcttgaagtgctcagtgatttgtgtatttgtgtctttctaacttctaataaa

SEQ ID NO: 146866 - DNA, 2229 bp, Homo sapiens
  Payload ID: 9052
  Gene Symbol: KLC1
  Gene Name: kinesin light chain 1
  ENST ID: ENST00000634686
  CDS Start-End: 256-2010
cgagcgggactggctgggtcggctgggctgctggtgcgaggagccgcggggctgtgctcggcggccaaggggacagcgcgtgggtggccgaggatgctgcggggcggtagctccggcgcccctagctggtgactgctgcgccgtgcctcacacagccgaggcgggctcggcgcacagtcgctgctccgcgcgcgcgcccggcggcgctccaggtgctgacagcgcgagagagcgcggccctcaggagcaaggcgaatgtatgacaacatgtccacaatggtgtacataaaggaagacaagttggagaagcttacacaggatgaaattatttctaagacaaagcaagtaattcaggggctggaagctttgaagaatgagcacaattccattttacaaagtttgctggagacactgaagtgtttgaagaaagatgatgaaagtaatttggtggaggagaaatcaaacatgatccggaagtcactggagatgttggagctcggcctgagtgaggcacaggttatgatggctttgtcaaatcacctgaatgctgtggagtccgagaagcagaaactgcgtgcgcaggttcgtcgtctgtgccaggagaatcagtggctacgggatgaactggccaacacgcagcagaaactgcagaagagtgagcagtctgtggctcaactggaggaggagaagaagcatctggagtttatgaatcagctaaaaaaatatgatgacgacatttccccatccgaggacaaagacactgattctaccaaagagcctctggatgaccttttccccaatgatgaagacgacccagggcaaggaatccagcagcagcacagcagtgcagccgcggctgcccagcagggcggctacgagatccccgcgcggctgcggacgctccacaacctggtgatccagtacgcctcgcaggggcgctacgaggtagctgtgcccctctgcaagcaggccctggaggacctggagaagacttcaggacacgaccacccggacgtggccaccatgctcaacatcctggccttggtgtacagggatcagaataaatacaaagatgcagctaacctactgaatgatgccttggctattcgtgagaaaactttgggcaaagatcatcctgcggtggcggcgactttgaataaccttgcagtcctttatggtaaaagagggaagtacaaagaagcagagccgttgtgtaaaagagctctggaaatccgagaaaaggttttggggaaggatcaccccgatgttgccaagcagttaaataacttggccttactgtgccagaaccagggcaagtatgaagaagtagaatattattatcaaagagccctcgagatctaccagacaaaactgggacctgatgaccccaacgtggctaagacgaaaaataacctggcatcctgctatttgaaacaaggaaagttcaagcaagcagaaacactgtacaaagagattctcactcgtgcacatgaaagggagtttggttctgtagatgatgaaaataaacccatctggatgcatgctgaagaaagagaagaatgcaaaggaaagcaaaaggatgggacatcttttggagagtatggcggctggtacaaagcctgcaaagttgatagtccaactgttacaaccactctaaaaaaccttggggcactttacagacgtcaaggcaaatttgaagctgcagaaacgttagaagaagctgctatgaggtctcgtaaacagggtcttgacaatgttcacaaacagagggtggcagaagtgctcaatgaccctgagaacatggagaagcgcaggagccgtgagagcctcaacgtggacgtggtcaagtacgagagtggccctgacggaggggaggaaatgaagcgtgccagctctctgaatgtccttaacgtgggtggcaaggctgctgaagatcgctttcaagaacgaaataattgtctggccgactcgcgagctctgagtgccagccacactgacctggcccactgagagccagcagggctaggtaacctgtcttgggagtgtgagaccgccccgccctgccacgcccctcaccgccctgcccggaggcgccagccgcactccttggcttcctttcctagatagtgacgtccaccaaccttggaggtgccttttcaaaacacccgggaggccgtgcctcagcattctgttactcggcctgcagccccagtgccaggagccaccccg

SEQ ID NO: 146867 - DNA, 2990 bp, Homo sapiens
  Payload ID: 9053
  Gene Symbol: KLC2
  Gene Name: kinesin light chain 2
  Uniprot ID: Q9H0B6
  ENST ID: ENST00000316924
  CDS Start-End: 218-2086
gtgtttcgccccctccgacgccaccgaggtagcggcttcacctttaaggcggcgcgggggctgctgggaaggccggcgggatggaggcggcgggaccggctcgcgggtgcgggtccgggtgaagcgggaggcagccagagtcggagccgggcccgagcaccaggcgcaggcccggcgcccgcctgcccgcaccctcgtcctcacagacgccacagccatggccatgatggtgtttccgcgggaggagaagctgagccaggatgagatcgtgctgggcaccaaggctgtcatccagggactggagactctgcgtggggagcatcgtgccctgctggctcctctggttgcacctgaggccggcgaagccgagcctggctcgcaggagcgctgcatcctcctgcgtcgctccctggaagccattgagcttgggctgggggaggcccaggtgatcttggcattgtcgagccacctgggggctgtagaatcagagaagcagaagctgcgggcgcaggtgcggcgtctggtgcaggagaaccagtggctgcgtgaggagctggcggggacacagcagaagctgcagcgcagtgagcaggccgtggcccagctcgaggaggagaagcagcacttgctgttcatgagccagatccgcaagttggatgaagacgcctcccctaacgaggagaagggggacgtccccaaagacacactggatgacctgttccccaatgaggatgagcagagcccagcccctagcccaggaggaggggatgtgtctggtcagcatgggggctacgagatcccggcccggctccgcaccctgcacaacctggtgatccaatacgcctcacagggccgctacgaggtagctgtgccactctgcaagcaggcactcgaagacctggagaagacgtcaggccacgaccaccctgacgttgccaccatgctgaacatcctggcactggtctatcgggatcagaacaagtacaaggaggctgcccacctgctcaatgatgctctggccatccgggagaaaacactgggcaaggaccacccagccgtggctgcgacactaaacaacctggcagtcctgtatggcaagaggggcaagtacaaggaggctgagccattgtgcaagcgggcactggagatccgggagaaggtcctgggcaagtttcacccagatgtggccaagcagctcagcaacctggccctgctgtgccagaaccagggcaaagctgaggaggtggaatattactatcggcgggcactggagatctatgctacacgcctcgggcccgatgaccccaatgtggccaagaccaagaacaacctggcttcctgctacctgaagcagggcaagtaccaggatgcggagaccttgtacaaggagatcctcacccgcgctcatgagaaagagtttggctctgtcaatggggacaacaagcccatctggatgcacgcagaggagcgggaggaaagcaaggataagcgccgggacagcgccccctatggggaatacggcagctggtacaaggcctgtaaagtagacagccccacagtcaacaccaccctgcgcagcttgggggccctataccggcgccagggcaagctggaagccgcgcacacactagaggactgtgccagccgtaaccgcaagcagggtttggaccccgcaagccagaccaaggtggtagaactgctgaaagatggcagtggcaggcggggagaccgccgcagcagccgagacatggctgggggtgccgggcctcggtctgagtctgacctcgaggacgtgggacctacagctgagtggaatggggatggcagtggctccttgaggcgcagcggttcctttgggaaactccgggatgccctgaggcgcagcagtgagatgctggtaaagaagctgcaggggggcaccccccaggagccccctaaccccaggatgaagcgggccagttccctcaacttcctcaacaagagcgtggaagagccgacccagcctggaggcacaggtctctctgacagccgcactctcagctccagctccatggacctctcccgacgaagctccctggtgggctaatgctgaaggggcagccagtcaccagagcgcccacctggcacacccccctcaccccagccctgcgcatgggcctgctgcttgtcccgcctgtctctcccacagcccctgtcttttctgttcaatctcagggtaaccttctcccttgtcatctcagcctgagccctggaggctgggcctgcccactccagctccatcccttatttattccttccagcagggccctcttccctaggttcgggccagcaggaggtgccggctggagtctccaccatagactcagtggcctggcctccccagaccccagagccaagaacactaagcactcgccggcccttcggcaccctcgccctccctcccgactcaacccggccgttgcttctgtatatagagaaataagttattggccgcgcgcctcccttcagtccacggtactacccgggcctcccctcgtccctcttctagtggtaccgcccaggccttaatcacccccattccgtgcggtggtatctcccaggctctacattctcgggagcggcgcctcccaagggggtcctgggaccttctcgcgctcctcctggcctctgagggatgcgtcctacccgcgccatcgccccgtggcccaggacggggacctccccttagtccgtcctcccaccgccgggccctgccccgcatcccggccttatgcactgcccctcccacccggccccgcccaggcacggccgaccccgccccgggcaccgcccaccgagccatcctgcctcgcctccccccacgcctgcagcttctcgcgaggggcggcgacggtcccctggtggcaggaggggctccccctgttgcgggtgaggcggctgctctcatattttcagatgttgctgtagaaataaagacggtttaaatctga

SEQ ID NO: 146868 - DNA, 3755 bp, Homo sapiens
  Payload ID: 9053
  Gene Symbol: KLC2
  Gene Name: kinesin light chain 2
  ENST ID: ENST00000394065
  CDS Start-End: 1019-2584
gccagctgtggtggtgtgcacccgtagtcccagttactcaggaggctgagggggaaggaccacttgagcctggaaggtagaggctgcagtgagctgtgacggtgccatagcccttcggcccaggtgacagagtgagacattgtcttaaattaaaaaaaaaaaaaaaaaagagagagcaagaagggaggttggaccctaggcaggaaggcaggaagagactggaaactaaggaaaggagttgcagaggctggggagaggggtgggggttgaggccaaggcctttggatacttttcctgcccctgtggctcctcatgccaactgagcatttgggacacatgccccttccctacctgggagctgcagaaaggcaggggatgctgtggcccctcagcagaagtggggatggagtctttgggtggtccttcagccatctagcagagttctgtgggcaagcgctagccctgaggcagggagcagtaacctactggctgtggcagcagaggcttgagtacaacccagggagagacgaaggaaggggctagtagctcagggaaagcacagcaccccaactagcccttttggggttctcctgatcctagaaggaaggaactggggactcccaagcctcctgggtttgggctttgcattatggtgtgtcgggggccttgaggagattctcccttgacaagcagagaaaagacctgcagctcctcactgtagggccaggcctggcccttcactgggtgccagagcccaactaggcccaggctacagtcataggcgagggggtcgacaggcctccgacccttacctgggctggttgcacaggtgatcttggcattgtcgagccacctgggggctgtagaatcagagaagcagaagctgcgggcgcaggtgcggcgtctggtgcaggagaaccagtggctgcgtgaggagctggcggggacacagcagaagctgcagcgcagtgagcaggccgtggcccagctcgaggaggagaagcagcacttgctgttcatgagccagatccgcaagttggatgaagacgcctcccctaacgaggagaagggggacgtccccaaagacacactggatgacctgttccccaatgaggatgagcagagcccagcccctagcccaggaggaggggatgtgtctggtcagcatgggggctacgagatcccggcccggctccgcaccctgcacaacctggtgatccaatacgcctcacagggccgctacgaggtagctgtgccactctgcaagcaggcactcgaagacctggagaagacgtcaggccacgaccaccctgacgttgccaccatgctgaacatcctggcactggtctatcgggatcagaacaagtacaaggaggctgcccacctgctcaatgatgctctggccatccgggagaaaacactgggcaaggaccacccagccgtggctgcgacactaaacaacctggcagtcctgtatggcaagaggggcaagtacaaggaggctgagccattgtgcaagcgggcactggagatccgggagaaggtcctgggcaagtttcacccagatgtggccaagcagctcagcaacctggccctgctgtgccagaaccagggcaaagctgaggaggtggaatattactatcggcgggcactggagatctatgctacacgcctcgggcccgatgaccccaatgtggccaagaccaagaacaacctggcttcctgctacctgaagcagggcaagtaccaggatgcggagaccttgtacaaggagatcctcacccgcgctcatgagaaagagtttggctctgtcaatggggacaacaagcccatctggatgcacgcagaggagcgggaggaaagcaaggataagcgccgggacagcgccccctatggggaatacggcagctggtacaaggcctgtaaagtagacagccccacagtcaacaccaccctgcgcagcttgggggccctataccggcgccagggcaagctggaagccgcgcacacactagaggactgtgccagccgtaaccgcaagcagggtttggaccccgcaagccagaccaaggtggtagaactgctgaaagatggcagtggcaggcggggagaccgccgcagcagccgagacatggctgggggtgccgggcctcggtctgagtctgacctcgaggacgtgggacctacagctgagtggaatggggatggcagtggctccttgaggcgcagcggttcctttgggaaactccgggatgccctgaggcgcagcagtgagatgctggtaaagaagctgcaggggggcaccccccaggagccccctaaccccaggatgaagcgggccagttccctcaacttcctcaacaagagcgtggaagagccgacccaggtaggggcaggcgggtgtctgggcactgggcagctgcggccggggctgcatgcgtgctgccaagcttccctccagcatgcctcttcatccagcaacagttcctggctctgtctcaggcctactttgggctggacaacggggagacacgaggggaacccagcctctcctgggggtggacgtgtaaacggccagtgctaacaccgtcactgtggagatggacgggagtgtcagggcaccagggtgtggccttgggtcagaactgccattgcctctgcccagctcagggattccggctgcctctgccaggtcagaccccttcaggccagggaggcacagactggcagcagcacagggctgagccacctgccccctctgcccacagcctggaggcacaggtctctctgacagccgcactctcagctccagctccatggacctctcccgacgaagctccctggtgggctaatgctgaaggggcagccagtcaccagagcgcccacctggcacacccccctcaccccagccctgcgcatgggcctgctgcttgtcccgcctgtctctcccacagcccctgtcttttctgttcaatctcagggtaaccttctcccttgtcatctcagcctgagccctggaggctgggcctgcccactccagctccatcccttatttattccttccagcagggccctcttccctaggttcgggccagcaggaggtgccggctggagtctccaccatagactcagtggcctggcctccccagaccccagagccaagaacactaagcactcgccggcccttcggcaccctcgccctccctcccgactcaacccggccgttgcttctgtatatagagaaataagttattggccgcgcgcctcccttcagtccacggtactacccgggcctcccctcgtccctcttctagtggtaccgcccaggccttaatcacccccattccgtgcggtggtatctcccaggctctacattctcgggagcggcgcctcccaagggggtcctgggaccttctcgcgctcctcctggcctctgagggatgcgtcctacccgcgccatcgccccgtggcccaggacggggacctccccttagtccgtcctcccaccgccgggccctgccccgcatcccggccttatgcactgcccctcccacccggccccgcccaggcacggccgaccccgccccgggcaccgcccaccgagccatcctgcctcgcctccccccacgcctgcagcttctcgcgaggggcggcgacggtcccctggtggcaggaggggctccccctgttgcgggtgaggcggctgctctcatattttcagatgttgctgtagaaataaagacggtttaaatctg

SEQ ID NO: 146869 - DNA, 2591 bp, Homo sapiens
  Payload ID: 9053
  Gene Symbol: KLC2
  Gene Name: kinesin light chain 2
  Uniprot ID: Q9H0B6
  ENST ID: ENST00000394066
  CDS Start-End: 51-1688
aggcccggcgcccgcctgcccgcaccctcgtcctcacagacgccacagccatggccatgatggtgtttccgcgggaggagaagctgagccaggatgagatcgtgctgggcaccaaggctgtcatccagggactggagactctgcgtggggagcatcgtgccctgctggctcctctggttgcacctgaggccggcgaagccgagcctggctcgcaggagcgctgcatcctcctgcgtcgctccctggaagccattgagcttgggctgggggaggcccaggaggagaagggggacgtccccaaagacacactggatgacctgttccccaatgaggatgagcagagcccagcccctagcccaggaggaggggatgtgtctggtcagcatgggggctacgagatcccggcccggctccgcaccctgcacaacctggtgatccaatacgcctcacagggccgctacgaggtagctgtgccactctgcaagcaggcactcgaagacctggagaagacgtcaggccacgaccaccctgacgttgccaccatgctgaacatcctggcactggtctatcgggatcagaacaagtacaaggaggctgcccacctgctcaatgatgctctggccatccgggagaaaacactgggcaaggaccacccagccgtggctgcgacactaaacaacctggcagtcctgtatggcaagaggggcaagtacaaggaggctgagccattgtgcaagcgggcactggagatccgggagaaggtcctgggcaagtttcacccagatgtggccaagcagctcagcaacctggccctgctgtgccagaaccagggcaaagctgaggaggtggaatattactatcggcgggcactggagatctatgctacacgcctcgggcccgatgaccccaatgtggccaagaccaagaacaacctggcttcctgctacctgaagcagggcaagtaccaggatgcggagaccttgtacaaggagatcctcacccgcgctcatgagaaagagtttggctctgtcaatggggacaacaagcccatctggatgcacgcagaggagcgggaggaaagcaaggataagcgccgggacagcgccccctatggggaatacggcagctggtacaaggcctgtaaagtagacagccccacagtcaacaccaccctgcgcagcttgggggccctataccggcgccagggcaagctggaagccgcgcacacactagaggactgtgccagccgtaaccgcaagcagggtttggaccccgcaagccagaccaaggtggtagaactgctgaaagatggcagtggcaggcggggagaccgccgcagcagccgagacatggctgggggtgccgggcctcggtctgagtctgacctcgaggacgtgggacctacagctgagtggaatggggatggcagtggctccttgaggcgcagcggttcctttgggaaactccgggatgccctgaggcgcagcagtgagatgctggtaaagaagctgcaggggggcaccccccaggagccccctaaccccaggatgaagcgggccagttccctcaacttcctcaacaagagcgtggaagagccgacccagcctggaggcacaggtctctctgacagccgcactctcagctccagctccatggacctctcccgacgaagctccctggtgggctaatgctgaaggggcagccagtcaccagagcgcccacctggcacacccccctcaccccagccctgcgcatgggcctgctgcttgtcccgcctgtctctcccacagcccctgtcttttctgttcaatctcagggtaaccttctcccttgtcatctcagcctgagccctggaggctgggcctgcccactccagctccatcccttatttattccttccagcagggccctcttccctaggttcgggccagcaggaggtgccggctggagtctccaccatagactcagtggcctggcctccccagaccccagagccaagaacactaagcactcgccggcccttcggcaccctcgccctccctcccgactcaacccggccgttgcttctgtatatagagaaataagttattggccgcgcgcctcccttcagtccacggtactacccgggcctcccctcgtccctcttctagtggtaccgcccaggccttaatcacccccattccgtgcggtggtatctcccaggctctacattctcgggagcggcgcctcccaagggggtcctgggaccttctcgcgctcctcctggcctctgagggatgcgtcctacccgcgccatcgccccgtggcccaggacggggacctccccttagtccgtcctcccaccgccgggccctgccccgcatcccggccttatgcactgcccctcccacccggccccgcccaggcacggccgaccccgccccgggcaccgcccaccgagccatcctgcctcgcctccccccacgcctgcagcttctcgcgaggggcggcgacggtcccctggtggcaggaggggctccccctgttgcgggtgaggcggctgctctcatattttcagatgttgctgtagaaataaagacggtttaaatctg

SEQ ID NO: 146870 - DNA, 2898 bp, Homo sapiens
  Payload ID: 9053
  Gene Symbol: KLC2
  Gene Name: kinesin light chain 2
  Uniprot ID: Q9H0B6
  ENST ID: ENST00000394067
  CDS Start-End: 181-2049
gtgtttcgccccctccgacgccaccgaggtagcggcttcacctttaaggcggcgcgggggctgctgggaaggccggcgggatggaggcggcgggaccggctcgcgggtgcgggtccgggtgaagcgggaggcagccagagtcggagccgggcccgagcaccaggcgcagacgccacagccatggccatgatggtgtttccgcgggaggagaagctgagccaggatgagatcgtgctgggcaccaaggctgtcatccagggactggagactctgcgtggggagcatcgtgccctgctggctcctctggttgcacctgaggccggcgaagccgagcctggctcgcaggagcgctgcatcctcctgcgtcgctccctggaagccattgagcttgggctgggggaggcccaggtgatcttggcattgtcgagccacctgggggctgtagaatcagagaagcagaagctgcgggcgcaggtgcggcgtctggtgcaggagaaccagtggctgcgtgaggagctggcggggacacagcagaagctgcagcgcagtgagcaggccgtggcccagctcgaggaggagaagcagcacttgctgttcatgagccagatccgcaagttggatgaagacgcctcccctaacgaggagaagggggacgtccccaaagacacactggatgacctgttccccaatgaggatgagcagagcccagcccctagcccaggaggaggggatgtgtctggtcagcatgggggctacgagatcccggcccggctccgcaccctgcacaacctggtgatccaatacgcctcacagggccgctacgaggtagctgtgccactctgcaagcaggcactcgaagacctggagaagacgtcaggccacgaccaccctgacgttgccaccatgctgaacatcctggcactggtctatcgggatcagaacaagtacaaggaggctgcccacctgctcaatgatgctctggccatccgggagaaaacactgggcaaggaccacccagccgtggctgcgacactaaacaacctggcagtcctgtatggcaagaggggcaagtacaaggaggctgagccattgtgcaagcgggcactggagatccgggagaaggtcctgggcaagtttcacccagatgtggccaagcagctcagcaacctggccctgctgtgccagaaccagggcaaagctgaggaggtggaatattactatcggcgggcactggagatctatgctacacgcctcgggcccgatgaccccaatgtggccaagaccaagaacaacctggcttcctgctacctgaagcagggcaagtaccaggatgcggagaccttgtacaaggagatcctcacccgcgctcatgagaaagagtttggctctgtcaatggggacaacaagcccatctggatgcacgcagaggagcgggaggaaagcaaggataagcgccgggacagcgccccctatggggaatacggcagctggtacaaggcctgtaaagtagacagccccacagtcaacaccaccctgcgcagcttgggggccctataccggcgccagggcaagctggaagccgcgcacacactagaggactgtgccagccgtaaccgcaagcagggtttggaccccgcaagccagaccaaggtggtagaactgctgaaagatggcagtggcaggcggggagaccgccgcagcagccgagacatggctgggggtgccgggcctcggtctgagtctgacctcgaggacgtgggacctacagctgagtggaatggggatggcagtggctccttgaggcgcagcggttcctttgggaaactccgggatgccctgaggcgcagcagtgagatgctggtaaagaagctgcaggggggcaccccccaggagccccctaaccccaggatgaagcgggccagttccctcaacttcctcaacaagagcgtggaagagccgacccagcctggaggcacaggtctctctgacagccgcactctcagctccagctccatggacctctcccgacgaagctccctggtgggctaatgctgaaggggcagccagtcaccagagcgcccacctggcacacccccctcaccccagccctgcgcatgggcctgctgcttgtcccgcctgtctctcccacagcccctgtcttttctgttcaatctcagggtaaccttctcccttgtcatctcagcctgagccctggaggctgggcctgcccactccagctccatcccttatttattccttccagcagggccctcttccctaggttcgggccagcaggaggtgccggctggagtctccaccatagactcagtggcctggcctccccagaccccagagccaagaacactaagcactcgccggcccttcggcaccctcgccctccctcccgactcaacccggccgttgcttctgtatatagagaaataagttattggccgcgcgcctcccttcagtccacggtactacccgggcctcccctcgtccctcttctagtggtaccgcccaggccttaatcacccccattccgtgcggtggtatctcccaggctctacattctcgggagcggcgcctcccaagggggtcctgggaccttctcgcgctcctcctggcctctgagggatgcgtcctacccgcgccatcgccccgtggcccaggacggggacctccccttagtccgtcctcccaccgccgggccctgccccgcatcccggccttatgcactgcccctcccacccggccccgcccaggcacggccgaccccgccccgggcaccgcccaccgagccatcctgcctcgcctccccccacgcctgcagcttctcgcgaggggcggcgacggtcccctggtggcaggaggggctccccctgttgcgggtgaggc

SEQ ID NO: 146871 - DNA, 1557 bp, Homo sapiens
  Payload ID: 9053
  Gene Symbol: KLC2
  Gene Name: kinesin light chain 2
  ENST ID: ENST00000394078
  CDS Start-End: 165-1166
gacgccaccgaggtagcggcttcacctttaaggcggcgcgggggctgctgggaaggccggcgggatggaggcggcgggaccggctcgcgggtgcgggtccgggtgaagcgggaggcagccagagtcggagccgggcccgagcaccaggcgcagacgccacagccatggccatgatggtgtttccgcgggaggagaagctgagccaggatgagatcgtgctgggcaccaaggctgtcatccagggactggagactctgcgtggggagcatcgtgccctgctggctcctctggttgcacctgaggccggcgaagccgagcctggctcgcaggagcgctgcatcctcctgcgtcgctccctggaagccattgagcttgggctgggggaggcccaggtgatcttggcattgtcgagccacctgggggctgtagaatcagagaagcagaagctgcgggcgcaggtgcggcgtctggtgcaggagaaccagtggctgcgtgaggagctggcggggacacagcagaagctgcagcgcagtgagcaggccgtggcccagctcgaggaggagaagcagcacttgctgttcatgagccagatccgcaagttggatgaagacgcctcccctaacgaggagaagggggacgtccccaaagacacactggatgacctgttccccaatgaggatgagcagagcccagcccctagcccaggaggaggggatgtgtctggtcagcatgggggctacgagatcccggcccggctccgcaccctgcacaacctggtgatccaatacgcctcacagggccgctacgaggtagctgtgccactctgcaagcaggcactcgaagacctggagaagacgtcaggccacgaccaccctgacgttgccaccatgctgaacatcctggcactggtctatcggttcgggccagcaggaggtgccggctggagtctccaccatagactcagtggcctggcctccccagaccccagagccaagaacactaagcactcgccggcccttcggcaccctcgccctccctcccgactcaacccggccgttgcttctgtatatagagaaataagttattggccgcgcgcctcccttcagtccacggtactacccgggcctcccctcgtccctcttctagtggtaccgcccaggccttaatcacccccattccgtgcggtggtatctcccaggctctacattctcgggagcggcgcctcccaagggggtcctgggaccttctcgcgctcctcctggcctctgagggatgcgtcctacccgcgccatcgccccgtggcccaggacggggacctccccttagtccgtcctcccaccgccgggccctgccccgcatcccggccttatgcactgcccctcccacccggccccgcccaggcacggccgaccccgccccgggcaccgcccaccgagccatcctgcctcgcctccccccacgcctgcagcttctcgcgaggggcggcgacggtcccctggtggcaggaggggctccccctgttgcgggtgaggcggctgctctcatattttcagatgt

SEQ ID NO: 146872 - DNA, 620 bp, Homo sapiens
  Payload ID: 9053
  Gene Symbol: KLC2
  Gene Name: kinesin light chain 2
  ENST ID: ENST00000440228
  CDS Start-End: 123-620
ctcgatggccccgccccgtccccctcccgctggagccggcccggcccgcgctcctttaaggcagcgaacgggccaagagaagcgtgtttcgccccctccgacgccaccgagacgccacagccatggccatgatggtgtttccgcgggaggagaagctgagccaggatgagatcgtgctgggcaccaaggctgtcatccagggactggagactctgcgtggggagcatcgtgccctgctggctcctctggttgcacctgaggccggcgaagccgagcctggctcgcaggagcgctgcatcctcctgcgtcgctccctggaagccattgagcttgggctgggggaggcccaggtgatcttggcattgtcgagccacctgggggctgtagaatcagagaagcagaagctgcgggcgcaggtgcggcgtctggtgcaggagaaccagtggctgcgtgaggagctggcggggacacagcagaagctgcagcgcagtgagcaggccgtggcccagctcgaggaggagaagcagcacttgctgttcatgagccagatccgcaagttggatgaagacgcctcccctaacgaggagaagggggacgtccccaaagacacactggatgac

SEQ ID NO: 146873 - DNA, 3015 bp, Homo sapiens
  Payload ID: 9053
  Gene Symbol: KLC2
  Gene Name: kinesin light chain 2
  Uniprot ID: Q9H0B6
  ENST ID: ENST00000417856
  CDS Start-End: 244-2112
gcgagccagataacagcggcactcacttctcgggtcttcgtgagcattaagtcaatgaacccagggcaccaaagcgcgcaacacgcagtaggcgctcagttagtggcgcctcgctctgtactccaggaagcccaaccttctccctgcgcctcagtttctcccgacgtcctcgatggcgccatggcgccacactaggcccggcgcccgcctgcccgcaccctcgtcctcacagacgccacagccatggccatgatggtgtttccgcgggaggagaagctgagccaggatgagatcgtgctgggcaccaaggctgtcatccagggactggagactctgcgtggggagcatcgtgccctgctggctcctctggttgcacctgaggccggcgaagccgagcctggctcgcaggagcgctgcatcctcctgcgtcgctccctggaagccattgagcttgggctgggggaggcccaggtgatcttggcattgtcgagccacctgggggctgtagaatcagagaagcagaagctgcgggcgcaggtgcggcgtctggtgcaggagaaccagtggctgcgtgaggagctggcggggacacagcagaagctgcagcgcagtgagcaggccgtggcccagctcgaggaggagaagcagcacttgctgttcatgagccagatccgcaagttggatgaagacgcctcccctaacgaggagaagggggacgtccccaaagacacactggatgacctgttccccaatgaggatgagcagagcccagcccctagcccaggaggaggggatgtgtctggtcagcatgggggctacgagatcccggcccggctccgcaccctgcacaacctggtgatccaatacgcctcacagggccgctacgaggtagctgtgccactctgcaagcaggcactcgaagacctggagaagacgtcaggccacgaccaccctgacgttgccaccatgctgaacatcctggcactggtctatcgggatcagaacaagtacaaggaggctgcccacctgctcaatgatgctctggccatccgggagaaaacactgggcaaggaccacccagccgtggctgcgacactaaacaacctggcagtcctgtatggcaagaggggcaagtacaaggaggctgagccattgtgcaagcgggcactggagatccgggagaaggtcctgggcaagtttcacccagatgtggccaagcagctcagcaacctggccctgctgtgccagaaccagggcaaagctgaggaggtggaatattactatcggcgggcactggagatctatgctacacgcctcgggcccgatgaccccaatgtggccaagaccaagaacaacctggcttcctgctacctgaagcagggcaagtaccaggatgcggagaccttgtacaaggagatcctcacccgcgctcatgagaaagagtttggctctgtcaatggggacaacaagcccatctggatgcacgcagaggagcgggaggaaagcaaggataagcgccgggacagcgccccctatggggaatacggcagctggtacaaggcctgtaaagtagacagccccacagtcaacaccaccctgcgcagcttgggggccctataccggcgccagggcaagctggaagccgcgcacacactagaggactgtgccagccgtaaccgcaagcagggtttggaccccgcaagccagaccaaggtggtagaactgctgaaagatggcagtggcaggcggggagaccgccgcagcagccgagacatggctgggggtgccgggcctcggtctgagtctgacctcgaggacgtgggacctacagctgagtggaatggggatggcagtggctccttgaggcgcagcggttcctttgggaaactccgggatgccctgaggcgcagcagtgagatgctggtaaagaagctgcaggggggcaccccccaggagccccctaaccccaggatgaagcgggccagttccctcaacttcctcaacaagagcgtggaagagccgacccagcctggaggcacaggtctctctgacagccgcactctcagctccagctccatggacctctcccgacgaagctccctggtgggctaatgctgaaggggcagccagtcaccagagcgcccacctggcacacccccctcaccccagccctgcgcatgggcctgctgcttgtcccgcctgtctctcccacagcccctgtcttttctgttcaatctcagggtaaccttctcccttgtcatctcagcctgagccctggaggctgggcctgcccactccagctccatcccttatttattccttccagcagggccctcttccctaggttcgggccagcaggaggtgccggctggagtctccaccatagactcagtggcctggcctccccagaccccagagccaagaacactaagcactcgccggcccttcggcaccctcgccctccctcccgactcaacccggccgttgcttctgtatatagagaaataagttattggccgcgcgcctcccttcagtccacggtactacccgggcctcccctcgtccctcttctagtggtaccgcccaggccttaatcacccccattccgtgcggtggtatctcccaggctctacattctcgggagcggcgcctcccaagggggtcctgggaccttctcgcgctcctcctggcctctgagggatgcgtcctacccgcgccatcgccccgtggcccaggacggggacctccccttagtccgtcctcccaccgccgggccctgccccgcatcccggccttatgcactgcccctcccacccggccccgcccaggcacggccgaccccgccccgggcaccgcccaccgagccatcctgcctcgcctccccccacgcctgcagcttctcgcgaggggcggcgacggtcccctggtggcaggaggggctccccctgttgcgggtgaggcggctgctctcatattttcagatgttgctgtagaaataaagacggtttaaatctg

SEQ ID NO: 146874 - DNA, 2721 bp, Homo sapiens
  Payload ID: 9053
  Gene Symbol: KLC2
  Gene Name: kinesin light chain 2
  Uniprot ID: Q9H0B6
  ENST ID: ENST00000421552
  CDS Start-End: 181-1818
gtgtttcgccccctccgacgccaccgaggtagcggcttcacctttaaggcggcgcgggggctgctgggaaggccggcgggatggaggcggcgggaccggctcgcgggtgcgggtccgggtgaagcgggaggcagccagagtcggagccgggcccgagcaccaggcgcagacgccacagccatggccatgatggtgtttccgcgggaggagaagctgagccaggatgagatcgtgctgggcaccaaggctgtcatccagggactggagactctgcgtggggagcatcgtgccctgctggctcctctggttgcacctgaggccggcgaagccgagcctggctcgcaggagcgctgcatcctcctgcgtcgctccctggaagccattgagcttgggctgggggaggcccaggaggagaagggggacgtccccaaagacacactggatgacctgttccccaatgaggatgagcagagcccagcccctagcccaggaggaggggatgtgtctggtcagcatgggggctacgagatcccggcccggctccgcaccctgcacaacctggtgatccaatacgcctcacagggccgctacgaggtagctgtgccactctgcaagcaggcactcgaagacctggagaagacgtcaggccacgaccaccctgacgttgccaccatgctgaacatcctggcactggtctatcgggatcagaacaagtacaaggaggctgcccacctgctcaatgatgctctggccatccgggagaaaacactgggcaaggaccacccagccgtggctgcgacactaaacaacctggcagtcctgtatggcaagaggggcaagtacaaggaggctgagccattgtgcaagcgggcactggagatccgggagaaggtcctgggcaagtttcacccagatgtggccaagcagctcagcaacctggccctgctgtgccagaaccagggcaaagctgaggaggtggaatattactatcggcgggcactggagatctatgctacacgcctcgggcccgatgaccccaatgtggccaagaccaagaacaacctggcttcctgctacctgaagcagggcaagtaccaggatgcggagaccttgtacaaggagatcctcacccgcgctcatgagaaagagtttggctctgtcaatggggacaacaagcccatctggatgcacgcagaggagcgggaggaaagcaaggataagcgccgggacagcgccccctatggggaatacggcagctggtacaaggcctgtaaagtagacagccccacagtcaacaccaccctgcgcagcttgggggccctataccggcgccagggcaagctggaagccgcgcacacactagaggactgtgccagccgtaaccgcaagcagggtttggaccccgcaagccagaccaaggtggtagaactgctgaaagatggcagtggcaggcggggagaccgccgcagcagccgagacatggctgggggtgccgggcctcggtctgagtctgacctcgaggacgtgggacctacagctgagtggaatggggatggcagtggctccttgaggcgcagcggttcctttgggaaactccgggatgccctgaggcgcagcagtgagatgctggtaaagaagctgcaggggggcaccccccaggagccccctaaccccaggatgaagcgggccagttccctcaacttcctcaacaagagcgtggaagagccgacccagcctggaggcacaggtctctctgacagccgcactctcagctccagctccatggacctctcccgacgaagctccctggtgggctaatgctgaaggggcagccagtcaccagagcgcccacctggcacacccccctcaccccagccctgcgcatgggcctgctgcttgtcccgcctgtctctcccacagcccctgtcttttctgttcaatctcagggtaaccttctcccttgtcatctcagcctgagccctggaggctgggcctgcccactccagctccatcccttatttattccttccagcagggccctcttccctaggttcgggccagcaggaggtgccggctggagtctccaccatagactcagtggcctggcctccccagaccccagagccaagaacactaagcactcgccggcccttcggcaccctcgccctccctcccgactcaacccggccgttgcttctgtatatagagaaataagttattggccgcgcgcctcccttcagtccacggtactacccgggcctcccctcgtccctcttctagtggtaccgcccaggccttaatcacccccattccgtgcggtggtatctcccaggctctacattctcgggagcggcgcctcccaagggggtcctgggaccttctcgcgctcctcctggcctctgagggatgcgtcctacccgcgccatcgccccgtggcccaggacggggacctccccttagtccgtcctcccaccgccgggccctgccccgcatcccggccttatgcactgcccctcccacccggccccgcccaggcacggccgaccccgccccgggcaccgcccaccgagccatcctgcctcgcctccccccacgcctgcagcttctcgcgaggggcggcgacggtcccctggtggcaggaggggctccccctgttgcgggtgaggcggctgctctcatattttcagatgttgctgtagaaataaagacggtttaaatctg

SEQ ID NO: 146875 - DNA, 1073 bp, Homo sapiens
  Payload ID: 9053
  Gene Symbol: KLC2
  Gene Name: kinesin light chain 2
  ENST ID: ENST00000475757
  CDS Start-End: 560-1073
gccttttcagggaaggcctcagggcgttgcgctggcctaggggaggggtcgtcgtgggcgtagcctggaaggactgggggccgcgtactcagcccctctagtgggagcgcctccgcagggtcggctcgtcgggaggatgggctccgcggcttggcctgccttttggggatggggctgtccgaggggctgggcccggatcgccggaggggccagggtctcctgcacaggagtgagcccccacgttccccatacctgtcctggttagggggtccccggggaaacccggacactgagccgcctaagtcggcctgagccggtggtctggggccgaagcaggatccggctgcaccgcattgcgtctcccaggcctagacaagctaggcgcgccctctgtaggccaagcgcgggcacggtgcgggctgccggctgggggacctgggcacacgggagactcaggcgtccggggaccgcctgtttacctaatccggggcggacggcggtgtggccccaggcccggcgcccgcctgcccgcaccctcgtcctcacagacgccacagccatggccatgatggtgtttccgcgggaggagaagctgagccaggatgagatcgtgctgggcaccaaggctgtcatccagggactggagactctgcgtggggagcatcgtgccctgctggctcctctggttgcacctgaggccggcgaagccgagcctggctcgcaggagcgctgcatcctcctgcgtcgctccctggaagccattgagcttgggctgggggaggcccaggtgatcttggcattgtcgagccacctgggggctgtagaatcagagaagcagaagctgcgggcgcaggtgcggcgtctggtgcaggagaaccagtggctgcgtgaggagctggcggggacacagcagaagctgcagcgcagtgagcaggccgtggcccagctcgaggaggagaagcagcacttgctgttcatgagccagatccgcaagttggatgaagacgcctcccctaacgaggagaagggggacgtccccaaagacacactggatgacctgttccccaatgagg

SEQ ID NO: 146876 - DNA, 643 bp, Homo sapiens
  Payload ID: 9053
  Gene Symbol: KLC2
  Gene Name: kinesin light chain 2
  ENST ID: ENST00000461611
  CDS Start-End: 76-643
ggtgcgggtccgggtgaagcgggaggcagccagagtcggagccgggcccgagcaccaggcgcagacgccacagccatggccatgatggtgtttccgcgggaggagaagctgagccaggatgagatcgtgctgggcaccaaggctgtcatccagggactggagactctgcgtggggagcatcgtgccctgctggctcctctggttgcacctgaggccggcgaagccgagcctggctcgcaggagcgctgcatcctcctgcgtcgctccctggaagccattgagcttgggctgggggaggcccaggaggagaagggggacgtccccaaagacacactggatgacctgttccccaatgaggatgagcagagcccagcccctagcccaggaggaggggatgtgtctggtcagcatgggggctacgagatcccggcccggctccgcaccctgcacaacctggtgatccaatacgcctcacagggccgctacgaggtagctgtgccactctgcaagcaggcactcgaagacctggagaagacgtcaggccacgaccaccctgacgttgccaccatgctgaacatcctggcactggtctatcgggatcagaacaagtacaaggaggctgcccacctgctcaatgatgctc

SEQ ID NO: 146877 - DNA, 559 bp, Homo sapiens
  Payload ID: 9053
  Gene Symbol: KLC2
  Gene Name: kinesin light chain 2
  ENST ID: ENST00000531240
  CDS Start-End: 244-559
gcgagccagataacagcggcactcacttctcgggtcttcgtgagcattaagtcaatgaacccagggcaccaaagcgcgcaacacgcagtaggcgctcagttagtggcgcctcgctctgtactccaggaagcccaaccttctccctgcgcctcagtttctcccgacgtcctcgatggcgccatggcgccacactaggcccggcgcccgcctgcccgcaccctcgtcctcacagacgccacagccatggccatgatggtgtttccgcgggaggagaagctgagccaggatgagatcgtgctgggcaccaaggctgtcatccagggactggagactctgcgtggggagcatcgtgccctgctggctcctctggttgcacctgaggccggcgaagccgagcctggctcgcaggagcgctgcatcctcctgcgtcgctccctggaagccattgagcttgggctgggggaggcccaggtgatcttggcattgtcgagccacctgggggctgtagaatcagagaagcagaagctgcgggcgcaggtgcggcgtctggtgcaggaga

SEQ ID NO: 146878 - DNA, 594 bp, Homo sapiens
  Payload ID: 9053
  Gene Symbol: KLC2
  Gene Name: kinesin light chain 2
  ENST ID: ENST00000526758
  CDS Start-End: 160-594
ctcgatggccccgccccgtccccctcccgctggagccggcccggcccgcgctcctttaaggcagcgaacgggccaagagaagcgtgtttcgccccctccgacgccaccgaggcccggcgcccgcctgcccgcaccctcgtcctcacagacgccacagccatggccatgatggtgtttccgcgggaggagaagctgagccaggatgagatcgtgctgggcaccaaggctgtcatccagggactggagactctgcgtggggagcatcgtgccctgctggctcctctggttgcacctgaggccggcgaagccgagcctggctcgcaggagcgctgcatcctcctgcgtcgctccctggaagccattgagcttgggctgggggaggcccaggtgatcttggcattgtcgagccacctgggggctgtagaatcagagaagcagaagctgcgggcgcaggtgcggcgtctggtgcaggagaaccagtggctgcgtgaggagctggcggggacacagcagaagctgcagcgcagtgagcaggccgtggcccagctcgaggaggagaagcagcacttgctgttcatgagccagatccgcaag

SEQ ID NO: 146879 - DNA, 1780 bp, Homo sapiens
  Payload ID: 9054
  Gene Symbol: KLC3
  Gene Name: kinesin light chain 3
  Uniprot ID: Q6P597
  ENST ID: ENST00000391946
  CDS Start-End: 103-1617
cgcccggcgcagcgggagcggcggggcgtgcctggcctgcgggacgcgactgatcgcagtggggcgaagcggggccggagccgcccgcggtcaggagcagcaatgtctgtgcaggtagcggctcctggaagtgcagggctgggcccagagcgcctgagccctgaggagctggtgcggcagacgcggcaagtggtccaggggctggaggcgctgcgggcagagcaccatggcctggctgggcacctggcggaggccctggcgggacagggcccggcagccggcttggagatgctggaggaaaagcagcaggtggtgagccactcgctggaggccatcgagctggggctgggcgaggcccaggtgctgctggccctgtcggcacatgtgggtgcactggaggcagagaagcagcggctgcgctcgcaggcccggcggctggcccaggagaacgtgtggctgcgggaggaactggaggagacgcagcggcggcttcgggccagcgaggagtccgtggcccagctggaggaggagaagcgccacctggagttcctggggcagctgcgacagtacgacccaccggcggagagccagcagtctgagtccccgcctcgccgagacagcctggcctccctgttccccagcgaggaggaggagaggaaaggtcctgaggccgcaggagcagcagctgctcagcagggtggctatgagatccctgcccgccttcggaccctgcataacctcgtgatccagtacgcggggcagggccgctatgaggtggcggtgcctctgtgccgccaggccttggaggacctggagcgcagctcgggccactgccaccctgacgtggccaccatgctcaacatcctggcgctggtgtaccgggaccagaacaagtacaaagaagccacagaccttctccatgatgccctgcagatccgggagcagacgctgggccctgagcaccccgcggtggccgccacgctcaacaacttggctgtcctctatgggaagcgtgggcgttaccgggaggcagagcccctgtgccagcgcgctttggagatccgagagaaggtcctgggtgctgaccacccagatgtggccaagcagctcaacaacctggccctgctgtgccagaaccagggcaagtttgaggacgtggagcggcactatgcccgggccctgagcatctatgaggcactgggcgggccccatgaccccaacgtggccaagaccaagaacaacctggcctcagcctacctgaaacagaacaagtatcaacaagcggaagagctgtacaaagaaatcctccacaaggaggacctacccgcccctctcggtgcccccaacacaggcacagctggtgacgcagaacaggcccttcgccgcagcagctcactctccaagatccgtgagtctatcaggcgaggaagtgagaagctggtctcccggctccgaggcgaggcggcggcaggagcagccggaatgaagagagccatgtcactcaacacactgaacgtggatgctccaagggctcctgggactcagtttcccagctggcacctggacaaggcccctcggaccctcagcgccagcacccaggacctgagcccccactaacgtccagtgaactgcgctggccgcagcttcttgggaacagtgcaggagggatgggctggtggggtgagagggggtctatcatctcctggcccccccttgcctctgggtacctggtggatagctgccttctcctgcgattaaaggctgtggacgtgacagtgag

SEQ ID NO: 146880 - DNA, 1820 bp, Homo sapiens
  Payload ID: 9054
  Gene Symbol: KLC3
  Gene Name: kinesin light chain 3
  Uniprot ID: Q6P597
  ENST ID: ENST00000470402
  CDS Start-End: 101-1657
aggatgggtggagcagggaagagccaggatggggagaagttaggggtcctgatggccattatgggaatagaggctgggggccaactgactggcccgggcaatgattccccaaacccctcaccattgctccccaggagcagcaatgtctgtgcaggtagcggctcctggaagtgcagggctgggcccagagcgcctgagccctgaggagctggtgcggcagacgcggcaagtggtccaggggctggaggcgctgcgggcagagcaccatggcctggctgggcacctggcggaggccctggcgggacagggcccggcagccggcttggagatgctggaggaaaagcagcaggtggtgagccactcgctggaggccatcgagctggggctgggcgaggcccaggtgctgctggccctgtcggcacatgtgggtgcactggaggcagagaagcagcggctgcgctcgcaggcccggcggctggcccaggagaacgtgtggctgcgggaggaactggaggagacgcagcggcggcttcgggccagcgaggagtccgtggcccagctggaggaggagaagcgccacctggagttcctggggcagctgcgacagtacgacccaccggcggagagccagcagtctgagtccccgcctcgccgagacagcctggcctccctgttccccagcgaggaggaggagaggaaaggtcctgaggccgcaggagcagcagctgctcagcagggtggctatgagatccctgcccgccttcggaccctgcataacctcgtgatccagtacgcggggcagggccgctatgaggtggcggtgcctctgtgccgccaggccttggaggacctggagcgcagctcgggccactgccaccctgacgtggccaccatgctcaacatcctggcgctggtgtaccgggaccagaacaagtacaaagaagccacagaccttctccatgatgccctgcagatccgggagcagacgctgggccctgagcaccccgcggtggccgccacgctcaacaacttggctgtcctctatgggaagcgtgggcgttaccgggaggcagagcccctgtgccagcgcgctttggagatccgagagaaggtcctgggtgctgaccacccagatgtggccaagcagctcaacaacctggccctgctgtgccagaaccagggcaagtttgaggacgtggagcggcactatgcccgggccctgagcatctatgaggcactgggcgggccccatgaccccaacgtggccaagaccaagaacaacctggcctcagcctacctgaaacagaacaagtatcaacaagcggaagagctgtacaaagaaatcctccacaaggaggacctacccgcccctctcggtgcccccaacacaggcacagctggtgacgcagaacaggcccttcgccgcagcagctcactctccaagatccgtgagtctatcaggcgaggaagtgagaagctggtctcccggctccgaggcgaggcggcggcaggagcagccggaatgaagagagccatgtcactcaacacactgaacgtggatgctccaagggctcctgggactcagtttcccagctggcacctggacaaggcccctcggaccctcagcgccagcacccaggacctgagcccccactaacgtccagtgaactgcgctggccgcagcttcttgggaacagtgcaggagggatgggctggtggggtgagagggggtctatcatctcctggcccccccttgcctctgggtacctggtggatagctgccttctcctgcgattaaaggctgtggacgtgacagtgag

SEQ ID NO: 146881 - DNA, 2006 bp, Homo sapiens
  Payload ID: 9054
  Gene Symbol: KLC3
  Gene Name: kinesin light chain 3
  ENST ID: ENST00000589373
  CDS Start-End: 817-2006
tccacccacctcggtctcccaaagtgccaggattacaggcgtgagccactgcgcctggccattttatttttatttttatttttttacattttatttttggttcatggttttttacattttattttggtacaattttattttggagacaggttcttacctcttgccccactctttttcacccaagctggaatacagtggtgccatcatagctcactgcaaccttgacctctggggatcccacctcaatctcccaagcagctgcaactacaggtgtgcgccaccacacttggctcattttaacttttttttttttttgtggagatggggatcttgctatattgcccaggctggtctcaaactcctggtctcaagcaatcctcctgccttggcctctcaaagtgctgggattacaggtgtgagccaccatgcctggtcaatagctctaaaatggatgtggggttggctgacagttggccaatccaggccgggctcagatgggaagttctgcttcatatgggaaccttgtggagtgcaggctgaggggagaggaagctctcaggggaagcccgtctcatggtgatgctgagatgcaaaaagaaatgttcaaggtctcttgaggcctaagctcagaactgacacgactgtcacttgtgcccctctgctattggccaaagcaagtcacatggccacaccaaaagttcaaggcccatcattttgtcgtcctccacagataggttcatcctatgttccccaagttggtctcaaactcctaggctccagcaatcctcctgaagccctgggattacaggagcagcaatgtctgtgcaggtagcggctcctggaagtgcagggctgggcccagagcgcctgagccctgaggagctggtgcggcagacgcggcaagtggtccaggggctggaggcgctgcgggcagagcaccatggcctggctgggcacctggcggaggccctggcgggacagggcccggcagccggcttggagatgctggaggaaaagcagcaggtggtgagccactcgctggaggccatcgagctggggctgggcgaggcccaggtgctgctggccctgtcggcacatgtgggtgcactggaggcagagaagcagcggctgcgctcgcaggcccggcggctggcccaggagaacgtgtggctgcgggaggaactggaggagacgcagcggcggcttcgggccagcgaggagtccgtggcccagctggaggaggagaagcgccacctggagttcctggggcagctgcgacagtacgacccaccggcggagagccagcagtctgagtccccgcctcgccgagacagcctggcctccctgttccccagcgaggaggaggagaggaaaggtcctgaggccgcaggagcagcagctgctcagcagggtggctatgagatccctgcccgccttcggaccctgcataacctcgtgatccagtacgcggggcagggccgctatgaggtggcggtgcctctgtgccgccaggccttggaggacctggagcgcagctcgggccactgccaccctgacgtggccaccatgctcaacatcctggcgctggtgtaccgggaccagaacaagtacaaagaagccacagaccttctccatgatgccctgcagatccgggagcagacgctgggccctgagcaccccgcggtggccgccacgctcaacaacttggctgtcctctatgggaagcgtgggcgttaccgggaggcagagcccctgtgccagcgcgctttggagatccgagagaaggtcctgggtgctgaccacccagatgtggccaagcagctcaacaacctggccctgctgtgccagaaccagggcaagtttgaggacgtggagcggcactatgcccgggccctgagcatctatgaggcactgggcgggccccatgaccccaacgtggccaagaccaagaacaacctggcctcagcctacctgaaacagaacaagtatcaacaagcggaagagct

SEQ ID NO: 146882 - DNA, 1764 bp, Homo sapiens
  Payload ID: 9054
  Gene Symbol: KLC3
  Gene Name: kinesin light chain 3
  Uniprot ID: Q6P597
  ENST ID: ENST00000585434
  CDS Start-End: 95-1606
gcagcgggagcggcggggcgtgcctggcctgcgggacgcgactgatcgcagtggggcgaagcggggccggagccgcccgcggtcaggagcagcaatgtctgtgcaggtagcggctcctggaagtgcagggctgggcccagagcgcctgagccctgaggagctggtgcggcagacgcggcaagtggtccaggggctggaggcgctgcgggcagagcaccatggcctggctgggcacctggcggaggccctggcgggacagggcccggcagccggcttggagatgctggaggaaaagcagcaggtggtgagccactcgctggaggccatcgagctggggctgggcgaggcccaggtgctgctggccctgtcggcacatgtgggtgcactggaggcagagaagcagcggctgcgctcgcaggcccggcggctggcccaggagaacgtgtggctgcgggaggaactggaggagacgcagcggcggcttcgggccagcgaggagtccgtggcccagctggaggaggagaagcgccacctggagttcctggggcagctgcgacagtacgacccaccggcggagagccagtctgagtccccgcctcgccgagacagcctggcctccctgttccccagcgaggaggaggagaggaaaggtcctgaggccgcaggagcagcagctgctcagcagggtggctatgagatccctgcccgccttcggaccctgcataacctcgtgatccagtacgcggggcagggccgctatgaggtggcggtgcctctgtgccgccaggccttggaggacctggagcgcagctcgggccactgccaccctgacgtggccaccatgctcaacatcctggcgctggtgtaccgggaccagaacaagtacaaagaagccacagaccttctccatgatgccctgcagatccgggagcagacgctgggccctgagcaccccgcggtggccgccacgctcaacaacttggctgtcctctatgggaagcgtgggcgttaccgggaggcagagcccctgtgccagcgcgctttggagatccgagagaaggtcctgggtgctgaccacccagatgtggccaagcagctcaacaacctggccctgctgtgccagaaccagggcaagtttgaggacgtggagcggcactatgcccgggccctgagcatctatgaggcactgggcgggccccatgaccccaacgtggccaagaccaagaacaacctggcctcagcctacctgaaacagaacaagtatcaacaagcggaagagctgtacaaagaaatcctccacaaggaggacctacccgcccctctcggtgcccccaacacaggcacagctggtgacgcagaacaggcccttcgccgcagcagctcactctccaagatccgtgagtctatcaggcgaggaagtgagaagctggtctcccggctccgaggcgaggcggcggcaggagcagccggaatgaagagagccatgtcactcaacacactgaacgtggatgctccaagggctcctgggactcagtttcccagctggcacctggacaaggcccctcggaccctcagcgccagcacccaggacctgagcccccactaacgtccagtgaactgcgctggccgcagcttcttgggaacagtgcaggagggatgggctggtggggtgagagggggtctatcatctcctggcccccccttgcctctgggtacctggtggatagctgccttctcctgcgattaaaggctgtggacgtgaca

SEQ ID NO: 146883 - DNA, 809 bp, Homo sapiens
  Payload ID: 9054
  Gene Symbol: KLC3
  Gene Name: kinesin light chain 3
  ENST ID: ENST00000590063
  CDS Start-End: 338-809
ggagggcggagcccctgttcccccagggtccatctgttgcctgggagccaacacatggccccatcctcattccccccaacctagaggcctcctgggcttctgggggccctggcccctcggccctctcctcccaccccacccacccccagtggtctgactggttcccgacaaaaacaccctaagaatgagctcacgcagaggctgccgcctccacacgccccgcctcactctgccggcagaggagggtgcctctggtcccaggtcacacggccaaccgggagctctgggccaggggatccaagggccttggggtggggaaggctggccaggagcagcaatgtctgtgcaggtagcggctcctggaagtgcagggctgggcccagagcgcctgagccctgaggagctggtgcggcagacgcggcaagtggtccaggggctggaggcgctgcgggcagagcaccatggcctggctgggcacctggcggaggccctggcgggacagggcccggcagccggcttggagatgctggaggaaaagcagcaggtggtgagccactcgctggaggccatcgagctggggctgggcgaggcccaggtgctgctggccctgtcggcacatgtgggtgcactggaggcagagaagcagcggctgcgctcgcaggcccggcggctggcccaggagaacgtgtggctgcgggaggaactggaggagacgcagcggcggcttcgggccagcgaggagtccgtggcccagctggaggaggagaagcgccacctggagttcctggggcagctgcgacagtacgacc

SEQ ID NO: 146884 - DNA, 973 bp, Homo sapiens
  Payload ID: 9054
  Gene Symbol: KLC3
  Gene Name: kinesin light chain 3
  ENST ID: ENST00000589837
  CDS Start-End: 82-973
cggggcgtgcctggcctgcgggacgcgactgatcgcagtggggcgaagcggggccggagccgcccgcggtcaggagcagcaatgtctgtgcaggtagcggctcctggaagtgcagggctgggcccagagcgcctgagccctgaggagctggtgcggcagacgcggcaagtggtccaggggctggaggcgctgcgggcagagcaccatggcctggctgggcacctggcggaggccctggcgggacagggcccggcagccggcttggagatgctggaggaaaagcagcaggtggtgctgctggccctgtcggcacatgtgggtgcactggaggcagagaagcagcggctgcgctcgcaggcccggcggctggcccaggagaacgtgtggctgcgggaggaactggaggagacgcagcggcggcttcgggccagcgaggagtccgtggcccagctggaggaggagaagcgccacctggagttcctggggcagctgcgacagtacgacccaccggcggagagccagcagtctgagtccccgcctcgccgagacagcctggcctccctgttccccagcgaggaggaggagaggaaaggtcctgaggccgcaggagcagcagctgctcagcagggtggctatgagatccctgcccgccttcggaccctgcataacctcgtgatccagtacgcggggcagggccgctatgaggtggcggtgcctctgtgccgccaggccttggaggacctggagcgcagctcgggccactgccaccctgacgtggccaccatgctcaacatcctggcgctggtgtaccgggaccagaacaagtacaaagaagccacagaccttctccatgatgccctgcagatccgggagcagacgctgggccctgagcaccccgcggtggccgccacgctcaacaacttggctgtcctctatgggaagcgtgggcgttaccgggaggcagagcccctgt

SEQ ID NO: 146885 - DNA, 2688 bp, Homo sapiens
  Payload ID: 9055
  Gene Symbol: KLC4
  Gene Name: kinesin light chain 4
  Uniprot ID: Q9NSK0
  ENST ID: ENST00000259708
  CDS Start-End: 354-2267
agacgacctgccccgccccctgcgccaccgactgactcagtgacctcggggtcgttaggcctccacgtcctcgctggagctgcggacctcagtcgtccatccacacctcccccctgccgcccccgcccatctcactctcccaaccctgggcaccagggcaggtcgacagcccgaggcactcctctactgcgtttccaggcccaggagacccactccagcgccgcggttccttgcgacccggcagccgttcagcagacctcccattctttcctgcatcatcgggcattgtggaggcaccctacggtgattcctctcagagcctgtttgtaggtgaccgtgacagagacaaaaccatggaagtgactgggtttggagtgaccagaccgggcaaggtcccccaggccaggatgtcaggcctggtgttggggcagcgggatgagcctgcaggccaccggctcagccaagaggagatcctggggagcacacggctggtcagccaagggctagaggccctacgcagtgaacaccaggccgtgctgcaaagcctgtcccagaccattgagtgtctgcagcagggaggccatgaggaagggctggtgcatgagaaggcccggcagcttcgccgttctatggaaaacattgagctcgggctgagtgaggcccaggtgatgctggctctagccagccacctgagcacagtggagtcggagaaacagaagctgcgggctcaggtgcggcggctatgccaggagaaccagtggctgcgggatgagctggctggcacccagcagcggctacagcgcagtgaacaggctgtggctcagctggaggaggaaaagaagcacctggagttcctggggcagctgcggcagtatgatgaggatggacatacctcggaggagaaagaaggcgatgccaccaaggattccctggatgacctctttcctaatgaggaggaagaggaccccagcaatggcttgtcccgtggtcaaggtgctacagcagctcagcagggtggatatgagatcccagcaaggttgcggacgttgcacaacctggtgatccagtacgcagcccaaggtcgctatgaggtggccgtgccactctgtaagcaggcactagaggacctggagcgcacatcaggccgtggccaccctgatgtcgccaccatgctcaacatccttgctttggtgtatcgtgaccagaataagtataaggaagctgcccacctgctgaatgatgcccttagcatccgggagagcaccttgggacctgaccatcctgctgtggctgccacactcaacaatttggctgtgctctatggcaaaaggggcaagtacaaggaggcagagcctctgtgccagcgggcactggagattcgagaaaaggtcctgggcacgaatcatccagatgtggcaaaacagctgaacaacctggccctcttgtgccaaaaccagggcaagtatgaggccgtggaacgctactaccagcgagcactggccatctacgaggggcagctggggccggacaaccctaatgtagcccggaccaagaacaacctggcttcctgttacctgaaacagggcaaatatgctgaggctgagacactatacaaagagatcctgacccgtgcccatgtacaggagtttgggtctgtggatgatgaccacaagcccatctggatgcatgcagaggagcgggaggaaatgagcaaaagccggcaccatgagggtgggacaccctatgctgagtatggaggctggtacaaggcctgcaaagtgagcagccccacagtgaacactactctgagaaacctgggagctctgtataggcgccagggaaagctggaggctgctgagaccctggaggaatgtgccctgcggtcccggagacagggcactgaccctatcagccagacgaaggtggcagagctgcttggggagagtgatggtagaaggacctcccaggagggccctggagacagtgtgaaattcgagggaggtgaagatgcttctgtggctgtggagtggtccggggatggcagtgggaccctgcagaggagtggctctcttggcaagatccgggatgtgctccgcagaagcagtgaactcttggtgaggaagctccaggggactgagcctcggccctccagcagcaacatgaagcgagcagcctccttgaactatctgaaccaacctagtgcagcacccctccaggtctcccggggcctcagtgccagcaccatggacctctcttcaagcagctgacattcaacccggcccccaggtctgctgggtccccccacccccacagccctcacagcattccccattgctcctggctcttccccacccctaggtgggacagtgaaggggagcagtttaaccagaagattgctgctgcccttagggtctcagctccctcctcaggaatccctcttaggaaggaccctcaggacaccctctctgcaccctgtggtcctctagagtagctagctctgaggccccaaggtgggtacaaagcaggtatggccctcagagatgcagcctgctgctggcttttcagtcagagggttgggggctggccagccaagctgccttgccctggccgctcttactccctccctctgctgtctcacttcaggtccatgtatttcacttttcttaaataaaagaatcaggtaacctt

SEQ ID NO: 146886 - DNA, 2404 bp, Homo sapiens
  Payload ID: 9055
  Gene Symbol: KLC4
  Gene Name: kinesin light chain 4
  Uniprot ID: Q9NSK0
  ENST ID: ENST00000347162
  CDS Start-End: 118-1977
agacccgtcaaaacaattgcctcgagcggcagccatcatggatttaaaggggcagtaccggcaagagcggcagccacaccggcagattgcagaccgggcaaggtcccccaggccaggatgtcaggcctggtgttggggcagcgggatgagcctgcaggccaccggctcagccaagaggagatcctggggagcacacggctggtcagccaagggctagaggccctacgcagtgaacaccaggccgtgctgcaaagcctgtcccagaccattgagtgtctgcagcagggaggccatgaggaagggctggtgcatgagaaggcccggcagcttcgccgttctatggaaaacattgagctcgggctgagtgaggcccaggtgatgctggctctagccagccacctgagcacagtggagtcggagaaacagaagctgcgggctcaggtgcggcggctatgccaggagaaccagtggctgcgggatgagctggctggcacccagcagcggctacagcgcagtgaacaggctgtggctcagctggaggaggaaaagaagcacctggagttcctggggcagctgcggcagtatgatgaggatggacatacctcggaggagaaagaaggcgatgccaccaaggattccctggatgacctctttcctaatgaggaggaagaggaccccagcaatggcttgtcccgtggtcaaggtgctacagcagctcagcagggtggatatgagatcccagcaaggttgcggacgttgcacaacctggtgatccagtacgcagcccaaggtcgctatgaggtggccgtgccactctgtaagcaggcactagaggacctggagcgcacatcaggccgtggccaccctgatgtcgccaccatgctcaacatccttgctttggtgtatcgtgaccagaataagtataaggaagctgcccacctgctgaatgatgcccttagcatccgggagagcaccttgggacctgaccatcctgctgtggctgccacactcaacaatttggctgtgctctatggcaaaaggggcaagtacaaggaggcagagcctctgtgccagcgggcactggagattcgagaaaaggtcctgggcacgaatcatccagatgtggcaaaacagctgaacaacctggccctcttgtgccaaaaccagggcaagtatgaggccgtggaacgctactaccagcgagcactggccatctacgaggggcagctggggccggacaaccctaatgtagcccggaccaagaacaacctggcttcctgttacctgaaacagggcaaatatgctgaggctgagacactatacaaagagatcctgacccgtgcccatgtacaggagtttgggtctgtggatgatgaccacaagcccatctggatgcatgcagaggagcgggaggaaatgagcaaaagccggcaccatgagggtgggacaccctatgctgagtatggaggctggtacaaggcctgcaaagtgagcagccccacagtgaacactactctgagaaacctgggagctctgtataggcgccagggaaagctggaggctgctgagaccctggaggaatgtgccctgcggtcccggagacagggcactgaccctatcagccagacgaaggtggcagagctgcttggggagagtgatggtagaaggacctcccaggagggccctggagacagtgtgaaattcgagggaggtgaagatgcttctgtggctgtggagtggtccggggatggcagtgggaccctgcagaggagtggctctcttggcaagatccgggatgtgctccgcagaagcagtgaactcttggtgaggaagctccaggggactgagcctcggccctccagcagcaacatgaagcgagcagcctccttgaactatctgaaccaacctagtgcagcacccctccaggtctcccggggcctcagtgccagcaccatggacctctcttcaagcagctgacattcaacccggcccccaggtctgctgggtccccccacccccacagccctcacagcattccccattgctcctggctcttccccacccctaggtgggacagtgaaggggagcagtttaaccagaagattgctgctgcccttagggtctcagctccctcctcaggaatccctcttaggaaggaccctcaggacaccctctctgcaccctgtggtcctctagagtagctagctctgaggccccaaggtgggtacaaagcaggtatggccctcagagatgcagcctgctgctggcttttcagtcagagggttgggggctggccagccaagctgccttgccctggccgctcttactccctccctctgctgtctcacttcaggtccatgtatttcacttttcttaaataaaagaatcaggtaacctttctgtg

SEQ ID NO: 146887 - DNA, 2770 bp, Homo sapiens
  Payload ID: 9055
  Gene Symbol: KLC4
  Gene Name: kinesin light chain 4
  Uniprot ID: Q9NSK0
  ENST ID: ENST00000394056
  CDS Start-End: 496-2355
agtgacctcggggtcgttaggcctccacgtcctcgctggagctgcggacctcagtcgtccatccacacctcccccctgccgcccccgcccatctcactctcccaaccctgggcaccagggcaggtcgacagcccgaggcactcctctactgcgtttccaggcccaggagacccactccagcgccgcggttccttgcgacccggcagccgttcagcagacctcccattctttcctgcatcatcgggcattgtggaggcaccctacggtgattcctctcagagcctgtttgtaggtgaccgtgacagagacaaaaccatggaagtgactgggtttggagtgaccaggtgttcctccctcccctttcccagacacgcctcttgctggcagatcctctgactctctggctgcagaacagtttcttccgtgctctggcctgagtgccacagccagggcctctgctctgtacacagaccgggcaaggtcccccaggccaggatgtcaggcctggtgttggggcagcgggatgagcctgcaggccaccggctcagccaagaggagatcctggggagcacacggctggtcagccaagggctagaggccctacgcagtgaacaccaggccgtgctgcaaagcctgtcccagaccattgagtgtctgcagcagggaggccatgaggaagggctggtgcatgagaaggcccggcagcttcgccgttctatggaaaacattgagctcgggctgagtgaggcccaggtgatgctggctctagccagccacctgagcacagtggagtcggagaaacagaagctgcgggctcaggtgcggcggctatgccaggagaaccagtggctgcgggatgagctggctggcacccagcagcggctacagcgcagtgaacaggctgtggctcagctggaggaggaaaagaagcacctggagttcctggggcagctgcggcagtatgatgaggatggacatacctcggaggagaaagaaggcgatgccaccaaggattccctggatgacctctttcctaatgaggaggaagaggaccccagcaatggcttgtcccgtggtcaaggtgctacagcagctcagcagggtggatatgagatcccagcaaggttgcggacgttgcacaacctggtgatccagtacgcagcccaaggtcgctatgaggtggccgtgccactctgtaagcaggcactagaggacctggagcgcacatcaggccgtggccaccctgatgtcgccaccatgctcaacatccttgctttggtgtatcgtgaccagaataagtataaggaagctgcccacctgctgaatgatgcccttagcatccgggagagcaccttgggacctgaccatcctgctgtggctgccacactcaacaatttggctgtgctctatggcaaaaggggcaagtacaaggaggcagagcctctgtgccagcgggcactggagattcgagaaaaggtcctgggcacgaatcatccagatgtggcaaaacagctgaacaacctggccctcttgtgccaaaaccagggcaagtatgaggccgtggaacgctactaccagcgagcactggccatctacgaggggcagctggggccggacaaccctaatgtagcccggaccaagaacaacctggcttcctgttacctgaaacagggcaaatatgctgaggctgagacactatacaaagagatcctgacccgtgcccatgtacaggagtttgggtctgtggatgatgaccacaagcccatctggatgcatgcagaggagcgggaggaaatgagcaaaagccggcaccatgagggtgggacaccctatgctgagtatggaggctggtacaaggcctgcaaagtgagcagccccacagtgaacactactctgagaaacctgggagctctgtataggcgccagggaaagctggaggctgctgagaccctggaggaatgtgccctgcggtcccggagacagggcactgaccctatcagccagacgaaggtggcagagctgcttggggagagtgatggtagaaggacctcccaggagggccctggagacagtgtgaaattcgagggaggtgaagatgcttctgtggctgtggagtggtccggggatggcagtgggaccctgcagaggagtggctctcttggcaagatccgggatgtgctccgcagaagcagtgaactcttggtgaggaagctccaggggactgagcctcggccctccagcagcaacatgaagcgagcagcctccttgaactatctgaaccaacctagtgcagcacccctccaggtctcccggggcctcagtgccagcaccatggacctctcttcaagcagctgacattcaacccggcccccaggtctgctgggtccccccacccccacagccctcacagcattccccattgctcctggctcttccccacccctaggtgggacagtgaaggggagcagtttaaccagaagattgctgctgcccttagggtctcagctccctcctcaggaatccctcttaggaaggaccctcaggacaccctctctgcaccctgtggtcctctagagtagctagctctgaggccccaaggtgggtacaaagcaggtatggccctcagagatgcagcctgctgctggcttttcagtcagagggttgggggctggccagccaagctgccttgccctggccgctcttactccctccctctgctgtctcacttcaggtccatgtatttcacttttcttaaataaaagaatcaggt

SEQ ID NO: 146888 - DNA, 1945 bp, Homo sapiens
  Payload ID: 9055
  Gene Symbol: KLC4
  Gene Name: kinesin light chain 4
  Uniprot ID: Q9NSK0
  ENST ID: ENST00000453940
  CDS Start-End: 81-1709
atggatttaaaggggcagtaccggcaagagcggcagccacaccggcagattgcagaccgggcaaggtcccccaggccaggatgtcaggcctggtgttggggcagcgggatgagcctgcaggccaccggctcagccaagaggagatcctggggagcacacggctggtcagccaagggctagaggccctacgcagtgaacaccaggccgtgctgcaaagcctgtcccagaccattgagtgtctgcagcagggaggccatgaggaagggctggtgcatgagaaggcccggcagcttcgccgttctatggaaaacattgagctcgggctgagtgaggcccaggaggagaaagaaggcgatgccaccaaggattccctggatgacctctttcctaatgaggaggaagaggaccccagcaatggcttgtcccgtggtcaaggtgctacagcagctcagcagggtggatatgagatcccagcaaggttgcggacgttgcacaacctggtgatccagtacgcagcccaaggtcgctatgaggtggccgtgccactctgtaagcaggcactagaggacctggagcgcacatcaggccgtggccaccctgatgtcgccaccatgctcaacatccttgctttggtgtatcgtgaccagaataagtataaggaagctgcccacctgctgaatgatgcccttagcatccgggagagcaccttgggacctgaccatcctgctgtggctgccacactcaacaatttggctgtgctctatggcaaaaggggcaagtacaaggaggcagagcctctgtgccagcgggcactggagattcgagaaaaggtcctgggcacgaatcatccagatgtggcaaaacagctgaacaacctggccctcttgtgccaaaaccagggcaagtatgaggccgtggaacgctactaccagcgagcactggccatctacgaggggcagctggggccggacaaccctaatgtagcccggaccaagaacaacctggcttcctgttacctgaaacagggcaaatatgctgaggctgagacactatacaaagagatcctgacccgtgcccatgtacaggagtttgggtctgtggatgatgaccacaagcccatctggatgcatgcagaggagcgggaggaaatgagcaaaagccggcaccatgagggtgggacaccctatgctgagtatggaggctggtacaaggcctgcaaagtgagcagccccacagtgaacactactctgagaaacctgggagctctgtataggcgccagggaaagctggaggctgctgagaccctggaggaatgtgccctgcggtcccggagacagggcactgaccctatcagccagacgaaggtggcagagctgcttggggagagtgatggtagaaggacctcccaggagggccctggagacagtgtgaaattcgagggaggtgaagatgcttctgtggctgtggagtggtccggggatggcagtgggaccctgcagaggagtggctctcttggcaagatccgggatgtgctccgcagaagcagtgaactcttggtgaggaagctccaggggactgagcctcggccctccagcagcaacatgaagcgagcagcctccttgaactatctgaaccaacctagtgcagcacccctccaggtctcccggggcctcagtgccagcaccatggacctctcttcaagcagctgacattcaacccggcccccaggtctgctgggtccccccacccccacagccctcacagcattccccattgctcctggctcttccccacccctaggtgggacagtgaaggggagcagtttaaccagaagattgctgctgcccttagggtctcagctccctcctcaggaatccctcttaggaaggaccctcaggacaccctctctgcaccctgtggtcctctagagtagctagctctgagg

SEQ ID NO: 146889 - DNA, 1251 bp, Homo sapiens
  Payload ID: 9055
  Gene Symbol: KLC4
  Gene Name: kinesin light chain 4
  Uniprot ID: Q9NSK0
  ENST ID: ENST00000458460
  CDS Start-End: 59-1006
ggcaagagcggcagccacaccggcagattgcagaccgggcaaggtcccccaggccaggatgtcaggcctggtgttggggcagcgggatgagcctgcaggccaccggctcagccaagaggagatcctggggagcacacggctggtcagccaagggctagaggccctacgcagtgaacaccaggccgtgctgcaaagcctgtcccagaccattgagtgtctgcagcagggaggccatgaggaagggctggtgcatgagaaggcccggcagcttcgccgttctatggaaaacattgagctcgggctgagtgaggcccaggtgatgctggctctagccagccacctgagcacagtggagtcggagaaacagaagctgcgggctcaggtgcggcggctatgccaggagaaccagtggctgcgggatgagctggctggcacccagcagcggctacagcgcagtgaacaggctgtggctcagctggaggaggaaaagaagcacctggagttcctggggcagctgcggcagtatgatgaggatggacatacctcggaggagaaagaaggcgatgccaccaaggattccctggatgacctctttcctaatgaggaggaagaggaccccagcaatggcttgtcccgtggtcaaggtgctacagcagctcagcagggtggatatgagatcccagcaaggttgcggacgttgcacaacctggtgatccagtacgcagcccaaggtcgctatgaggtggccgtgccactctgtaagcaggcactagaggacctggagcgcacatcaggccgtggccaccctgatgtcgccaccatgctcaacatccttgctttggtgtatcgtgaccagaataagtataaggaagctgcccacctgctgaatgatgcccttagcatccgggagagcaccttgggacctgaccatcctgctgtcagtattccttgccctccccaccccacgccccgcaccccccaccattgctgttttggcctctcttagctcatccatctgctgccctcagtccactcactaagggtgctgaggaaggaggcataagaagtcctttcttccaggcactgtccagtgatcctaatgattctcaattctctgagactcagtgactcctttttataacaaatattttgcttgaatttaattaatagataagtcataggtaaatccacatatgatttctacaaaacttaatatgctactctaataaatataaaagaaaaacaagaaaa

SEQ ID NO: 146890 - DNA, 765 bp, Homo sapiens
  Payload ID: 9055
  Gene Symbol: KLC4
  Gene Name: kinesin light chain 4
  ENST ID: ENST00000469987
  CDS Start-End: 1-478
tgctgtggctgccacactcaacaatttggctgtgctctatggcaaaaggggcaagtacaaggaggcagagcctctgtgccagcgggcactggagattcgagaaaaggtcctgggcacgaatcatccagatgtggcaaaacagctgaacaacctggccctcttgtgccaaaaccagggcaagtatgaggccgtggaacgctactaccagcgagcactggccatctacgaggggcagctggggccggacaaccctaatgtagcccggaccaagaacaacctggcttcctgttacctgaaacagggcaaatatgctgaggctgagacactatacaaagagatcctgacccgtgcccatgtacaggagtttgggtctgtggatgatgaccacaagcccatctggatgcatgcagaggagcgggaggaaatgagcaaaccccacagtgaacactactctgagaaacctgggagctctgtataggcgccagggaaagctggaggctgctgagaccctggaggaatgtgccctgcggtcccggagacagtggctgatggtgaaaaaaatttgaaagccccatcctgaggagttaaggagtaggaagtcccaggtccttccttttccttccagggcactgaccctatcagccagacgaaggtggcagagctgcttggggagagtgatggtagaaggacctcccaggagggccctggagacagtgtgaaattcgagggaggtgaagatgcttctgtggctgtggagtggtccgg

SEQ ID NO: 146891 - DNA, 872 bp, Homo sapiens
  Payload ID: 9055
  Gene Symbol: KLC4
  Gene Name: kinesin light chain 4
  ENST ID: ENST00000470728
  CDS Start-End: 60-872
cggcaagagcggcagccacaccggcagattgcagaccgggcaaggtcccccaggccaggatgtcaggcctggtgttggggcagcgggatgagcctgcaggccaccggctcagccaagaggagatcctggggagcacacggctggtcagccaagggctagaggccctacgcagtgaacaccaggccgtgctgcaaagcctgtcccagaccattgagtgtctgcagcagggaggccatgaggaagggctggtgcatgagaaggcccggcagcttcgccgttctatggaaaacattgagctcgggctgagtgaggcccaggtgcggcggctatgccaggagaaccagtggctgcgggatgagctggctggcacccagcagcggctacagcgcagtgaacaggctgtggctcagctggaggaggaaaagaagcacctggagttcctggggcagctgcggcagtatgatgaggatggacatacctcggaggagaaagaaggcgatgccaccaaggattccctggatgacctctttcctaatgaggaggaagaggaccccagcaatggcttgtcccgtggtcaaggtgctacagcagctcagcagggtggatatgagatcccagcaaggttgcggacgttgcacaacctggtgatccagtacgcagcccaaggtcgctatgaggtggccgtgccactctgtaagcaggcactagaggacctggagcgcacatcaggccgtggccaccctgatgtcgccaccatgctcaacatccttgctttggtgtatcgtgaccagaataagtataaggaagctgcccacctgctgaatgatgcccttagcatccgggagagcaccttgggacctgaccatcctgct

SEQ ID NO: 146892 - DNA, 2602 bp, Homo sapiens
  Payload ID: 9055
  Gene Symbol: KLC4
  Gene Name: kinesin light chain 4
  Uniprot ID: Q9NSK0
  ENST ID: ENST00000479388
  CDS Start-End: 326-2185
accgactgactcagtgacctcggggtcgttaggcctccacgtcctcgctggagctgcggacctcagtcgtccatccacacctcccccctgccgcccccgcccatctcactctcccaaccctgggcaccagggcaggtcgacagcccgaggcactcctctactgcgtttccaggcccaggagacccactccagcgccgcggttccttgcgacccggcagccgttcagcagacctcccattctttcctgcatcatcgggcattgtggaggcaccctacggtgattcctctcagagcctgtttaccgggcaaggtcccccaggccaggatgtcaggcctggtgttggggcagcgggatgagcctgcaggccaccggctcagccaagaggagatcctggggagcacacggctggtcagccaagggctagaggccctacgcagtgaacaccaggccgtgctgcaaagcctgtcccagaccattgagtgtctgcagcagggaggccatgaggaagggctggtgcatgagaaggcccggcagcttcgccgttctatggaaaacattgagctcgggctgagtgaggcccaggtgatgctggctctagccagccacctgagcacagtggagtcggagaaacagaagctgcgggctcaggtgcggcggctatgccaggagaaccagtggctgcgggatgagctggctggcacccagcagcggctacagcgcagtgaacaggctgtggctcagctggaggaggaaaagaagcacctggagttcctggggcagctgcggcagtatgatgaggatggacatacctcggaggagaaagaaggcgatgccaccaaggattccctggatgacctctttcctaatgaggaggaagaggaccccagcaatggcttgtcccgtggtcaaggtgctacagcagctcagcagggtggatatgagatcccagcaaggttgcggacgttgcacaacctggtgatccagtacgcagcccaaggtcgctatgaggtggccgtgccactctgtaagcaggcactagaggacctggagcgcacatcaggccgtggccaccctgatgtcgccaccatgctcaacatccttgctttggtgtatcgtgaccagaataagtataaggaagctgcccacctgctgaatgatgcccttagcatccgggagagcaccttgggacctgaccatcctgctgtggctgccacactcaacaatttggctgtgctctatggcaaaaggggcaagtacaaggaggcagagcctctgtgccagcgggcactggagattcgagaaaaggtcctgggcacgaatcatccagatgtggcaaaacagctgaacaacctggccctcttgtgccaaaaccagggcaagtatgaggccgtggaacgctactaccagcgagcactggccatctacgaggggcagctggggccggacaaccctaatgtagcccggaccaagaacaacctggcttcctgttacctgaaacagggcaaatatgctgaggctgagacactatacaaagagatcctgacccgtgcccatgtacaggagtttgggtctgtggatgatgaccacaagcccatctggatgcatgcagaggagcgggaggaaatgagcaaaagccggcaccatgagggtgggacaccctatgctgagtatggaggctggtacaaggcctgcaaagtgagcagccccacagtgaacactactctgagaaacctgggagctctgtataggcgccagggaaagctggaggctgctgagaccctggaggaatgtgccctgcggtcccggagacagggcactgaccctatcagccagacgaaggtggcagagctgcttggggagagtgatggtagaaggacctcccaggagggccctggagacagtgtgaaattcgagggaggtgaagatgcttctgtggctgtggagtggtccggggatggcagtgggaccctgcagaggagtggctctcttggcaagatccgggatgtgctccgcagaagcagtgaactcttggtgaggaagctccaggggactgagcctcggccctccagcagcaacatgaagcgagcagcctccttgaactatctgaaccaacctagtgcagcacccctccaggtctcccggggcctcagtgccagcaccatggacctctcttcaagcagctgacattcaacccggcccccaggtctgctgggtccccccacccccacagccctcacagcattccccattgctcctggctcttccccacccctaggtgggacagtgaaggggagcagtttaaccagaagattgctgctgcccttagggtctcagctccctcctcaggaatccctcttaggaaggaccctcaggacaccctctctgcaccctgtggtcctctagagtagctagctctgaggccccaaggtgggtacaaagcaggtatggccctcagagatgcagcctgctgctggcttttcagtcagagggttgggggctggccagccaagctgccttgccctggccgctcttactccctccctctgctgtctcacttcaggtccatgtatttcacttttcttaaataaaagaatcaggtaa

SEQ ID NO: 146893 - DNA, 1465 bp, Homo sapiens
  Payload ID: 9055
  Gene Symbol: KLC4
  Gene Name: kinesin light chain 4
  ENST ID: ENST00000481499
  CDS Start-End: 321-458
gactcagtgacctcggggtcgttaggcctccacgtcctcgctggagctgcggacctcagtcgtccatccacacctcccccctgccgcccccgcccatctcactctcccaaccctgggcaccagggcaggtcgacagcccgaggcactcctctactgcgtttccaggcccaggagacccactccagcgccgcggttccttgcgacccggcagccgttcagcagacctcccattctttcctgcatcatcgggcattgtggaggcaccctacggtgattcctctcagagcctgtttgtaggtgaccgtgacagagacaaaaccatggaagtgactgggtttggagtgaccaggtgttcctccctcccctttcccagacacgcctcttgctgtaggtctctggttaagtctctctctctcattcccttcctgggagacagtagctccctaggcctgcaatgagggaggctggcttggggaaggagacgggaattgggcgtctttgaagacctgtgggcagagggagggagggagggtgtttgtcctgggtggggctctgggccaggtcctctgggtagctgtgaagtggtgaaagaaggggtgggaacgctggacttctggactttgggcagggcagatcctctgactctctggctgcagaacagtttcttccgtgctctggcctgagtgccacagccagggcctctgctctgtacacagaccgggcaaggtcccccaggccaggatgtcaggcctggtgttggggcagcgggatgagcctgcaggccaccggctcagccaagaggagatcctggggagcacacggctggtcagccaagggctagaggccctacgcagtgaacaccaggccgtgctgcaaagcctgtcccagaccattgagtgtctgcagcagggaggccatgaggaagggctggtgcatgagaaggcccggcagcttcgccgttctatggaaaacattgagctcgggctgagtgaggcccaggtgatgctggctctagccagccacctgagcacagtggagtcggagaaacagaagctgcgggctcaggtgcggcggctatgccaggagaaccagtggctgcgggatgagctggctggcacccagcagcggctacagcgcagtgaacaggctgtggctcagctggaggaggaaaagaagcacctggagttcctggggcagctgcggcagtatgatgaggatggacatacctcggaggagaaagaaggcgatgccaccaaggattccctggatgacctctttcctaatgaggaggaagaggaccccagcaatggcttgtcccgtggtcaaggtgctacagcagctcagcagggtggatatgagatcccagcaaggttgcggacgttgcacaacctggtgatccagtacgcagcccaaggtcgctatgaggtggccgtgccactctgtaagcaggcactagaggacctgg

SEQ ID NO: 146894 - DNA, 3604 bp, Homo sapiens
  Payload ID: 9055
  Gene Symbol: KLC4
  Gene Name: kinesin light chain 4
  Uniprot ID: Q9NSK0
  ENST ID: ENST00000467906
  CDS Start-End: 1352-1747
agtgtgggcaccagtgtggcccagcctcccactccaaggctccagcctgcctctatcccagacttccaggcccatgagctggctctgccaccatcatcctgcctcccgccagctcccgctccttaggtccacactcactggtaataatgctcaaaagtggtggctatctccaagccggagaaaatcaggacagcttgcaggcattgctgcagctgtgccagcctctccatttcctgggctccaccgatccggctgccctggatctgctggtcaatgtgccgggcgaactgctcactcacctgagcaatggcagagcacaggaaagccatgaatgagcgagcagagcaggcctgctcctgcccacctgcttctccaccacggcccgccaacagcgcgtcaggtttctcatgatgctgcttggaaggccccgggtagccaaggagctccagtcgtggcttctgtttctgccttctgtagagaccaagaaagtggcagaggcaaggagggtgcagcccctccactcccaagtccccatccaagggggttccctgaggcctttcctgacatgctgccacccaaaatgatgttcatggatggaggtgacacaaacctggaagatgaacaggctgagcccatagggaggggaaggatggggatggacagaagcctgtggtgtacacatggggcccaggaaaacgctcctgactagagctccccacctgaatctccactactcactgggccgaggagtggccaccacaggagggggtgcctcacagggctcgacatgcaccagcaggcactcgaaacgttattactgaaacctgcacaaccggtgatctgcaaagcactttcaccttaagtatctcgtctgaagaatttcgccctatgagaaagcaacacttgtagaggaaaaagctgaggctaagtgtgccttatccaaggtcacggacctgcatgactcctgaccagactcgcaactcccgcctcgcatgcccgcagaccccatctccggcagcccgaatggaagcagccttcttcccggccaagctgctcggtgctcctagatgacgttgactgtccggcgccgtcgctccgcaataacgtaaaaggaggcgggcagaaaactggagcccaagctggatacacacctcctttcctacctgaacgccgtgagagccaatccgcgggcagctctaatgtcgcgtgactaggaaacaggccccgcccccccagacccgtcaaaacaattgcctcgagcggcagccatcatggatttaaaggggcagtaccggcaagagcggcagccacaccggcagattgcagaccgggcaaggtcccccaggccaggatgtcaggcctggtgttggggcagcgggatgagcctgcaggccaccggctcagccaagaggagatcctggggagcacacggctggtcagccaagggctagaggccctacgcagtgaacaccaggccgtgctgcaaagcctgtcccagaccattgagtgtctgcagcagggaggccatgaggaagggctggtgcatgagaaggcccggcagcttcgccgttctatggaaaacattgagctcgggctgagtgaggcccagaatctggagctcaggggatgtgcccacctaggtgatgctggctctagccagccacctgagcacagtggagtcggagaaacagaagctgcgggctcaggtgcggcggctatgccaggagaaccagtggctgcgggatgagctggctggcacccagcagcggctacagcgcagtgaacaggctgtggctcagctggaggaggaaaagaagcacctggagttcctggggcagctgcggcagtatgatgaggatggacatacctcggaggagaaagaaggcgatgccaccaaggattccctggatgacctctttcctaatgaggaggaagaggaccccagcaatggcttgtcccgtggtcaaggtgctacagcagctcagcagggtggatatgagatcccagcaaggttgcggacgttgcacaacctggtgatccagtacgcagcccaaggtcgctatgaggtggccgtgccactctgtaagcaggcactagaggacctggagcgcacatcaggccgtggccaccctgatgtcgccaccatgctcaacatccttgctttggtgtatcgtgaccagaataagtataaggaagctgcccacctgctgaatgatgcccttagcatccgggagagcaccttgggacctgaccatcctgctgtggctgccacactcaacaatttggctgtgctctatggcaaaaggggcaagtacaaggaggcagagcctctgtgccagcgggcactggagattcgagaaaaggtcctgggcacgaatcatccagatgtggcaaaacagctgaacaacctggccctcttgtgccaaaaccagggcaagtatgaggccgtggaacgctactaccagcgagcactggccatctacgaggggcagctggggccggacaaccctaatgtagcccggaccaagaacaacctggcttcctgttacctgaaacagggcaaatatgctgaggctgagacactatacaaagagatcctgacccgtgcccatgtacaggagtttgggtctgtggatgagccggcaccatgagggtgggacaccctatgctgagtatggaggctggtacaaggcctgcaaagtgagcagccccacagtgaacactactctgagaaacctgggagctctgtataggcgccagggaaagctggaggctgctgagaccctggaggaatgtgccctgcggtcccggagacagggcactgaccctatcagccagacgaaggtggcagagctgcttggggagagtgatggtagaaggacctcccaggagggccctggagacagtgtgaaattcgagggaggtgaagatgcttctgtggctgtggagtggtccggggatggcagtgggaccctgcagaggagtggctctcttggcaagatccgggatgtgctccgcagaagcagtgaactcttggtgaggaagctccaggggactgagcctcggccctccagcagcaacatgaagcgagcagcctccttgaactatctgaaccaacctagtgcagcacccctccaggtctcccggggcctcagtgccagcaccatggacctctcttcaagcagctgacattcaacccggcccccaggtctgctgggtccccccacccccacagccctcacagcattccccattgctcctggctcttccccacccctaggtgggacagtgaaggggagcagtttaaccagaagattgctgctgcccttagggtctcagctccctcctcaggaatccctcttaggaaggaccctcaggacaccctctctgcaccctgtggtcctctagagtagctagctctgaggccccaaggtgggtacaaagcaggtatggccctcagagatgcagcctgctgctggcttttcagtcagagggttgggggctggccagccaagctgccttgccctggccgctcttactccctccctctgctgtctcacttcaggtccatgtatttcacttttcttaaataaaagaatcaggt

SEQ ID NO: 146895 - DNA, 577 bp, Homo sapiens
  Payload ID: 9055
  Gene Symbol: KLC4
  Gene Name: kinesin light chain 4
  ENST ID: ENST00000472792
  CDS Start-End: 330-577
accgactgactcagtgacctcggggtcgttaggcctccacgtcctcgctggagctgcggacctcagtcgtccatccacacctcccccctgccgcccccgcccatctcactctcccaaccctgggcaccagggcaggtcgacagcccgaggcactcctctactgcgtttccaggcccaggagacccactccagcgccgcggttccttgcgacccggcagccgttcagcagacctcccattctttcctgcatcatcgggcattgtggaggcaccctacggtgattcctctcagagcctgtttgtagaccgggcaaggtcccccaggccaggatgtcaggcctggtgttggggcagcgggatgagcctgcaggccaccggctcagccaagaggagatcctggggagcacacggctggtcagccaagggctagaggccctacgcagtgaacaccaggccgtgctgcaaagcctgtcccagaccattgagtgtctgcagcagggaggccatgaggaagggctggtgcatgagaaggcccggcagcttcgccgttctatggaaaacattgagctcgggctgag

SEQ ID NO: 146896 - DNA, 549 bp, Homo sapiens
  Payload ID: 9055
  Gene Symbol: KLC4
  Gene Name: kinesin light chain 4
  ENST ID: ENST00000481888
  CDS Start-End: 275-549
agcacctttgttcctactatagtcttcctttatttaagtcagttcatctccctctcgctttgcccacaaccttagctttgagtttagtgatctaagctccctgcctgctggtcactctctctctccagctaagccacagggtcactcttacttttgtcccttcacttggattcccaccactctctgagaaagttgctcagcttctctgtctcatctttacaccagctgaactctgttgtttctccctagaccgggcaaggtcccccaggccaggatgtcaggcctggtgttggggcagcgggatgagcctgcaggccaccggctcagccaagaggagatcctggggagcacacggctggtcagccaagggctagaggccctacgcagtgaacaccaggccgtgctgcaaagcctgtcccagaccattgagtgtctgcagcagggaggccatgaggaagggctggtgcatgagaaggcccggcagcttcgccgttctatggaaaacattgagctcgggctgagtgaggcccaggtgatgctggctctagc

SEQ ID NO: 146897 - DNA, 528 bp, Homo sapiens
  Payload ID: 9055
  Gene Symbol: KLC4
  Gene Name: kinesin light chain 4
  ENST ID: ENST00000479632
  CDS Start-End: 43-528
agtaccggcaagagcggcagccacaccggcagattgcaggtgatgctggctctagccagccacctgagcacagtggagtcggagaaacagaagctgcgggctcaggtgcggcggctatgccaggagaaccagtggctgcgggatgagctggctggcacccagcagcggctacagcgcagtgaacaggctgtggctcagctggaggaggaaaagaagcacctggagttcctggggcagctgcggcagtatgatgaggatggacatacctcggaggagaaagaaggcgatgccaccaaggattccctggatgacctctttcctaatgaggaggaagaggaccccagcaatggcttgtcccgtggtcaaggtgctacagcagctcagcagggtggatatgagatcccagcaaggttgcggacgttgcacaacctggtgatccagtacgcagcccaaggtcgctatgaggtggccgtgccactctgtaagcaggcactagaggacctggagcgcacatcaggccgtggccac

SEQ ID NO: 146898 - DNA, 550 bp, Homo sapiens
  Payload ID: 9055
  Gene Symbol: KLC4
  Gene Name: kinesin light chain 4
  ENST ID: ENST00000460283
  CDS Start-End: 299-550
actgactcagtgacctcggggtcgttaggcctccacgtcctcgctggagctgcggacctcagtcgtccatccacacctcccccctgccgcccccgcccatctcactctcccaaccctgggcaccagggcaggtcgacagcccgaggcactcctctactgcgtttccaggcccaggagacccactccagcgccgcggttccttgcgacccggcagccgttcagcagacctcccattctttcctgcatcatcgggcattgtggaggcaccctacgaccgggcaaggtcccccaggccaggatgtcaggcctggtgttggggcagcgggatgagcctgcaggccaccggctcagccaagaggagatcctggggagcacacggctggtcagccaagggctagaggccctacgcagtgaacaccaggccgtgctgcaaagcctgtcccagaccattgagtgtctgcagcagggaggccatgaggaagggctggtgcatgagaaggcccggcagcttcgccgttctatggaaaacattgagctcgggctgagtgag

SEQ ID NO: 146899 - DNA, 2957 bp, Homo sapiens
  Payload ID: 9056
  Gene Symbol: KIFAP3
  Gene Name: kinesin-associated protein 3
  Uniprot ID: Q92845
  ENST ID: ENST00000361580
  CDS Start-End: 229-2607
aggcgactctgggcgggtctgggccgctccagtgttttggggcacagaagctgtgggaggagctggaggcttcaccgtggtaaccacagcgccgctgctgccccgccttgcaggcctcaggactgtcatcgcctctgggtgtgagggtactttggccaccgtccccggaaataaccgcgcctgcctctcaagataccccatcctctccacgccgctgccgctgccgccatgcaaggggaggacgccagatacctcaaaaggaaagttaaaggagggaatatagatgtacatccatcagaaaaagcactcattgttcactatgaagtggaagctaccattcttggagaaatgggggaccccatgttgggagaacgaaaagaatgtcaaaaaatcattcgacttaagagtctcaatgccaacacagatataacttccctggcaaggaaggtggttgaagaatgtaaactcattcatccttcaaaactaaatgaggtagaacagctgttgtactatctacagaaccgccgtgattcattgtcaggaaaagagaaaaaagaaaaatcaagcaagcctaaagatccacctccttttgaaggaatggagattgatgaagttgctaacattaatgacatggatgaatatattgagttattatatgaagatattcctgacaaagttcggggttctgctttgatcctgcagcttgctcgaaatcctgataacttggaagaactactattgaatgaaactgcccttggtgcattagcaagggtcctgagagaagactggaagcaaagtgtcgagttagctacaaacataatttacatctttttttgtttctccagcttttctcaatttcatggacttattactcactataaaattggagctctgtgtatgaatattattgatcatgagttaaaaagacatgagctttggcaagaagaactctcaaagaagaagaaagctgttgatgaagaccctgaaaaccaaaccttgagaaaggattatgaaaaaacctttaaaaagtaccaggggcttgtggtaaaacaggaacagctattacgagttgctctttatttgcttctgaatcttgctgaggatactcgtaccgaactgaaaatgaggaacaagaacatagttcacatgttggtgaaagcccttgatcgggacaattttgagctgctaattttagttgtgtcattcttgaagaaactcagcatttttatggagaataaaaatgatatggtggaaatggatattgttgaaaaactggtgaaaatgataccttgtgagcatgaagacctgctgaatatcaccctccgacttttactaaacctatcctttgacacaggactgaggaataagatggtacaagttggactgcttcccaagctcactgcactcctaggcaatgacaactacaaacaaatagcaatgtgtgttctttaccacataagcatggatgaccgctttaaatcaatgtttgcatacactgactgtataccacagttaatgaagatgctgtttgaatgttcagatgaacgaattgacttggaactcatttctttctgcattaatcttgctgctaacaaaagaaatgtacagcttatctgtgaaggaaatgggctgaagatgctcatgaagagggctctgaagtttaaggatccattgctgatgaaaatgattagaaacatttctcagcatgatggaccaactaaaaatctgtttattgattatgttggggaccttgcagcccagatctctaatgatgaagaagaggagtttgtgattgaatgtttgggaactcttgcaaacttgaccattccagacttagactgggaattggttcttaaagaatataagttggttccatacctcaaggataaactaaaaccaggtgctgcagaagatgatcttgttttagaagtggttataatgattggaactgtatccatggatgactcttgtgctgcattgctagccaaatctggcataatccctgcactcattgaattgctaaatgctcaacaagaagatgatgaatttgtgtgtcagataatttatgtcttctaccagatggttttccaccaagccacaagagacgtcataatcaaggaaacacaggctccagcatatctcatagacctaatgcatgataagaataatgaaatccgaaaggtctgtgataatacattagatattatagcggaatatgatgaagaatgggctaagaaaattcagagtgaaaagtttcgctggcataactctcagtggctggagatggtagagagtcgtcagatggatgagagtgagcagtacttgtatggtgatgatcgaattgagccatacattcatgaaggagatattctcgaaagacctgaccttttctacaactcagatggattaattgcctctgaaggagccataagtcccgatttcttcaatgattaccaccttcaaaatggagatgttgttgggcagcattcatttcctggcagccttggaatggatggctttggccaaccagttggcattcttggacgccctgccacagcatatggattccgccctgatgaaccttactactatggctatggatcttgataaagtatctgtttccatgtgtaatctcagcttagaagaaatctgtgtgggttgggttaattttggatctttgcctaataatgcatgttgatgttattgtgggtctgtgtttgtttttatttttatatgttgttagctgcagattaaccccagcccctctgtcttctgttaagtacagttgatactgacattgttcactcatcaaaccacatcttgatgctaagtaacatttcccatgagccacaaaactgaatgctgaaaagctactagactggaaaacaaacactgcattatgtatgttaagtgactaatttaatttcaattaaaaagcgtaaagtgaaaatgaataa

SEQ ID NO: 146900 - DNA, 4111 bp, Homo sapiens
  Payload ID: 9056
  Gene Symbol: KIFAP3
  Gene Name: kinesin-associated protein 3
  Uniprot ID: Q92845
  ENST ID: ENST00000367765
  CDS Start-End: 1503-3761
attctttttctagtctctgttgctgctttttattatttccttctgctagcttggggttttgtttgctcttctttttctagccccttaaggtgtaaaattaggttattaattcaaaatcttttatttatttttttaaatagagcgtcagtatagagtgtcttattgtggatctgtttgagtttatctttgaatttcattgagcttcttggatgtgtaagtttgtctttggtctaatttgggaagtttttgactgttttttctcccagtattctctatgtttctttcttcctctcctttcataccctcattatgcatatgttggtatactagatggtgttccataagtctcttaggttctgtttatttttcttcattctgttttctttctgtgcctcaaaatggacagtttcatttgacatatcttcaagtttgctgattcttttctctctctgctcagatctgctgttaaaaaccctgtagtgatttttttatttcagttattgtacttttcagatctagtgtttttgtttggatccttatgataatatatttttaaactatttatgtgttgagacattgtgtttctcctttttcttagttatttgcactggtttctttttgctctttggacatatttaagacagttgatttaaagtctttgataagtccagtgtttgtgctgtagcatggacagtttctgttaattttttttattgtgagaatgagaatgagtttcttgtttctttgcatgtttcatattttgttttgttgaaaactgggtattttgaatattatggtatccaaaggaaaaaaagaaaagaaaaaaatactcttcagatctttgtaggttgactcagtgtttggatatggcttcaacacttagccaggcaatttacaattttaccttagccttcatttgctgcttgcacagagcctgaagaccagccagaggtaaaagcttatgatcttcccaggttttttctgggtatgtattctgccctgagcatgctcatggatttctagatttctctttatatgcaatagcttttcaaagcatctattcccccaaaatgtctgactccctggactttcctcttgggctttcagcttgtgttttgtttgacccagctattactatttatcccaggggccagcagcttgtatgcttggctttcactgatttcagtgactgcatagctgcactatcctgataagagtttaaaattagtcaaaacaaaggaaagccccttgcagctgacctcaaaggaaacttcagtcagttgcaaaacaatcagacaaaattccttgggagcaaggtccacttgactcctctagaaccaagtattaacagtgggaacgtgggctgccatcttgaagactgccactgtgcttgagagtggggtggatgtctagggaaagttaaaggagggaatatagatgtacatccatcagaaaaagcactcattgttcactatgaagtggaagctaccattcttggagaaatgggggaccccatgttgggagaacgaaaagaatgtcaaaaaatcattcgacttaagagtctcaatgccaacacagatataacttccctggcaaggaaggtggttgaagaatgtaaactcattcatccttcaaaactaaatgaggtagaacagctgttgtactatctacagaaccgccgtgattcattgtcaggaaaagagaaaaaagaaaaatcaagcaagcctaaagatccacctccttttgaaggaatggagattgatgaagttgctaacattaatgacatggatgaatatattgagttattatatgaagatattcctgacaaagttcggggttctgctttgatcctgcagcttgctcgaaatcctgataacttggaagaactactattgaatgaaactgcccttggtgcattagcaagggtcctgagagaagactggaagcaaagtgtcgagttagctacaaacataatttacatctttttttgtttctccagcttttctcaatttcatggacttattactcactataaaattggagctctgtgtatgaatattattgatcatgagttaaaaagacatgagctttggcaagaagaactctcaaagaagaagaaagctgttgatgaagaccctgaaaaccaaaccttgagaaaggattatgaaaaaacctttaaaaagtaccaggggcttgtggtaaaacaggaacagctattacgagttgctctttatttgcttctgaatcttgctgaggatactcgtaccgaactgaaaatgaggaacaagaacatagttcacatgttggtgaaagcccttgatcgggacaattttgagctgctaattttagttgtgtcattcttgaagaaactcagcatttttatggagaataaaaatgatatggtggaaatggatattgttgaaaaactggtgaaaatgataccttgtgagcatgaagacctgctgaatatcaccctccgacttttactaaacctatcctttgacacaggactgaggaataagatggtacaagttggactgcttcccaagctcactgcactcctaggcaatgacaactacaaacaaatagcaatgtgtgttctttaccacataagcatggatgaccgctttaaatcaatgtttgcatacactgactgtataccacagttaatgaagatgctgtttgaatgttcagatgaacgaattgacttggaactcatttctttctgcattaatcttgctgctaacaaaagaaatgtacagcttatctgtgaaggaaatgggctgaagatgctcatgaagagggctctgaagtttaaggatccattgctgatgaaaatgattagaaacatttctcagcatgatggaccaactaaaaatctgtttattgattatgttggggaccttgcagcccagatctctaatgatgaagaagaggagtttgtgattgaatgtttgggaactcttgcaaacttgaccattccagacttagactgggaattggttcttaaagaatataagttggttccatacctcaaggataaactaaaaccaggtgctgcagaagatgatcttgttttagaagtggttataatgattggaactgtatccatggatgactcttgtgctgcattgctagccaaatctggcataatccctgcactcattgaattgctaaatgctcaacaagaagatgatgaatttgtgtgtcagataatttatgtcttctaccagatggttttccaccaagccacaagagacgtcataatcaaggaaacacaggctccagcatatctcatagacctaatgcatgataagaataatgaaatccgaaaggtctgtgataatacattagatattatagcggaatatgatgaagaatgggctaagaaaattcagagtgaaaagtttcgctggcataactctcagtggctggagatggtagagagtcgtcagatggatgagagtgagcagtacttgtatggtgatgatcgaattgagccatacattcatgaaggagatattctcgaaagacctgaccttttctacaactcagatggattaattgcctctgaaggagccataagtcccgatttcttcaatgattaccaccttcaaaatggagatgttgttgggcagcattcatttcctggcagccttggaatggatggctttggccaaccagttggcattcttggacgccctgccacagcatatggattccgccctgatgaaccttactactatggctatggatcttgataaagtatctgtttccatgtgtaatctcagcttagaagaaatctgtgtgggttgggttaattttggatctttgcctaataatgcatgttgatgttattgtgggtctgtgtttgtttttatttttatatgttgttagctgcagattaaccccagcccctctgtcttctgttaagtacagttgatactgacattgttcactcatcaaaccacatcttgatgctaagtaacatttcccatgagccacaaaactgaatgctgaaaagctactagactggaaaacaaacactgcattatgtatgttaagtgactaatttaatttcaattaaaaagcgtaaagtgaaaatgaataa

SEQ ID NO: 146901 - DNA, 2718 bp, Homo sapiens
  Payload ID: 9056
  Gene Symbol: KIFAP3
  Gene Name: kinesin-associated protein 3
  Uniprot ID: Q92845
  ENST ID: ENST00000367767
  CDS Start-End: 122-2368
ttgcaggcctcaggactgtcatcgcctctgggtgtgagggtactttggccaccgtccccggaaataaccgcgcctgcctctcaagataccccatcctctccacgccgctgccgctgccgccatgcaaggggaggacgccagatacctcaaaagcattcgacttaagagtctcaatgccaacacagatataacttccctggcaaggaaggtggttgaagaatgtaaactcattcatccttcaaaactaaatgaggtagaacagctgttgtactatctacagaaccgccgtgattcattgtcaggaaaagagaaaaaagaaaaatcaagcaagcctaaagatccacctccttttgaaggaatggagattgatgaagttgctaacattaatgacatggatgaatatattgagttattatatgaagatattcctgacaaagttcggggttctgctttgatcctgcagcttgctcgaaatcctgataacttggaagaactactattgaatgaaactgcccttggtgcattagcaagggtcctgagagaagactggaagcaaagtgtcgagttagctacaaacataatttacatctttttttgtttctccagcttttctcaatttcatggacttattactcactataaaattggagctctgtgtatgaatattattgatcatgagttaaaaagacatgagctttggcaagaagaactctcaaagaagaagaaagctgttgatgaagaccctgaaaaccaaaccttgagaaaggattatgaaaaaacctttaaaaagtaccaggggcttgtggtaaaacaggaacagctattacgagttgctctttatttgcttctgaatcttgctgaggatactcgtaccgaactgaaaatgaggaacaagaacatagttcacatgttggtgaaagcccttgatcgggacaattttgagctgctaattttagttgtgtcattcttgaagaaactcagcatttttatggagaataaaaatgatatggtggaaatggatattgttgaaaaactggtgaaaatgataccttgtgagcatgaagacctgctgaatatcaccctccgacttttactaaacctatcctttgacacaggactgaggaataagatggtacaagttggactgcttcccaagctcactgcactcctaggcaatgacaactacaaacaaatagcaatgtgtgttctttaccacataagcatggatgaccgctttaaatcaatgtttgcatacactgactgtataccacagttaatgaagatgctgtttgaatgttcagatgaacgaattgacttggaactcatttctttctgcattaatcttgctgctaacaaaagaaatgtacagcttatctgtgaaggaaatgggctgaagatgctcatgaagagggctctgaagtttaaggatccattgctgatgaaaatgattagaaacatttctcagcatgatggaccaactaaaaatctgtttattgattatgttggggaccttgcagcccagatctctaatgatgaagaagaggagtttgtgattgaatgtttgggaactcttgcaaacttgaccattccagacttagactgggaattggttcttaaagaatataagttggttccatacctcaaggataaactaaaaccaggtgctgcagaagatgatcttgttttagaagtggttataatgattggaactgtatccatggatgactcttgtgctgcattgctagccaaatctggcataatccctgcactcattgaattgctaaatgctcaacaagaagatgatgaatttgtgtgtcagataatttatgtcttctaccagatggttttccaccaagccacaagagacgtcataatcaaggaaacacaggctccagcatatctcatagacctaatgcatgataagaataatgaaatccgaaaggtctgtgataatacattagatattatagcggaatatgatgaagaatgggctaagaaaattcagagtgaaaagtttcgctggcataactctcagtggctggagatggtagagagtcgtcagatggatgagagtgagcagtacttgtatggtgatgatcgaattgagccatacattcatgaaggagatattctcgaaagacctgaccttttctacaactcagatggattaattgcctctgaaggagccataagtcccgatttcttcaatgattaccaccttcaaaatggagatgttgttgggcagcattcatttcctggcagccttggaatggatggctttggccaaccagttggcattcttggacgccctgccacagcatatggattccgccctgatgaaccttactactatggctatggatcttgataaagtatctgtttccatgtgtaatctcagcttagaagaaatctgtgtgggttgggttaattttggatctttgcctaataatgcatgttgatgttattgtgggtctgtgtttgtttttatttttatatgttgttagctgcagattaaccccagcccctctgtcttctgttaagtacagttgatactgacattgttcactcatcaaaccacatcttgatgctaagtaacatttcccatgagccacaaaactgaatgctgaaaagctactagactggaaaacaaacactgcattatgtatgttaagtgactaatttaatttcaattaaaaagcgtaaagtgaaaatgaataa

SEQ ID NO: 146902 - DNA, 3159 bp, Homo sapiens
  Payload ID: 9056
  Gene Symbol: KIFAP3
  Gene Name: kinesin-associated protein 3
  Uniprot ID: Q92845
  ENST ID: ENST00000538366
  CDS Start-End: 670-2814
caagaggtgcagagcaagcgcatgcgtcgtgacggcccggcttaggcgactctgggcgggtctgggccgctccagtgttttggggcacagaagctgtgggaggagctggaggcttcaccgtggtaaccacagcgccgctgctgccccgccttgcaggcctcaggactgtcatcgcctctgggtgtgagggtactttggccaccgtccccggaaataaccgcgcctgcctctcaagataccccatcctctccacgccgctgccgctgccgccatgcaaggggaggacgccagatacctcaaaaggaaagttaaaggagggaatatagatgtacatccatcagaaaaagcactcattgttcactatgaagtggaagctaccattcttggagaaatgggggaccccatgttgggagaacgaaaagaatgtcaaaaaatcattcgacttaagagtctcaatgccaacacagatataacttccctggcaaggaaggtggttgaagaatgtaaactcattcatccttcaaaactaaatgaggtagaacagctgttgtactatctacagaaccgccgtgattcattgtcaggaaaagattgggaagggtcagcaggacttctgaagagggaacacgacctttaaggaggccaacagatcaggagaaggcaaaagggatgtcgattgcccttggcaacacttaccggagaagtctttcagattcagaaactgtttctgtactccaagcaagcttatgtgaagagaaaaaagaaaaatcaagcaagcctaaagatccacctccttttgaaggaatggagattgatgaagttgctaacattaatgacatggatgaatatattgagttattatatgaagatattcctgacaaagttcggggttctgctttgatcctgcagcttgctcgaaatcctgataacttggaagaactactattgaatgaaactgcccttggtgcattagcaagggtcctgagagaagactggaagcaaagtgtcgagttagctacaaacataatttacatctttttttgtttctccagcttttctcaatttcatggacttattactcactataaaattggagctctgtgtatgaatattattgatcatgagttaaaaagacatgagctttggcaagaagaactctcaaagaagaagaaagctgttgatgaagaccctgaaaaccaaaccttgagaaaggattatgaaaaaacctttaaaaagtaccaggggcttgtggtaaaacaggaacagctattacgagttgctctttatttgcttctgaatcttgctgaggatactcgtaccgaactgaaaatgaggaacaagaacatagttcacatgttggtgaaagcccttgatcgggacaattttgagctgctaattttagttgtgtcattcttgaagaaactcagcatttttatggagaataaaaatgatatggtggaaatggatattgttgaaaaactggtgaaaatgataccttgtgagcatgaagacctgctgaatatcaccctccgacttttactaaacctatcctttgacacaggactgaggaataagatggtacaagttggactgcttcccaagctcactgcactcctaggcaatgacaactacaaacaaatagcaatgtgtgttctttaccacataagcatggatgaccgctttaaatcaatgtttgcatacactgactgtataccacagttaatgaagatgctgtttgaatgttcagatgaacgaattgacttggaactcatttctttctgcattaatcttgctgctaacaaaagaaatgtacagcttatctgtgaaggaaatgggctgaagatgctcatgaagagggctctgaagtttaaggatccattgctgatgaaaatgattagaaacatttctcagcatgatggaccaactaaaaatctgtttattgattatgttggggaccttgcagcccagatctctaatgatgaagaagaggagtttgtgattgaatgtttgggaactcttgcaaacttgaccattccagacttagactgggaattggttcttaaagaatataagttggttccatacctcaaggataaactaaaaccaggtgctgcagaagatgatcttgttttagaagtggttataatgattggaactgtatccatggatgactcttgtgctgcattgctagccaaatctggcataatccctgcactcattgaattgctaaatgctcaacaagaagatgatgaatttgtgtgtcagataatttatgtcttctaccagatggttttccaccaagccacaagagacgtcataatcaaggaaacacaggctccagcatatctcatagacctaatgcatgataagaataatgaaatccgaaaggtctgtgataatacattagatattatagcggaatatgatgaagaatgggctaagaaaattcagagtgaaaagtttcgctggcataactctcagtggctggagatggtagagagtcgtcagatggatgagagtgagcagtacttgtatggtgatgatcgaattgagccatacattcatgaaggagatattctcgaaagacctgaccttttctacaactcagatggattaattgcctctgaaggagccataagtcccgatttcttcaatgattaccaccttcaaaatggagatgttgttgggcagcattcatttcctggcagccttggaatggatggctttggccaaccagttggcattcttggacgccctgccacagcatatggattccgccctgatgaaccttactactatggctatggatcttgataaagtatctgtttccatgtgtaatctcagcttagaagaaatctgtgtgggttgggttaattttggatctttgcctaataatgcatgttgatgttattgtgggtctgtgtttgtttttatttttatatgttgttagctgcagattaaccccagcccctctgtcttctgttaagtacagttgatactgacattgttcactcatcaaaccacatcttgatgctaagtaacatttcccatgagccacaaaactgaatgctgaaaagctactagactggaaaacaaacactgcattatgtatgttaagtgactaatttaatttcaattaaaaagcgtaaagtgaaaatg

SEQ ID NO: 146903 - DNA, 6975 bp, Homo sapiens
  Payload ID: 9057
  Gene Symbol: KNTC1
  Gene Name: kinetochore associated 1
  Uniprot ID: P50748
  ENST ID: ENST00000333479
  CDS Start-End: 178-6807
caatttaagcctgtggcatggaacctaaagactagaggcggttgtgtgagtcaggaagaggggccagatatctgagtgttcctctttagtttcttcaattgcagataatatggtgtctaattttatgttgttcaggaaagacagtggttcctgactcaggaagacagtctcagaaacatgtggaatgatattgagctgctaacaaatgatgataccggaagtgggtacctgagtgtcggttcaagaaaagaacatggaactgctttatatcaagtagatttgctagtgaagatctcttctgaaaaggcctcattaaatccaaagatacaggcatgcagcttaagtgatgggtttattattgtagccgaccaatcagtgatattgcttgacagtatttgtagatcacttcaattgcatcttgtctttgatactgaagtggatgtagttggcctttgtcaagaaggaaagtttcttttggttggcgagagaagtggcaacctacatcttattcatgtaacatcaaaacaaacactactcactaatgcatttgttcagaaagctaacgatgaaaatcggcggacttaccagaatcttgtcattgagaaggatggttcaaatgaaggtacctattatatgctacttcttacatacagtggatttttttgtattacaaaccttcagcttttaaaaattcaacaagcaattgagaatgtagacttcagtacagcaaaaaagttacaaggacaaatcaagtccagttttatttctactgaaaattatcatactcttggttgtctcagtcttgtggctggagatttagcaagtgaagttcctgtgataattgggggaaccggtaattgtgcattctcaaaatgggaaccagattcttccaagaaaggaatgacagttaagaaccttattgatgcagagattattaaaggtgcaaagaagttccagctgatagacaatctactttttgttcttgatactgataacgtgctgagtttatgggatatttacactctaactcctgtatggaactggccctctcttcacgtagaagagtttcttcttactacagaagcagactctccttcatcagtcacgtggcaaggaattacaaatctcaaattaatagctctgacagcttcagctaataagaagatgaaaaacctcatggtttattcattacctacaatggaaatactatattctttggaagtatctagtgtttcttctctggtccaaacaggaattagcacagataccatataccttttagaaggagtttgcaaaaatgatccaaaattgtctgaagactcagtctctgtgttagtactcagatgtcttacggaagctttaccagaaaacagattgagtcggttacttcacaaacacagatttgctgaagctgagagttttgccattcagtttggactagatgttgagcttgtttacaaggtcaagtcaaatcatatattggagaaactggcattgagttctgtggatgccagtgaacagaccgaatggcaacaacttgtagacgacgctaaggaaaatctacataagatccaggatgatgaatttgtggtgaattactgcctgaaagctcagtggataacctatgaaaccactcaagagatgctgaattatgccaaaaccaggcttttgaagaaagaagataaaactgctctcatttattctgatggcttgaaagaggtgctaagagctcatgcaaaattgactactttttatggagcatttggaccagaaaaattcagtggcagttcttggattgaatttctaaataatgaagatgatcttaaagatatttttttacagctaaaagaaggaaaccttgtttgtgcacagtatctttggcttcgacatcgggcaaactttgaaagcagatttgatgtgaaaatgctggagagcttgctcaactcaatgtctgcatcagtctctttgcaaaagctgtgtccatggtttaaaaatgatgtgattccatttgtaagaaggactgtgcctgaaggacagataattcttgcaaaatggttggaacaagcagccaggaaccttgaattaactgataaggcaaattggccagaaaatggacttcaattggcagagatattttttacagcagaaaaaacagacgagttgggattggcatcttcctggcattggatttccttgaaagattatcagaacacagaggaagtatgtcagctaaggactttggtaaataacttgcgagagttgatcacgttgcataggaagtacaactgcaaattagccctctctgattttgagaaggaaaatacaaccaccatagtgttccgaatgtttgataaagtgctggccccagagcttattccctccatcttagagaagtttataagagtttacatgagagaacatgacttgcaagaggaggaacttctcttgctgtacatagaggatttactgaatagatgcagctcaaagtccacatcactctttgaaacagcatgggaagcaaaggccatggcagtaatagcgtgtttatctgacacggacctcatatttgatgccgtgctcaagatcatgtatgcggcagtggttccttggagtgcagctgtggagcaactggtgaaacagcacctggaaatggaccatcccaaagtcaagttattacaggaaagttacaaactaatggagatgaaaaaacttttacgaggctatggaataagagaggtaaatctcttaaacaaggaaataatgagagtggttagatacattctcaaacaagatgtcccatcttctttagaagatgctttaaaggtagcccaagcgtttatgttatctgatgatgagatctacagtctaagaattattgacctgattgatagagaacagggtgaagactgtctccttctgttgaagtctttgcctcctgctgaagctgagaaaactgcagaaagagtcatcatatgggcacgactggcattacaagaagagccagatcattctaaagagggcaaggcctggagaatgtctgtagcgaagacatccgtggacattcttaagatactatgtgacattcagaaagacaatctgcagaagaaggacgaatgtgaagaaatgttgaaactatttaaagaggttgctagcttacaggagaactttgaggtctttctttcatttgaagattatagcaatagttccctggtagcagatctccgtgagcagcacattaaagctcacgaagttgcacaggcgaaacacaaacctgggagcaccccagagcccatagctgctgaggtgaggagcccaagcatggaatcaaagctgcacagacaggcactggccctgcagatgtccaaacaagagctggaggcagagctgaccttgagagccttaaaagatgggaacatcaaaacagcactgaaaaaatgcagcgacttgtttaagtatcactgcaatgctgacactgggaaattgctatttctgacatgtcagaagctttgtcagatgttggctgataatgtcccagtgacagtgcctgtgggactgaatcttccttccatgatacatgatctagcaagccaagctgccaccatttgcagtccagattttttactagatgctttagaactatgtaaacatactttaatggctgtagagctttccagacaatgccaaatggatgactgtggaatcctcatgaaagcttcttttgggacacataaagatccatatgaagagtggtcttacagtgacttcttcagtgaagatggaattgttcttgagtcacagatggtgcttccagtgatttatgaactgatttcatctcttgtgcctctagctgaaagcaagagatatcccttggagtctaccagtttgccatactgctcccttaatgaaggagatggccttgttttacctgttataaattccatctctgccctgcttcagaatcttcaggaatctagccagtgggagctagccctaagatttgtggttggttcatttggtacctgtcttcagcactctgtgtcaaacttcatgaatgccactttgagtgaaaagttatttggagagactacattagttaaatcaaggcatgttgttatggaattgaaagaaaaagctgttatatttatcagggaaaatgctacaacactactgcacaaagtatttaattgtcgcttggtagatcttgacctggcgttgggttactgcactctcttacctcaaaaagatgtgtttgaaaatctctggaagctcatagataaagcatggcagaattacgacaaaatcttggcaatatctctggtgggctctgagctggcaagtctctatcaggaaatagaaatggggcttaagttccgtgaactcagtactgatgcccagtggggcattcgtcttggtaaacttggtatttcttttcaaccagttttcaggcaacattttctcaccaagaaagacctcattaaagctcttgtggagaatatagatatggacacaagcctcattttggaatattgcagcacatttcagttggactgcgatgcagttcttcagctcttcattgaaacgctgctccacaacacaaatgccggccaaggccagggagatgcaagcatggactctgcaaagcggcggcatcccaaactcctggccaaagcccttgagatggttcctttactgacgagcacaaaagatttggtcatcagtcttagtggaatactacataagttggatccttatgactatgaaatgattgaagttgtcttgaaagttatagaacgagctgatgaaaagataaccaatattaatattaatcaggcattgagtattctgaaacatttgaagtcatacagaagaatttctcctcccgtggatctagaatatcagtatatgttggaacatgtcataactttgccatcagctgcccaaactagactgccttttcacctgatattctttggcacagcacagaacttctggaaaattctctctacagaactcagtgaagaatctttcccaacattgctcttaatttcgaaattaatgaagttctctctggacactctgtacgtgtctacagcaaaacacgttttcgaaaaaaaactgaagccaaagctcctgaagttaacacaagctaaatcctcaacactgattaacaaggaaataactaagatcacgcagaccatcgaatcctgcttactctctatagtcaacccagagtgggctgtagctattgccatcagccttgcccaggatatccctgaaggttccttcaagatatctgctttgaaattctgcctttatttagctgagagatggctacagaatatcccatcgcaggacgaaaaacgtgaaaaagccgaggctttgttgaagaagcttcatatccagtaccggcgatcgggcacagaagctgtgctcatagcccacaagctgaacactgaggaatatttaagagtgatcggaaagccagcacatcttattgtcagtctctacgaacatcctagcatcaatcaaagaattcagaattcatctggcacagattatcctgatattcatgcagcagctaaagaaatagccgaagtcaatgaaattaatttggaaaaagtctgggacatgttgttggaaaaatggctatgcccttcaacaaaacctggtgaaaaaccatcagaattatttgaacttcaagaagatgaagccctacgaagagtgcagtatctcctcctgtctcgtccaattgattatagttcaagaatgctgtttgtatttgcaacatcaactacaaccacattaggtatgcatcagttaacttttgcccatagaactcgagctcttcagtgtctcttctatttggctgacaaggaaactatagaatctctctttaaaaaacccattgaagaagtgaaatcttatttgagatgtataacttttctggcatcatttgagactttgaatatccccatcacatatgaattattttgcagcagtcctaaagaaggaatgattaagggtctgtggaaaaaccacagccacgagtccatggcagtaagattggtgactgagctgtgtttagaatacaaaatctatgacctgcagctttggaatggactcttgcaaaagcttctgggcttcaatatgattccttatctaaggaaagttttaaaagccatctccagtatccattctttatggcaggttccctacttcagcaaagcgtggcagcgtgtgatacagataccactgctttcagcctcttgtcctttaagtcctgatcagctgtcagattgttctgagagtctcatcgctgtcctcgaatgtccagtctcaggtgatcttgacctgatcggagtcgccaggcagtatatccagttagaacttccggcttttgcattagcttgtctgatgctcatgccccactcagagaaaagacaccagcaaattaagaattttctgggttcctgtgaccctcaggttattttaaagcaattggaagagcatatgaacacgggccagctagcaggattttcacatcaaattagaagtctgattttgaataatatcatcaataagaaggagtttgggattttggcaaagaccaaatactttcaaatgttgaagatgcatgcgatgaataccaacaatatcactgagctagtgaactatttggcaaatgacttaagtttagatgaagcttcagtcttgataactgaatattcaaagcactgcgggaaacctgtgcctccagacactgctccctgtgaaattctgaagatgtttcttagtggattatcgtaaatcactgaacctttttttcaagaaggacaagaattttggagtctgctattaatggaccatatttattacagtttttaaattgtacaatctctgtattatagctatttgtctaacattaccccacatgtaataaataaaacaatatgagcataattgccccataaagaa

SEQ ID NO: 146904 - DNA, 1250 bp, Homo sapiens
  Payload ID: 9057
  Gene Symbol: KNTC1
  Gene Name: kinetochore associated 1
  ENST ID: ENST00000423927
  CDS Start-End: 939-1250
accacgcccggctaattttttgtattttagtagagacagggtttcactgtattggccaggatggtctcccatctcttgacctcgtgatccgcccacgtcggcctcccaaagtgctgggattacagacatgagctaccgcgcccagccttgagctttatttttgacattgtaaaagaacagacaagcaggcagggcgcaatcttgtctttgacaggatctcattctgtcacccaggctggagtgcagtggcattatcatggctcactgcagccttgacctctagggcctaagtgatcctcccagcttagcctcctgagtagctgggactacaggcatgcaccaccatgcccagctaattgttttgtatttttttgtagagacaaggtttccatgttggccaagctggtctcaaactcctgacctcaagtgatccacccgcctcagcctcccacagtgctgggattataggcatgagccaaaaccctgttttctttaccaaaaatataagacattttatttgccaacagttgacttatcagaaaggtaatcagtacagaaatgctatatgttttgaagcttaattcttctgcagtaatggaactggtgttctgttgacattaacaatcaaacttttcagatgaagaggcaatggttaggatgactaagaggagtttcggacccatgtacacctcaaatctcagaatgatggctgggttgggtagtgtgaggttggaggagctatagacaaatgtttctttttgaaaaaggatactaagaaggcaagtcatgatgttgcccttactctgatacatttcagtgtagagggtttttttgctttgtttttttctttttatttctagatttcttttcaaccagttttcaggcaacattttctcaccaagaaagacctcattaaagctcttgtggagaatatagatatggacacaagcctcattttggaatattgcagcacatttcagttggactgcgatgcagttcttcagctcttcattgaaacgctgctccacaacacaaatgccggccaaggccagggagatgcaagcatggactctgcaaagcggcggcatcccaaactcctggccaaagcccttgagatggttcctttactgacgagcacaaaagatttggtcatcagtcttagtggaatactacataagttggatccttatgactatgaaatgattgaagttgtcttgaaagttatagaacgagctgatgaaaagataacc

SEQ ID NO: 146905 - DNA, 3655 bp, Homo sapiens
  Payload ID: 9057
  Gene Symbol: KNTC1
  Gene Name: kinetochore associated 1
  ENST ID: ENST00000450485
  CDS Start-End: 147-3551
caatttaagcctgtggcatggaacctaaagactagaggcggttgtgtgagtcaggaagaggggccagatatctgagtgttcctctttagtttcttcaattgcaggaaagacagtggttcctgactcaggaagacagtctcagaaacatgtggaatgatattgagctgctaacaaatgatgataccggaagtgggtacctgagtgtcggttcaagaaaagaacatggaactgctttatatcaagtagatttgctagtgaagatctcttctgaaaaggcctcattaaatccaaagatacaggcatgcagcttaagtgatgggtttattattgtagccgaccaatcagtgatattgcttgacagtatttgtagatcacttcaattgcatcttgtctttgatactgaagtggatgtagttggcctttgtcaagaaggaaagtttcttttggttggcgagagaagtggcaacctacatcttattcatgtaacatcaaaacaaacactactcactaatgcatttgttcagaaagctaacgatgaaaatcggcggacttaccagaatcttgtcattgagaaggatggttcaaatgaaggtacctattatatgctacttcttacatacagtggatttttttgtattacaaaccttcagcttttaaaaattcaacaagcaattgagaatgtagacttcagtacagcaaaaaagggaaccggtaattgtgcattctcaaaatgggaaccagattcttccaagaaaggaatgacagttaagaaccttattgatgcagagattattaaaggtgcaaagaagttccagctgatagacaatctactttttgttcttgatactgataacgtgctgagtttatgggatatttacactctaactcctgtatggaactggccctctcttcacgtagaagagtttcttcttactacagaagcagactctccttcatcagtcacgtggcaaggaattacaaatctcaaattaatagctctgacagcttcagctaataagaagatgaaaaacctcatggtttattcattacctacaatggaaatactatattctttggaagtatctagtgtttcttctctggtccaaacaggaattagcacagataccatataccttttagaaggagtttgcaaaaatgatccaaaattgtctgaagactcagtctctgtgttagtactcagatgtcttacggaagctttaccagaaaacagattgagtcggttacttcacaaacacagatttgctgaagctgagagttttgccattcagtttggactagatgttgagcttgtttacaaggtcaagtcaaatcatatattggagaaactggcattgagttctgtggatgccagtgaacagaccgaatggcaacaacttgtagacgacgctaaggaaaatctacataagatccaggatgatgaatttgtggtgaattactgcctgaaagctcagtggataacctatgaaaccactcaagagatgctgaattatgccaaaaccaggcttttgaagaaagaagataaaactgctctcatttattctgatggcttgaaagaggtgctaagagctcatgcaaaattgactactttttatggagcatttggaccagaaaaattcagtggcagttcttggattgaatttctaaataatgaagatgatcttaaagatatttttttacagctaaaagaaggaaaccttgtttgtgcacagtatctttggcttcgacatcgggcaaactttgaaagcagatttgatgtgaaaatgctggagagcttgctcaactcaatgtctgcatcagtctctttgcaaaagctgtgtccatggtttaaaaatgatgtgattccatttgtaagaaggactgtgcctgaaggacagataattcttgcaaaatggttggaacaagcagccaggaaccttgaattaactgataaggcaaattggccagaaaatggacttcaattggcagagatattttttacagcagaaaaaacagacgagttgggattggcatcttcctggcattggatttccttgaaagattatcagaacacagaggaagtatgtcagctaaggactttggtaaataacttgcgagagttgatcacgttgcataggaagtacaactgcaaattagccctctctgattttgagaaggaaaatacaaccaccatagtgttccgaatgtttgataaagtgctggccccagagcttattccctccatcttagagaagtttataagagtttacatgagagaacatgacttgcaagaggaggaacttctcttgctgtacatagaggatttactgaatagatgcagctcaaagtccacatcactctttgaaacagcatgggaagcaaaggccatggcagtaatagcgtgtttatctgacacggacaaaccatcagaattatttgaacttcaagaagatgaagccctacgaagagtgcagtatctcctcctgtctcgtccaattgattatagttcaagaatgctgtttgtatttgcaacatcaactacaaccacattaggtatgcatcagttaacttttgcccatagaactcgagctcttcagtgtctcttctatttggctgacaaggaaactatagaatctctctttaaaaaacccattgaagaagtgaaatcttatttgagatgtataacttttctggcatcatttgagactttgaatatccccatcacatatgaattattttgcagcagtcctaaagaaggaatgattaagggtctgtggaaaaaccacagccacgagtccatggcagtaagattggtgactgagctgtgtttagaatacaaaatctatgacctgcagctttggaatggactcttgcaaaagcttctgggcttcaatatgattccttatctaaggaaagttttaaaagccatctccagtatccattctttatggcaggttccctacttcagcaaagcgtggcagcgtgtgatacagataccactgctttcagcctcttgtcctttaagtcctgatcagctgtcagattgttctgagagtctcatcgctgtcctcgaatgtccagtctcaggtgatcttgacctgatcggagtcgccaggcagtatatccagttagaacttccggcttttgcattagcttgtctgatgctcatgccccactcagagaaaagacaccagcaaattaagaattttctgggttcctgtgaccctcaggttattttaaagcaattggaagagcatatgaacacgggccagctagcaggattttcacatcaaattagaagtctgattttgaataatatcatcaataagaaggagtttgggattttggcaaagaccaaatactttcaaatgttgaagatgcatgcgatgaataccaacaatatcactgagctagtgaactatttggcaaatgacttaagtttagatgaagcttcagtcttgataactgaatattcaaagcactgcgggaaacctgtgcctccagacactgctccctgtgaaattctgaagatgtttcttagtggattatcgtaaatcactgaacctttttttcaagaaggacaagaattttggagtctgctattaatggaccatatttattacagtttttaaattgtacaatctctgtattatagcta

SEQ ID NO: 146906 - DNA, 2412 bp, Homo sapiens
  Payload ID: 9057
  Gene Symbol: KNTC1
  Gene Name: kinetochore associated 1
  ENST ID: ENST00000436959
  CDS Start-End: 1852-2244
tatagtttagatgaataatgttaaagagaatactagaaaaggttttgatcctctttctgaaaacaagatggtctcaggaatggaaacttttgatggtatactattagatgattttatgacagtttaggattgggttactcttactggacaaaagttttttattttaatataggcattgagtattctgaaacatttgaagtcatacagaagaatttctcctcccgtggatctagaatatcagtatatgttggaacatgtcataactttgccatcagctgcccaaactagactgccttttcacctgatattctttggcacagcacagaacttctggaaaattctctctacagaactcagtgaagaatctttcccaacattgctcttaatttcgaaattaatgaagttctctctggacactctgtacgtgtctacagcaaaacacgttttcgaaaaaaaactgaagccaaagctcctgaagttaacacaagctaaatcctcaacactgattaacaaggaaataactaagatcacgcagaccatcgaatcctgcttactctctatagtcaacccagagtgggctgtagctattgccatcagccttgcccaggatatccctgaaggttccttcaagatatctgctttgaaattctgcctttatttagctgagagatggctacagaatatcccatcgcaggacgaaaaacgtgaaaaagccgaggctttgttgaagaagcttcatatccagtaccggcgatcgggcacagaagctgtgctcatagcccacaagctgaacactgaggaatatttaagagtgatcggaaagccagcacatcttattgtcagtctctacgaacatcctagcatcaatcaaagaattcagaattcatctggcacagattatcctgatattcatgcagcagctaaagaaatagccgaagtcaatgaaattaatttggaaaaagtctgggacatgttgttggaaaaatggctatgcccttcaacaaaacctggtgaaaaaccatcagaattatttgaacttcaagaagatgaagccctacgaagagtgcagtatctcctcctgtctcgtccaattgattatagttcaagaatgctgtttgtatttgcaacatcaactacaaccacattaggtatgcatcagttaacttttgcccatagaactcgagctcttcagtgtctcttctatttggctgacaaggaaactatagaatctctctttaaaaaacccattgaagaagtgaaatcttatttgagatgtataacttttctggcatcatttgagactttgaatatccccatcacatatgaattattttgcagcagtcctaaagaaggaatgattaagggtctgtggaaaaaccacagccacgagtccatggcagtaagattggtgactgagctgtgtttagaatacaaaatctatgacctgcagctttggaatggactcttgcaaaagcttctgggcttcaatatgattccttatctaaggaaagttttaaaagccatctccagtatccattctttatggcagagatggaggtcttgctatgttgcctaggctggtcttagaactcctgagctgaaacaatcctcctgccttggcctcccaaagtactgggattacaggttccctacttcagcaaagcgtggcagcgtgtgatacagataccactgctttcagcctcttgtcctttaagtcctgatcagctgtcagattgttctgagagtctcatcgctgtcctcgaatgtccagtctcaggtgatcttgacctgatcggagtcgccaggcagtatatccagttagaacttccggcttttgcattagcttgtctgatgctcatgccccactcagagaaaagacaccagcaaattaagaattttctgggttcctgtgaccctcaggttattttaaagcaattggaagagcatatgaacacgggccagctagcaggattttcacatcaaattagaagtctgattttgaataatatcatcaataagaaggagtttgggattttggcaaagaccaaatactttcaaatgttgaagatgcatgcgatgaataccaacaatatcactgagctagtgaactatttggcaaatgacttaagtttagatgaagcttcagtcttgataactgaatattcaaagcactgcgggaaacctgtgcctccagacactgctccctgtgaaattctgaagatgtttcttagtggattatcgtaaatcactgaacctttttttcaagaaggacaagaattttggagtctgctattaatggaccatatttattacagtttttaaattgtacaatctctgtattatagctatttgtctaacattaccccacatgtaataaataaaacaatatgagcataattgccccataaagaa

SEQ ID NO: 146907 - DNA, 1065 bp, Homo sapiens
  Payload ID: 9057
  Gene Symbol: KNTC1
  Gene Name: kinetochore associated 1
  ENST ID: ENST00000534995
  CDS Start-End: 526-918
gcctgtaatcccagctactcaggaagctgaggagggagaatcacttgaacccgggaggtgttggttgcagtgagctaagatcatgccatcgtactccagcctgggtgacagagctagactgtttctcaaaaaaaaaaaaaaaaaaggttttgagtcttctgagaatttagaagcctatctttaggcatctgtaggctttcagacataatcatgatagcaaacagtagtccgtgttcccatgggtaaattcttttattctgtgtagagtgctgtcaaagacttgtgttactcattcctaagcatatgtcatgcaccagcactttagtgtttaaaattattgaaaacttggacaggcagatgactatggaaagctagaaaggccaatataatctagtgaatctgccagattattaactaattaatgttctctctcgaagatgtccagtctcaggtgatcttgacctgatcggagtcgccaggcagtatatccagttagaacttccggcttttgcattagcttgtctgatgctcatgccccactcagagaaaagacaccagcaaattaagaattttctgggttcctgtgaccctcaggttattttaaagcaattggaagagcatatgaacacgggccagctagcaggattttcacatcaaattagaagtctgattttgaataatatcatcaataagaaggagtttgggattttggcaaagaccaaatactttcaaatgttgaagatgcatgcgatgaataccaacaatatcactgagctagtgaactatttggcaaatgacttaagtttagatgaagcttcagtcttgataactgaatattcaaagcactgcgggaaacctgtgcctccagacactgctccctgtgaaattctgaagatgtttcttagtggattatcgtaaatcactgaacctttttttcaagaaggacaagaattttggagtctgctattaatggaccatatttattacagtttttaaattgtacaatctctgtattatagctatttgtctaacattaccccacatgtaataaataaaacaatatga

SEQ ID NO: 146908 - DNA, 624 bp, Homo sapiens
  Payload ID: 9057
  Gene Symbol: KNTC1
  Gene Name: kinetochore associated 1
  ENST ID: ENST00000546125
  CDS Start-End: 1-624
aaagtctgggacatgttgttggaaaaatggctatgcccttcaacaaaacctggtgaaaaaccatcagaattatttgaacttcaagaagatgaagccctacgaagagtgcagtatctcctcctgtctcgtccaattgattatagttcaagaatgctgtttgtatttgcaacatcaactacaaccacattaggtatgcatcagttaacttttgcccatagaactcgagctcttcagtgtctcttctatttggctgacaaggaaactatagaatctctctttaaaaaacccattgaagaagtgaacagtcctaaagaaggaatgattaagggtctgtggaaaaaccacagccacgagtccatggcagtaagattggtgactgagctgtgtttagaatacaaaatctatgacctgcagctttggaatggactcttgcaaaagcttctgggcttcaatatgattccttatctaaggaaagttttaaaagccatctccagtatccattctttatggcaggttccctacttcagcaaagcgtggcagcgtgtgatacagataccactgctttcagcctcttgtcctttaagtcctgatcagctgtcagattgttctgagagtctcatcgct

SEQ ID NO: 146909 - DNA, 1714 bp, Homo sapiens
  Payload ID: 9058
  Gene Symbol: KNSTRN
  Gene Name: kinetochore-localized astrin/SPAG5 binding protein
  Uniprot ID: Q9Y448
  ENST ID: ENST00000249776
  CDS Start-End: 116-1066
attagctccattcaagcctacaaattgcatcaccctcctcctctgcccagacctgggggctccaacacctttcgctaggtctggctctggcctctgagcgaaccttccgtacagtatggcggctcccgaagccccgcccctggacagagttttccgtacaacatggctgtctacagagtgcgattcccacccacttccgcctagctaccggaagtttctatttgaaacccaggcggccgacttagccggtggcacgacagttgctgcagggaatcttttaaacgagagcgagaaggactgcgggcaggaccggcgggctcctggggttcagccgtgccgcctcgttacgatgaccagtgtggttaagacagtgtatagcctgcagcccccctctgcgctgagcggcggccagccggcagacacacaaactcgggccacttctaagagtctcttacctgttaggtccaaagaagtcgatgtttccaaacagcttcattcaggaggtccagagaatgatgttacaaaaatcaccaaactgagacgagagaatgggcaaatgaaagctactgacactgccaccagaaggaatgtcagaaaaggctacaaaccactgagtaagcaaaaatcagaggaagagctcaaggacaagaaccagctgttagaagccgtcaacaagcagttgcaccagaagttgactgaaactcagggagagctgaaggacctgacccagaaggtagagctgctggagaagtttcgggacaactgtttggcaattttggagagcaagggccttgatccagctttaggcagtgagaccctggcatcacgacaagaatccactactgatcacatggactctatgttgctgttagaaactttgcaagaggagctgaagctttttaacgaaacagccaaaaagcagatggaggagttacaggccttaaaggtaaagctggagatgaaagaggaaagagtccgattcctagaacagcaaaccttatgtaacaatcaagtaaatgatttaacaacagcccttaaggaaatggagcagctattagaaatgtaagaagaagcaagtggccagatggctccctcttgggcataaaatctcagaggaagctacttaggacatcatcttggccatgatcttctgggactcaccatctccagaatgaaaacaatttctacagtagacttaaggacagtttatgctgaaatggcaattcctcatttaagcaagttttcccaaccttcaggttggtcagccctcctgagcctcacaggtggataattgaggcctacaagagaggggagcctaggagcttggattgaccttctagtcaaccacctgacttcagcacaccattacaatcgggagactaaaccaacaaccagaggatctaaaatgtcacattcagattttcaggaagaaaatcttcattacagtggagcacaaatgttccatacaagacatcattgaggagccatgctgtccccttctaacctgaaacacattctttcccatcctggttgggcttctgtacctccttattaatttatgaacctgaagttgcttgaagtgttttgggcttaataaatggggtgaaagtataggtagcagtaacacctacatgaaacaatacaccttggatcttttaatctaaattacttttcttttttaagtctacttttaaaataaatacttctgtaaata

SEQ ID NO: 146910 - DNA, 1899 bp, Homo sapiens
  Payload ID: 9058
  Gene Symbol: KNSTRN
  Gene Name: kinetochore-localized astrin/SPAG5 binding protein
  Uniprot ID: Q9Y448
  ENST ID: ENST00000416151
  CDS Start-End: 116-976
attagctccattcaagcctacaaattgcatcaccctcctcctctgcccagacctgggggctccaacacctttcgctaggtctggctctggcctctgagcgaaccttccgtacagtatggcggctcccgaagccccgcccctggacagagttttccgtacaacatggctgtctacagagtgcgattcccacccacttccgcctagctaccggaagtttctatttgaaacccaggcggccgacttagccggtggcacgacagttgctgcagggaatcttttaaacgagagcgagaaggactgcgggcaggaccggcgggctcctggggttcagccgtgccgcctcgttacgatgaccagtgtggttaagacagtgtatagcctgcagcccccctctgcgctgagcggcggccagccggcagacacacaaactcgggccacttctaagagtctcttacctgttaggtccaaagaagtcgatgtttccaaacagcttcattcaggaggtccagagaatgatgttacaaaaatcaccaaactgagacgagagaatgggcaaatgaaagctactgacactgccaccagaaggaatgtcagaaaaggctacaaaccactgagtaagcaaaaatcagaggaagagctcaaggacaagaaccagctgttagaagccgtcaacaagcagttgcaccagaagttgactgaaactcagggagagctgaaggacctgacccagaaggtagagctgctggagaagtttcgggacaactgtttggcaattttggagagcaagggccttgatccagctttaggcagtgagaccctggcatcacgacaagaatccactactgatcacatggactctatgttgctgttagaaactttgcaagaggagctgaagctttttaacgaaacagccaaaaagcagatggaggagttacagattgcttggatgaatcatgggatattgcaccaaatgtagaggatttcatcgttccagtttagatacaggagtctagtccctctctactactagagggacaattcctaaaaccagtgcatagaaataaaatctaaaatagaagatacagtctgttgatactccagtggtcttccttagtggaataggagcataatgttctgatgtgggaattgtgtttcctgttagtcaagagttttgtgtatgtgttgttttcttttggaatgtctttccatgcaggccttaaaggtaaagctggagatgaaagaggaaagagtccgattcctagaacagcaaaccttatgtaacaatcaagtaaatgatttaacaacagcccttaaggaaatggagcagctattagaaatgtaagaagaagcaagtggccagatggctccctcttgggcataaaatctcagaggaagctacttaggacatcatcttggccatgatcttctgggactcaccatctccagaatgaaaacaatttctacagtagacttaaggacagtttatgctgaaatggcaattcctcatttaagcaagttttcccaaccttcaggttggtcagccctcctgagcctcacaggtggataattgaggcctacaagagaggggagcctaggagcttggattgaccttctagtcaaccacctgacttcagcacaccattacaatcgggagactaaaccaacaaccagaggatctaaaatgtcacattcagattttcaggaagaaaatcttcattacagtggagcacaaatgttccatacaagacatcattgaggagccatgctgtccccttctaacctgaaacacattctttcccatcctggttgggcttctgtacctccttattaatttatgaacctgaagttgcttgaagtgttttgggcttaataaatggggtgaaagtataggtagcagta

SEQ ID NO: 146911 - DNA, 1464 bp, Homo sapiens
  Payload ID: 9058
  Gene Symbol: KNSTRN
  Gene Name: kinetochore-localized astrin/SPAG5 binding protein
  Uniprot ID: Q9Y448
  ENST ID: ENST00000448395
  CDS Start-End: 1-726
atggcggctcccgaagccccgcccctggacagagttttccgtacaacatggctgtctacagagtgcgattcccacccacttccgcctagctaccggaagtttctatttgaaacccaggcggccgacttagccggtggcacgacagttgctgcagggaatcttttaaacgagagcgagaaggactgcgggcaggaccggcgggctcctggggttcagccgtgccgcctcgttacgatgaccagtgtggttaagacagtgtatagcctgcagcccccctctgcgctgagcggcggccagccggcagacacacaaactcgggccacttctaagagtctcttacctgttaggtccaaagaagtcgatgtttccaaacagcttcattcaggaggtccagagaatgatgttacaaaaatcaccaaactgagacgagagaatgggcaaatgaaagctactgacactgccaccagaaggaatgtcagaaaaggctacaaaccactgagtaagcaaaaatcagaggaagagctcaaggacaagaaccagctgttagaagccgtcaacaagcagttgcaccagaagttgactgaaactcagggagagctgaaggacctgacccagaaggtagagctgctggagaagtttcgggacaactgtttggcaattttggagagcaagggccttgatccagttgctgttagaaactttgcaagaggagctgaagctttttaacgaaacagccaaaaagcagatggaggagttacaggccttaaaggtaaagctggagatgaaagaggaaagagtccgattcctagaacagcaaaccttatgtaacaatcaagtaaatgatttaacaacagcccttaaggaaatggagcagctattagaaatgtaagaagaagcaagtggccagatggctccctcttgggcataaaatctcagaggaagctacttaggacatcatcttggccatgatcttctgggactcaccatctccagaatgaaaacaatttctacagtagacttaaggacagtttatgctgaaatggcaattcctcatttaagcaagttttcccaaccttcaggttggtcagccctcctgagcctcacaggtggataattgaggcctacaagagaggggagcctaggagcttggattgaccttctagtcaaccacctgacttcagcacaccattacaatcgggagactaaaccaacaaccagaggatctaaaatgtcacattcagattttcaggaagaaaatcttcattacagtggagcacaaatgttccatacaagacatcattgaggagccatgctgtccccttctaacctgaaacacattctttcccatcctggttgggcttctgtacctccttattaatttatgaacctgaagttgcttgaagtgttttgggcttaataaatggggtgaaagtataggtagcagtaacacctacatgaaacaat

SEQ ID NO: 146912 - DNA, 664 bp, Homo sapiens
  Payload ID: 9058
  Gene Symbol: KNSTRN
  Gene Name: kinetochore-localized astrin/SPAG5 binding protein
  ENST ID: ENST00000559304
  CDS Start-End: 1-195
gttgctgcagggaatcttttaaacgagagcgagaaggactgcgggcaggaccggcgggctcctggggttcagccgtgccgcctcgttacgatgaccagtgtggttaagacagtgtatagcctgcagcccccctctgcgctgagcggcggccagccggcagtacaactattattacagctacaaaccactgagtaagcaaaaatcagaggaagagctcaaggacaagaaccagctgttagaagccgtcaacaagcagttgcaccagaagttgactgaaactcagggagagctgaaggacctgacccagaaggtagagctgctggagaagtttcgggacaactgtttggcaattttggagagcaagggccttgatccagctttaggcagtgagaccctggcatcacgacaagaatccactactgatcacatggactctatgttgctgttagaaactttgcaagaggagctgaagctttttaacgaaacagccaaaaagcagatggaggagttacaggccttaaaggtaaagctggagatgaaagaggaaagagtccgattcctagaacagcaaaccttatgtaacaatcaagtaaatgatttaacaacagcccttaaggaaatggagcagctattagaaatgtaagaagaagcaagtggccagatg

SEQ ID NO: 146913 - DNA, 1388 bp, Homo sapiens
  Payload ID: 9058
  Gene Symbol: KNSTRN
  Gene Name: kinetochore-localized astrin/SPAG5 binding protein
  ENST ID: ENST00000561169
  CDS Start-End: 1-373
agttgctgcagggaatcttttaaacgagagcgagaaggactgcgggcaggaccggcgggctcctggggttcagccgtgccgcctcgttacgatgaccagtgtggttaagacagtgtatagcctgcagcccccctctgcgctgagcggcggccagccggcagacacacaaactcgggccacttctaagagtctcttacctgttaggtccaaagaagtcgatgtttccaaacagcttcattcaggaggtccagagaatgatgttacaaaaatcaccaaactgagacgagagaatgggcaaatgaaagctactgacactgccaccagaaggaatgtcagaaaaggtacaactattattacagctacaaaccactgagtaagcaaaaatcagaggaagagctcaaggacaagaaccagctgttagaagccgtcaacaagcagttgcaccagaagttgactgaaactcagggagagctgaaggacctgacccagaaggtagagctgctggagaagtttcgggacaactgtttggcaattttggagagcaagggccttgatccagctttaggcagtgagaccctggcatcacgacaagaatccactactgatcacatggactctatgttgctgttagaaactttgcaagaggagctgaagctttttaacgaaacagccaaaaagcagatggaggagttacaggccttaaaggtaaagctggagatgaaagaggaaagagtccgattcctagaacagcaaaccttatgtaacaatcaagtaaatgatttaacaacagcccttaaggaaatggagcagctattagaaatgtaagaagaagcaagtggccagatggctccctcttgggcataaaatctcagaggaagctacttaggacatcatcttggccatgatcttctgggactcaccatctccagaatgaaaacaatttctacagtagacttaaggacagtttatgctgaaatggcaattcctcatttaagcaagttttcccaaccttcaggttggtcagccctcctgagcctcacaggtggataattgaggcctacaagagaggggagcctaggagcttggattgaccttctagtcaaccacctgacttcagcacaccattacaatcgggagactaaaccaacaaccagaggatctaaaatgtcacattcagattttcaggaagaaaatcttcattacagtggagcacaaatgttccatacaagacatcattgaggagccatgctgtccccttctaacctgaaacacattctttcccatcctggttgggcttctgtacctccttattaatttatgaacctgaagttgcttgaagtgttttgggcttaataaatggggtgaaagtataggtagcagtaacacct

SEQ ID NO: 146914 - DNA, 940 bp, Homo sapiens
  Payload ID: 9058
  Gene Symbol: KNSTRN
  Gene Name: kinetochore-localized astrin/SPAG5 binding protein
  ENST ID: ENST00000560321
  CDS Start-End: 1-386
tatttgaaacccaggcggccgacttagccggtggcacgacagttgctgcagggaatcttttaaacgagagcgagaaggactgcgggcaggaccggcgggctcctggggttcagccgtgccgcctcgttacgatgaccagtgtggttaagacagtgtatagcctgcagcccccctctgcgctgagcggcggccagccggcagacacacaaactcgggccacttctaagagtctcttacctgttaggtccaaagaagtcgatgtttccaaacagcttcattcaggaggtccagagaatgatgttacaaaaatcaccaaactgagacgagagaatgggcaaatgaaagctactgacactgccaccagaaggaatgtcagaaaagggtgagcatcaggctacaaaccactgagtaagcaaaaatcagaggaagagctcaaggacaagaaccagctgttagaagccgtcaacaagcagttgcaccagaagttgactgaaactcagggagagctgaaggacctgacccagaaggtagagctgctggagaagtttcgggacaactgtttggcaattttggagagcaagggccttgatccagctttaggcagtgagaccctggcatcacgacaagaatccactactgatcacatggactctatgttgctgttagaaactttgcaagaggagctgaagctttttaacgaaacagccaaaaagcagatggaggagttacaggccttaaaggtaaagctggagatgaaagaggaaagagtccgattcctagaacagcaaaccttatgtaacaatcaagtaaatgatttaacaacagcccttaaggaaatggagcagctattagaaatgtaagaagaagcaagtggccagatggctccctcttgggcataaaatctcagaggaagctacttaggacatcatcttggccatga

SEQ ID NO: 146915 - DNA, 1598 bp, Homo sapiens
  Payload ID: 9058
  Gene Symbol: KNSTRN
  Gene Name: kinetochore-localized astrin/SPAG5 binding protein
  ENST ID: ENST00000560981
  CDS Start-End: 116-496
attagctccattcaagcctacaaattgcatcaccctcctcctctgcccagacctgggggctccaacacctttcgctaggtctggctctggcctctgagcgaaccttccgtacagtatggcggctcccgaagccccgcccctggacagagttttccgtacaacatggctgtctacagagtgcgattcccacccacttccgcctagctaccggaagtttctatttgaaacccaggcggccgacttagccggtggcacgacagttgctgcagggaatcttttaaacgagagcgagaaggactgcgggcaggaccggcgggctcctggggttcagccgtgccgcctcgttacgatgaccagtgtggttaagacagtgtatagcctgcagcccccctctgcgctgagcggcggccagccggcaggtccaaagaagtcgatgtttccaaacagcttcattcaggaggtccagagaatgatgttacaaaaatcaccaaactgagacgagagaatgggcaaatgaaagctactgacactgccaccagaaggaatgtcagaaaaggctacaaaccactgagtaagcaaaaatcagaggaagagctcaaggacaagaaccagctgttagaagccgtcaacaagcagttgcaccagaagttgactgaaactcagggagagctgaaggacctgacccagaaggtagagctgctggagaagtttcgggacaactgtttggcaattttggagagcaagggccttgatccagctttaggcagtgagaccctggcatcacgacaagaatccactactgatcacatggactctatgttgctgttagaaactttgcaagaggagctgaagctttttaacgaaacagccaaaaagcagatggaggagttacaggccttaaaggtaaagctggagatgaaagaggaaagagtccgattcctagaacagcaaaccttatgtaacaatcaagtaaatgatttaacaacagcccttaaggaaatggagcagctattagaaatgtaagaagaagcaagtggccagatggctccctcttgggcataaaatctcagaggaagctacttaggacatcatcttggccatgatcttctgggactcaccatctccagaatgaaaacaatttctacagtagacttaaggacagtttatgctgaaatggcaattcctcatttaagcaagttttcccaaccttcaggttggtcagccctcctgagcctcacaggtggataattgaggcctacaagagaggggagcctaggagcttggattgaccttctagtcaaccacctgacttcagcacaccattacaatcgggagactaaaccaacaaccagaggatctaaaatgtcacattcagattttcaggaagaaaatcttcattacagtggagcacaaatgttccatacaagacatcattgaggagccatgctgtccccttctaacctgaaacacattctttcccatcctggttgggcttctgtacctccttattaatttatgaacctgaagttgcttgaagtgttttgggcttaataaatggggtgaaagtataggtagcagtaacacctacatgaaacaat

SEQ ID NO: 146916 - DNA, 651 bp, Homo sapiens
  Payload ID: 9058
  Gene Symbol: KNSTRN
  Gene Name: kinetochore-localized astrin/SPAG5 binding protein
  ENST ID: ENST00000557920
  CDS Start-End: 1-651
ttttaaacgagagcgagaaggactgcgggcaggaccggcgggctcctggggttcagccgtgccgcctcgttacgatgaccagtgtggttaagacagtgtatagcctgcagcccccctctgcgctgagcggcggccagccggcagacacacaaactcgggccacttctaagagtctcttacctgttaggtccaaagaagtcgatgtttccaaacagcttcattcaggaggtccagagaatgatgttacaaaaatcaccaaactgagacgagagaatgggcaaatgaaagctactgacactgccaccagaaggaatgtcagaaaaggacggagttttgctcttgttgccacccaggctggagtgcaatggcgcaatctcagctcaccacaacctccgcctcctgggttcaagcgattatcctgcctcagcctcccaaatacctgggattacagctacaaaccactgagtaagcaaaaatcagaggaagagctcaaggacaagaaccagctgttagaagccgtcaacaagcagttgcaccagaagttgactgaaactcagggagagctgaaggacctgacccagaaggtagagctgctggagaagtttcgggacaactgtttggcaattttggagagcaagggccttgatccag

SEQ ID NO: 146917 - DNA, 405 bp, Homo sapiens
  Payload ID: 9058
  Gene Symbol: KNSTRN
  Gene Name: kinetochore-localized astrin/SPAG5 binding protein
  ENST ID: ENST00000559083
  CDS Start-End: 1-82
gaccagtgtggttaagacagtgtatagcctgcagcccccctctgcgctgagcggcggccagccggcagctacaaaccactgagtaagcaaaaatcagaggaagagctcaaggacaagaaccagctgttagaagccgtcaacaagcagttgcaccagaagttgactgaaactcagggagagctgaaggacctgacccagaaggtagagctgctggagaagtttcgggacaactgtttggcaattttggagagcaagggccttgatccagctttaggcagtgagaccctggcatcacgacaagaatccactactgatcacatggactctatgttgctgttagaaactttgcaagaggagctgaagctttttaacgaaacagccaaaaagcagatggaggagttacag

SEQ ID NO: 146918 - DNA, 903 bp, Homo sapiens
  Payload ID: 9058
  Gene Symbol: KNSTRN
  Gene Name: kinetochore-localized astrin/SPAG5 binding protein
  ENST ID: ENST00000560220
  CDS Start-End: 1-202
gacagttgctgcagggaatcttttaaacgagagcgagaaggactgcgggcaggaccggcgggctcctggggttcagccgtgccgcctcgttacgatgaccagtgtggttaagacagtgtatagcctgcagcccccctctgcgctgagcggcggccagccggcagaacacctgaatggtaatcctggcaccagcggggactaggagttgctggaagaactggagccagacacacaaactcgggccacttctaagagtctcttacctgttaggtccaaagaagtcgatgtttccaaacagcttcattcaggaggtccagagaatgatgttacaaaaatcaccaaactgagacgagagaatgggcaaatgaaagctactgacactgccaccagaaggaatgtcagaaaaggctacaaaccactgagtaagcaaaaatcagaggaagagctcaaggacaagaaccagctgttagaagccgtcaacaagcagttgcaccagaagttgactgaaactcagggagagctgaaggacctgacccagaaggtagagctgctggagaagtttcgggacaactgtttggcaattttggagagcaagggccttgatccagctttaggcagtgagaccctggcatcacgacaagaatccactactgatcacatggactctatgttgctgttagaaactttgcaagaggagctgaagctttttaacgaaacagccaaaaagcagatggaggagttacaggccttaaaggtaaagctggagatgaaagaggaaagagtccgattcctagaacagcaaaccttatgtaacaatcaagtaaatgatttaacaacagcccttaaggaaatggagcagctattagaaatgtaagaagaagcaagtggccagatggctccctc

SEQ ID NO: 146919 - DNA, 1495 bp, Homo sapiens
  Payload ID: 9058
  Gene Symbol: KNSTRN
  Gene Name: kinetochore-localized astrin/SPAG5 binding protein
  ENST ID: ENST00000608100
  CDS Start-End: 130-846
tttgaaacccaggcggccgacttagccggtggcacgacagttgctgcagggaatcttttaaacgagagcgagaaggactgcgggcaggaccggcgggctcctggggttcagccgtgccgcctcgttacgatgaccagtgtggttaagacagtgtatagcctgcagcccccctctgcgctgagcggcggccagccggcagacacacaaactcgggccacttctaagagtctcttacctgttaggtccaaagaagtcgatgtttccaaacagcttcattcaggaggtccagagaatgatgttacaaaaatcaccaaactgagacgagagaatgggcaaatgaaagctactgacactgccaccagaaggaatgtcagaaaaggctacaaaccactgagtaagcaaaaatcagaggaagagctcaaggacaagaaccagctgttagaagccgtcaacaagcagttgcaccagaagttgactgaaactcagggagagctgaaggacctgacccagaaggtagagctgctggagaagtttcgggacaactgtttggcaattttggagagcaagggccttgatccagctttaggcagtgagaccctggcatcacgacaagaatccactactgatcacatggactctatgttgctgttagaaactttgcaagaggagctgaagctttttaacgaaacagccaaaaagcagatggaggagttacaggccttaaaggtaaagctggagatgaaagaggaaagagtccgattcctagaacagcaaaccttatgtaacaatcaagtaaatgatttaacaacagcccttaaggaaatggagcagctattagaaatgtaagaagaagcaagtggccagatggctccctcttgggcataaaatctcagaggaagctacttaggacatcatcttggccatgatcttctgggactcaccatctccagaatgaaaacaatttctacagtagacttaaggacagtttatgctgaaatggcaattcctcatttaagcaagttttcccaaccttcaggttggtcagccctcctgagcctcacaggtggataattgaggcctacaagagaggggagcctaggagcttggattgaccttctagtcaaccacctgacttcagcacaccattacaatcgggagactaaaccaacaaccagaggatctaaaatgtcacattcagattttcaggaagaaaatcttcattacagtggagcacaaatgttccatacaagacatcattgaggagccatgctgtccccttctaacctgaaacacattctttcccatcctggttgggcttctgtacctccttattaatttatgaacctgaagttgcttgaagtgttttgggcttaataaatggggtgaaagtataggtagcagtaacacctacatgaaacaatacaccttggatcttttaatctaaattacttttcttttttaagtctacttttaaaataaatacttctgtaaatat

SEQ ID NO: 146920 - DNA, 3435 bp, Homo sapiens
  Payload ID: 9059
  Gene Symbol: KNG1
  Gene Name: kininogen 1
  Uniprot ID: P01042
  ENST ID: ENST00000265023
  CDS Start-End: 213-2147
aaatatgtttggataacccagcagagccatttaacctttgggaacaaggcaactagcgtctggcagcaggaatccaaccagtgccctgagttctgaggcagagaggaggacagaagaaacaagaggctggagattgtcaaattcagtatcccagttggctcttgattcttggtgaaaccatccctcagctcctagagggagattgttagatcatgaaactaattaccatccttttcctctgctccaggctgctactaagtttaacccaggaatcacagtccgaggaaattgactgcaatgacaaggatttatttaaagctgtggatgctgctctgaagaaatataacagtcaaaaccaaagtaacaaccagtttgtattgtaccgcataactgaagccactaagacggttggctctgacacgttttattccttcaagtacgaaatcaaggagggggattgtcctgttcaaagtggcaaaacctggcaggactgtgagtacaaggatgctgcaaaagcagccactggagaatgcacggcaaccgtggggaagaggagcagtacgaaattctccgtggctacccagacctgccagattactccagccgagggccctgtggtgacagcccagtacgactgcctcggctgtgtgcatcctatatcaacgcagagcccagacctggagcccattctgagacacggcattcagtactttaacaacaacactcaacattcctccctcttcatgcttaatgaagtaaaacgggcccaaagacaggtggtggctggattgaactttcgaattacctactcaattgtgcaaacgaattgttccaaagagaattttctgttcttaactccagactgcaagtccctttggaatggtgataccggtgaatgtacagataatgcatacatcgatattcagctacgaattgcttccttctcacagaactgtgacatttatccagggaaggattttgtacaaccacctaccaagatttgcgtgggctgccccagagatatacccaccaacagcccagagctggaggagacactgactcacaccatcacaaagcttaatgcagagaataacgcaactttctatttcaagattgacaatgtgaaaaaagcaagagtacaggtggtggctggcaagaaatattttattgacttcgtggccagggaaaccacatgttccaaggaaagtaatgaagagttgaccgaaagctgtgagaccaaaaaacttggccaaagcctagattgcaacgctgaagtttatgtggtaccctgggagaaaaaaatttaccctactgtcaactgtcaaccactgggaatgatctcactgatgaaaaggcctccaggtttttcacctttccgatcatcacgaataggggaaataaaagaagaaacaactgtaagtccaccccacacttccatggcacctgcacaagatgaagagcgggattcaggaaaagaacaagggcatactcgtagacatgactggggccatgaaaaacaaagaaaacataatcttggccatggccataaacatgaacgtgaccaagggcatgggcaccaaagaggacatggccttggccatggacacgaacaacagcatggtcttggtcatggacataagttcaaacttgatgatgatcttgaacaccaagggggccatgtccttgaccatggacataagcataagcatggtcatggccacggaaaacataaaaataaaggcaaaaagaatggaaagcacaatggttggaaaacagagcatttggcaagctcttctgaagacagtactacaccttctgcacagacacaagagaagacagaagggccaacacccatcccttccctagccaagccaggtgtaacagttaccttttctgactttcaggactctgatctcattgcaactatgatgcctcctatatcaccagctcccatacagagtgatgacgattggatccctgatatccagatagacccaaatggcctttcatttaacccaatatcagattttccagacacgacctccccaaaatgtcctggacgcccctggaagtcagttagtgaaattaatccaaccacacaaatgaaagaatcttattatttcgatctcactgatggcctttcttaatttaagtggctatgggtatttctttcatactttattaaagtatcaatatccctctctccattgtccagatgaaaatatcctgatataatgcaccaaaaaccatgcagcttcggaacagtctaaagagaagtggtgagactcccagtggagacaccatcagtctccacggactgcataaaattgtgtgccacaattctaactcttttctgaatcttcttcccaagttttctaaactagcacagtaaacagacaaactaatgtgccgtatggcctgctgcaattggcttctctgataacaaatatgtaccttacaacatatgtcatgaatttgcatacaaagattcttgtcattcttaataaactgtggcacttggtatttgaatgtgtgtgaaaataagggaagtcaagagattaaatgctgaacttattaatggaatagaaataataaggaggctgaggctggagaattgcttgaacccgggaggcggaggttgcagtgagccgagatcgtgccactgcgctccagcctgggcatcagagcaagattctgtctcagaaaaaaagaaaaaaaaagaaataataagaaaaacttccagatttcaaagtaacaagaaagaagacaggttggccaaagggaggaaaggggggacataaattaattgactttctattcccaaaatgggctagttatatcaaataaatactcccactgccctttctgagtgagagtgtttctcataagtcaaaaatttctgtttactcattaactactctttgcaacaggctttcatatagaagtattctgtttatttttgctgagcctagattgagtaattcttagtttacagaagctccgagcttaatgataaggatgaaaagcagagggagcaatatagaagcaggcttgctaataaaactttttaaataattgacaagggaatattatggaatgtgatgcaaagtttgttccgaaattttatgaggaaattactctctagtctcactttatagtctttttgctatgactttgaagaccattgatttttgagaagcagaataataggattgcctttcattgccctatagtgcaaagaaggtatatgctttataaccaatgttgtacttttgcctagaaaaacaagatatggctttaaatagctacaatcatctttggatgtatatgtcactgctgcttcaagttattggatgcatttgaacctctgagtttgtctttcattttaaatattgtctgttcttttaaataaacaaccacagatgtcaggaaaaa

SEQ ID NO: 146921 - DNA, 1720 bp, Homo sapiens
  Payload ID: 9059
  Gene Symbol: KNG1
  Gene Name: kininogen 1
  Uniprot ID: P01042
  ENST ID: ENST00000287611
  CDS Start-End: 268-1551
ttttcaaatgcaaatgagcaggttaacaaccccagtgttgcaatgttctagctgtaaatatgtttggataacccagcagagccatttaacctttgggaacaaggcaactagcgtctggcagcaggaatccaaccagtgccctgagttctgaggcagagaggaggacagaagaaacaagaggctggagattgtcaaattcagtatcccagttggctcttgattcttggtgaaaccatccctcagctcctagagggagattgttagatcatgaaactaattaccatccttttcctctgctccaggctgctactaagtttaacccaggaatcacagtccgaggaaattgactgcaatgacaaggatttatttaaagctgtggatgctgctctgaagaaatataacagtcaaaaccaaagtaacaaccagtttgtattgtaccgcataactgaagccactaagacggttggctctgacacgttttattccttcaagtacgaaatcaaggagggggattgtcctgttcaaagtggcaaaacctggcaggactgtgagtacaaggatgctgcaaaagcagccactggagaatgcacggcaaccgtggggaagaggagcagtacgaaattctccgtggctacccagacctgccagattactccagccgagggccctgtggtgacagcccagtacgactgcctcggctgtgtgcatcctatatcaacgcagagcccagacctggagcccattctgagacacggcattcagtactttaacaacaacactcaacattcctccctcttcatgcttaatgaagtaaaacgggcccaaagacaggtggtggctggattgaactttcgaattacctactcaattgtgcaaacgaattgttccaaagagaattttctgttcttaactccagactgcaagtccctttggaatggtgataccggtgaatgtacagataatgcatacatcgatattcagctacgaattgcttccttctcacagaactgtgacatttatccagggaaggattttgtacaaccacctaccaagatttgcgtgggctgccccagagatatacccaccaacagcccagagctggaggagacactgactcacaccatcacaaagcttaatgcagagaataacgcaactttctatttcaagattgacaatgtgaaaaaagcaagagtacaggtggtggctggcaagaaatattttattgacttcgtggccagggaaaccacatgttccaaggaaagtaatgaagagttgaccgaaagctgtgagaccaaaaaacttggccaaagcctagattgcaacgctgaagtttatgtggtaccctgggagaaaaaaatttaccctactgtcaactgtcaaccactgggaatgatctcactgatgaaaaggcctccaggtttttcacctttccgatcatcacgaataggggaaataaaagaagaaacaactagtcacctaaggtcctgcgagtacaagggtcgacccccaaaggcaggggcagagccagcatctgagagggaggtctcttgaccaatgggcagaatcttcactccaggcacatagccccaaccacctctgccagcaaccttgagaggaaggacaagaagaaagatgggatagaatttaaatagagaagaatgccattttatcactctgcctctgggtgaaataaagatcagtcttgatgttctaactctaa

SEQ ID NO: 146922 - DNA, 1391 bp, Homo sapiens
  Payload ID: 9059
  Gene Symbol: KNG1
  Gene Name: kininogen 1
  Uniprot ID: P01042
  ENST ID: ENST00000447445
  CDS Start-End: 196-1371
ccagcagagccatttaacctttgggaacaaggcaactagcgtctggcagcaggaatccaaccagtgccctgagttctgaggcagagaggaggacagaagaaacaagaggctggagattgtcaaattcagtatcccagttggctcttgattcttggtgaaaccatccctcagctcctagagggagattgttagatcatgaaactaattaccatccttttcctctgctccaggctgctactaagtttaacccaggaatcacagtccgaggaaattgactgcaatgacaaggatttatttaaagctgtggatgctgctctgaagaaatataacagtcaaaaccaaagtaacaaccagtttgtattgtaccgcataactgaagccactaagacggttggctctgacacgttttattccttcaagtacgaaatcaaggagggggattgtcctgttcaaagtggcaaaacctggcaggactgtgagtacaaggatgctgcaaaagcagccactggagaatgcacggcaaccgtggggaagaggagcagtacgaaattctccgtggctacccagacctgccagattactccagccgagggccctgtggtgacagcccagtacgactgcctcggctgtgtgcatcctatatcaacgcagagcccagacctggagcccattctgagacacggcattcagtactttaacaacaacactcaacattcctccctcttcatgcttaatgaagtaaaacgggcccaaagacaggataccggtgaatgtacagataatgcatacatcgatattcagctacgaattgcttccttctcacagaactgtgacatttatccagggaaggattttgtacaaccacctaccaagatttgcgtgggctgccccagagatatacccaccaacagcccagagctggaggagacactgactcacaccatcacaaagcttaatgcagagaataacgcaactttctatttcaagattgacaatgtgaaaaaagcaagagtacaggtggtggctggcaagaaatattttattgacttcgtggccagggaaaccacatgttccaaggaaagtaatgaagagttgaccgaaagctgtgagaccaaaaaacttggccaaagcctagattgcaacgctgaagtttatgtggtaccctgggagaaaaaaatttaccctactgtcaactgtcaaccactgggaatgatctcactgatgaaaaggcctccaggtttttcacctttccgatcatcacgaataggggaaataaaagaagaaacaactagtcacctaaggtcctgcgagtacaagggtcgacccccaaaggcaggggcagagccagcatctgagagggaggtctcttgaccaatgggcagaatcttcac

SEQ ID NO: 146923 - DNA, 608 bp, Homo sapiens
  Payload ID: 9060
  Gene Symbol: KNCN
  Gene Name: kinocilin
  Uniprot ID: A6PVL3
  ENST ID: ENST00000396314
  CDS Start-End: 1-306
atggacatccccatcagcagcagagacttccgcggcctgcagctggcctgcgtggctctcgggctggtggctggcagcatcattatcggcatctccgtatccaaggctgcagctgccatgggcggtgtctttattggcgctgctgttctggggagcctaagaatccatccccatccaggggcagaccacggggaaggaagatccagcaccaatggcaacaaggaaggagcccgcagcagcctgtccaccgtgagcaggaccctggagaagctgaagccggggacccggggggctgaggaatgctgaggcaaagtctgagcggctgcccatgccctgccctcccatcctgcctgctgcccctatgtcagtgccctcctgggttaggagacccggaccggagacaagccaggccctgcagaccccagagcggctgggaacagtgtctggaatggggccttttgcactcgcccggccaagcctctccaaaatggattccactggtgtgggctgggacctggagcaaggtgtcgccggacgcccccacagggttcccatgtttcaggctcctgccctggcctttctttctggactgcagctcagctttgttg

SEQ ID NO: 146924 - DNA, 1037 bp, Homo sapiens
  Payload ID: 9060
  Gene Symbol: KNCN
  Gene Name: kinocilin
  Uniprot ID: A6PVL3
  ENST ID: ENST00000481882
  CDS Start-End: 313-687
gccaaagcagaaatgtagccagacaggagtcccaagggtgggcttcagcttcagagggctttgagagaggaagagtaagctgggtgacctcgtacagatccctggtcaaggtgggactggggggcccgtagtggagcagtggaataggactgcagataaatcccagggttccccacctatcatcttactgcccagaaactcctaccctgaagttggagcgccaacaaggagacatccaagagcccagaaacttccaggacttttctggggccagactgcaccggctggaggcagtgccccgggtgggcctgcatggacatccccatcagcagcagagacttccgcggcctgcagctggcctgcgtggctctcgggctggtggctggcagcatcattatcggcatctccgtatccaaggctgcagctgccatgggcggtgtctttattggcgctgctgttctggggctcctcatcttggcctaccccttcctgaaggctcggttcaacctggaccacatcctgcctaccatagggagcctaagaatccatccccatccaggggcagaccacggggaaggaagatccagcaccaatggcaacaaggaaggagcccgcagcagcctgtccaccgtgagcaggaccctggagaagctgaagccggggacccggggggctgaggaatgctgaggcaaagtctgagcggctgcccatgccctgccctcccatcctgcctgctgcccctatgtcagtgccctcctgggttaggagacccggaccggagacaagccaggccctgcagaccccagagcggctgggaacagtgtctggaatggggccttttgcactcgcccggccaagcctctccaaaatggattccactggtgtgggctgggacctggagcaaggtgtcgccggacgcccccacagggttcccatgtttcaggctcctgccctggcctttctttctggactgcagctcagctttgttgcctgttcaatctactgatttgtttctctggaatttggggtccaaggcc

SEQ ID NO: 146925 - DNA, 1119 bp, Homo sapiens
  Payload ID: 9061
  Gene Symbol: KRAS
  Gene Name: Kirsten rat sarcoma viral oncogene homolog
  Uniprot ID: P01116
  ENST ID: ENST00000256078
  CDS Start-End: 65-634
ctgaaggcggcggcggggccagaggctcagcggctcccaggtgcgggagagaggcctgctgaaaatgactgaatataaacttgtggtagttggagctggtggcgtaggcaagagtgccttgacgatacagctaattcagaatcattttgtggacgaatatgatccaacaatagaggattcctacaggaagcaagtagtaattgatggagaaacctgtctcttggatattctcgacacagcaggtcaagaggagtacagtgcaatgagggaccagtacatgaggactggggagggctttctttgtgtatttgccataaataatactaaatcatttgaagatattcaccattatagagaacaaattaaaagagttaaggactctgaagatgtacctatggtcctagtaggaaataaatgtgatttgccttctagaacagtagacacaaaacaggctcaggacttagcaagaagttatggaattccttttattgaaacatcagcaaagacaagacagagagtggaggatgctttttatacattggtgagagagatccgacaatacagattgaaaaaaatcagcaaagaagaaaagactcctggctgtgtgaaaattaaaaaatgcattataatgtaatctgggtgttgatgatgccttctatacattagttcgagaaattcgaaaacataaagaaaagatgagcaaagatggtaaaaagaagaaaaagaagtcaaagacaaagtgtgtaattatgtaaatacaatttgtacttttttcttaaggcatactagtacaagtggtaatttttgtacattacactaaattattagcatttgttttagcattacctaatttttttcctgctccatgcagactgttagcttttaccttaaatgcttattttaaaatgacagtggaagtttttttttcctctaagtgccagtattcccagagttttggtttttgaactagcaatgcctgtgaaaaagaaactgaatacctaagatttctgtcttggggcttttggtgcatgcagttgattacttcttatttttcttaccaattgtgaatgttggtgtgaaacaaattaatgaagcttttgaatcatccctattctgtgt

SEQ ID NO: 146926 - DNA, 5765 bp, Homo sapiens
  Payload ID: 9061
  Gene Symbol: KRAS
  Gene Name: Kirsten rat sarcoma viral oncogene homolog
  Uniprot ID: P01116
  ENST ID: ENST00000311936
  CDS Start-End: 193-759
tcctaggcggcggccgcggcggcggaggcagcagcggcggcggcagtggcggcggcgaaggtggcggcggctcggccagtactcccggcccccgccatttcggactgggagcgagcgcggcgcaggcactgaaggcggcggcggggccagaggctcagcggctcccaggtgcgggagagaggcctgctgaaaatgactgaatataaacttgtggtagttggagctggtggcgtaggcaagagtgccttgacgatacagctaattcagaatcattttgtggacgaatatgatccaacaatagaggattcctacaggaagcaagtagtaattgatggagaaacctgtctcttggatattctcgacacagcaggtcaagaggagtacagtgcaatgagggaccagtacatgaggactggggagggctttctttgtgtatttgccataaataatactaaatcatttgaagatattcaccattatagagaacaaattaaaagagttaaggactctgaagatgtacctatggtcctagtaggaaataaatgtgatttgccttctagaacagtagacacaaaacaggctcaggacttagcaagaagttatggaattccttttattgaaacatcagcaaagacaagacagggtgttgatgatgccttctatacattagttcgagaaattcgaaaacataaagaaaagatgagcaaagatggtaaaaagaagaaaaagaagtcaaagacaaagtgtgtaattatgtaaatacaatttgtacttttttcttaaggcatactagtacaagtggtaatttttgtacattacactaaattattagcatttgttttagcattacctaatttttttcctgctccatgcagactgttagcttttaccttaaatgcttattttaaaatgacagtggaagtttttttttcctctaagtgccagtattcccagagttttggtttttgaactagcaatgcctgtgaaaaagaaactgaatacctaagatttctgtcttggggcttttggtgcatgcagttgattacttcttatttttcttaccaattgtgaatgttggtgtgaaacaaattaatgaagcttttgaatcatccctattctgtgttttatctagtcacataaatggattaattactaatttcagttgagaccttctaattggtttttactgaaacattgagggaacacaaatttatgggcttcctgatgatgattcttctaggcatcatgtcctatagtttgtcatccctgatgaatgtaaagttacactgttcacaaaggttttgtctcctttccactgctattagtcatggtcactctccccaaaatattatattttttctataaaaagaaaaaaatggaaaaaaattacaaggcaatggaaactattataaggccatttccttttcacattagataaattactataaagactcctaatagcttttcctgttaaggcagacccagtatgaaatggggattattatagcaaccattttggggctatatttacatgctactaaatttttataataattgaaaagattttaacaagtataaaaaattctcataggaattaaatgtagtctccctgtgtcagactgctctttcatagtataactttaaatcttttcttcaacttgagtctttgaagatagttttaattctgcttgtgacattaaaagattatttgggccagttatagcttattaggtgttgaagagaccaaggttgcaaggccaggccctgtgtgaacctttgagctttcatagagagtttcacagcatggactgtgtccccacggtcatccagtgttgtcatgcattggttagtcaaaatggggagggactagggcagtttggatagctcaacaagatacaatctcactctgtggtggtcctgctgacaaatcaagagcattgcttttgtttcttaagaaaacaaactcttttttaaaaattacttttaaatattaactcaaaagttgagattttggggtggtggtgtgccaagacattaattttttttttaaacaatgaagtgaaaaagttttacaatctctaggtttggctagttctcttaacactggttaaattaacattgcataaacacttttcaagtctgatccatatttaataatgctttaaaataaaaataaaaacaatccttttgataaatttaaaatgttacttattttaaaataaatgaagtgagatggcatggtgaggtgaaagtatcactggactaggaagaaggtgacttaggttctagataggtgtcttttaggactctgattttgaggacatcacttactatccatttcttcatgttaaaagaagtcatctcaaactcttagttttttttttttacaactatgtaatttatattccatttacataaggatacacttatttgtcaagctcagcacaatctgtaaatttttaacctatgttacaccatcttcagtgccagtcttgggcaaaattgtgcaagaggtgaagtttatatttgaatatccattctcgttttaggactcttcttccatattagtgtcatcttgcctccctaccttccacatgccccatgacttgatgcagttttaatacttgtaattcccctaaccataagatttactgctgctgtggatatctccatgaagttttcccactgagtcacatcagaaatgccctacatcttatttcctcagggctcaagagaatctgacagataccataaagggatttgacctaatcactaattttcaggtggtggctgatgctttgaacatctctttgctgcccaatccattagcgacagtaggatttttcaaacctggtatgaatagacagaaccctatccagtggaaggagaatttaataaagatagtgctgaaagaattccttaggtaatctataactaggactactcctggtaacagtaatacattccattgttttagtaaccagaaatcttcatgcaatgaaaaatactttaattcatgaagcttactttttttttttggtgtcagagtctcgctcttgtcacccaggctggaatgcagtggcgccatctcagctcactgcaacctccatctcccaggttcaagcgattctcgtgcctcggcctcctgagtagctgggattacaggcgtgtgccactacactcaactaatttttgtatttttaggagagacggggtttcaccctgttggccaggctggtctcgaactcctgacctcaagtgattcacccaccttggcctcataaacctgttttgcagaactcatttattcagcaaatatttattgagtgcctaccagatgccagtcaccacacaaggcactgggtatatggtatccccaaacaagagacataatcccggtccttaggtagtgctagtgtggtctgtaatatcttactaaggcctttggtatacgacccagagataacacgatgcgtattttagttttgcaaagaaggggtttggtctctgtgccagctctataattgttttgctacgattccactgaaactcttcgatcaagctactttatgtaaatcacttcattgttttaaaggaataaacttgattatattgtttttttatttggcataactgtgattcttttaggacaattactgtacacattaaggtgtatgtcagatattcatattgacccaaatgtgtaatattccagttttctctgcataagtaattaaaatatacttaaaaattaatagttttatctgggtacaaataaacaggtgcctgaactagttcacagacaaggaaacttctatgtaaaaatcactatgatttctgaattgctatgtgaaactacagatctttggaacactgtttaggtagggtgttaagacttacacagtacctcgtttctacacagagaaagaaatggccatacttcaggaactgcagtgcttatgaggggatatttaggcctcttgaatttttgatgtagatgggcatttttttaaggtagtggttaattacctttatgtgaactttgaatggtttaacaaaagatttgtttttgtagagattttaaagggggagaattctagaaataaatgttacctaattattacagccttaaagacaaaaatccttgttgaagtttttttaaaaaaagctaaattacatagacttaggcattaacatgtttgtggaagaatatagcagacgtatattgtatcatttgagtgaatgttcccaagtaggcattctaggctctatttaactgagtcacactgcataggaatttagaacctaacttttataggttatcaaaactgttgtcaccattgcacaattttgtcctaatatatacatagaaactttgtggggcatgttaagttacagtttgcacaagttcatctcatttgtattccattgattttttttttcttctaaacattttttcttcaaacagtatataactttttttaggggatttttttttagacagcaaaaactatctgaagatttccatttgtcaaaaagtaatgatttcttgataattgtgtagtaatgttttttagaacccagcagttaccttaaagctgaatttatatttagtaacttctgtgttaatactggatagcatgaattctgcattgagaaactgaatagctgtcataaaatgaaactttctttctaaagaaagatactcacatgagttcttgaagaatagtcataactagattaagatctgtgttttagtttaatagtttgaagtgcctgtttgggataatgataggtaatttagatgaatttaggggaaaaaaaagttatctgcagatatgttgagggcccatctctccccccacacccccacagagctaactgggttacagtgttttatccgaaagtttccaattccactgtcttgtgttttcatgttgaaaatacttttgcatttttcctttgagtgccaatttcttactagtactatttcttaatgtaacatgtttacctggaatgtattttaactatttttgtatagtgtaaactgaaacatgcacattttgtacattgtgctttcttttgtgggacatatgcagtgtgatccagttgttttccatcatttggttgcgctgacctaggaatgttggtcatatcaaacattaaaaatgaccactcttttaattgaaattaacttttaaatgtttataggagtatgtgctgtgaagtgatctaaaatttgtaatatttttgtcatgaactgtactactcctaattattgtaatgtaataaaaatagttacagtgactatgagtgtgtatttattcatgaaatttgaactgtttgccccgaaatggatatggaatactttataagccatagacactatagtataccagtgaatcttttatgcagcttgttagaagtatcctttatttctaaaaggtgctgtggatattatgtaaaggcgtgtttgcttaaacttaaaaccatatttagaagtagatgcaaaacaaatctgcctttatgacaaaaaaataggataacattatttatttatttccttttatcaaagaaggtaattgatacacaacaggtgacttggttttaggcccaaaggtagcagcagcaacattaataatggaaataattgaatagttagttatgtatgttaatgccagtcaccagcaggctatttcaaggtcagaagtaatgactccatacatattatttatttctataactacatttaaatcattaccagg

SEQ ID NO: 146927 - DNA, 1696 bp, Homo sapiens
  Payload ID: 9061
  Gene Symbol: KRAS
  Gene Name: Kirsten rat sarcoma viral oncogene homolog
  ENST ID: ENST00000556131
  CDS Start-End: 178-309
ctaggcggcggccgcggcggcggaggcagcagcggcggcggcagtggcggcggcgaaggtggcggcggctcggccagtactcccggcccccgccatttcggactgggagcgagcgcggcgcaggcactgaaggcggcggcggggccagaggctcagcggctcccaggcctgctgaaaatgactgaatataaacttgtggtagttggagctggtggcgtaggcaagagtgccttgacgatacagctaattcagaatcattttgtggacgaatatgatccaacaatagaggtgttattaagcagtatgtaaaaagtccttacaatacttaatacattaagaaaacatacaatttcaagaggaaatccccgagtaatacattattgacattttcagcagttctagttatattgagaagagcatctcatggaattggcagaatgaagatggagattaaatgagatgatgtttgtaatatgcttatgacagtatctggcatataagtaagggctcagtaaatgttgactgctgtaattactattaatagtaatatgattacctttagtaaaagttattagtttctttaggttttttgtttactacaatatagtaaacaaaatctatacttggaatgtatatattgttttgttttgatacatggaatatgtctctgtgtcagagtcactgcctgagttggaaaacccatactcgagtatgttaaaaggtgaacacactgaataatttagttattaattataatggaaaaatgacaaacttgatgttctggttaatgaggttatcttatcttgaatgagttagcttttaaattcctcaaaataaaggcatttaataaaccaggaaacacttcattaaaaaaattatgcaagtcagtgtaaaagaagattaaaattccacatgggcaaaggacacacgttggcgataaatatgcagataagaaaaaaaacctatataacattattactcctcaaagaaattggtatgaaaacaataaaaatgtgtagcttatcaaaccaacaaaaatttaaaaatatgaaatccattttaagtaatgataaaatgggtgcactcttagtgctttatagaatagtagtataatgaacctcatgtgtgtaccaaccagctctttcatatcttaacatttagcaacatttgatttagctctttcttttttccaagatagaaaagttaatattgttgaagactcctgcattcttttccctagtcttattttcttccctcccataaatgtgttaaaatctctgtgtgtattgttttggttgtatttttacataaaactttacatattatataaaatttaattgaaggtaaaatttattaaattattcttaatatatattgtaatttaaaaattaacagcttcattgtcttgataaaatttatggtatcttaaacatgtgcttgtttttctaagagaacattgaaacatagattttaaaacaaattgttgaaagattaaaaaatctgcctttgcacactgttacattgaaagtggggcatttgtcgtgaacattcatttcaaatatgtagtatcttcagaatatttgagaaggatttgtattatataattgaaaaatctgttaaattgtatttatgttaactgcttaattctaataaaatttccattcattttttagtatctgcatatatttacatcaaa

SEQ ID NO: 146928 - DNA, 1052 bp, Homo sapiens
  Payload ID: 9061
  Gene Symbol: KRAS
  Gene Name: Kirsten rat sarcoma viral oncogene homolog
  ENST ID: ENST00000557334
  CDS Start-End: 198-425
gattttcctaggcggcggccgcggcggcggaggcagcagcggcggcggcagtggcggcggcgaaggtggcggcggctcggccagtactcccggcccccgccatttcggactgggagcgagcgcggcgcaggcactgaaggcggcggcggggccagaggctcagcggctcccaggtgcgggagagaggcctgctgaaaatgactgaatataaacttgtggtagttggagctggtggcgtaggcaagagtgccttgacgatacagctaattcagaatcattttgtggacgaatatgatccaacaatagagggtgttgatgatgccttctatacattagttcgagaaattcgaaaacataaagaaaagatgagcaaagatggtaaaaagaagaaaaagaagtcaaagacaaagtgtgtaattatgtaaatacaatttgtacttttttcttaaggcatactagtacaagtggtaatttttgtacattacactaaattattagcatttgttttagcattacctaatttttttcctgctccatgcagactgttagcttttaccttaaatgcttattttaaaatgacagtggaagtttttttttcctctaagtgccagtattcccagagttttggtttttgaactagcaatgcctgtgaaaaagaaactgaatacctaagatttctgtcttggggcttttggtgcatgcagttgattacttcttatttttcttaccaattgtgaatgttggtgtgaaacaaattaatgaagcttttgaatcatccctattctgtgttttatctagtcacataaatggattaattactaatttcagttgagaccttctaattggtttttactgaaacattgagggaacacaaatttatgggcttcctgatgatgattcttctaggcatcatgtcctatagtttgtcatccctgatgaatgtaaagttacactgttcacaaaggttttgtctcctttccactgctattagtcatggtcactctccccaaaatattatattttttctataaaaagaaaaaaatggaaaaaaa

SEQ ID NO: 146929 - DNA, 709 bp, Homo sapiens
  Payload ID: 9062
  Gene Symbol: KISS1
  Gene Name: KiSS-1 metastasis-suppressor
  Uniprot ID: Q15726
  ENST ID: ENST00000367194
  CDS Start-End: 150-566
ctcttgagaccgggagcccagctgcccaccctctggacattcacccagccaggtggtctcgtcacctcagaggctccgccagactcctgcccaggccaggactgaggcaagcctcaaggcacttctaggacctgcctcttctcaccaagatgaactcactggtttcttggcagctactgcttttcctctgtgccacccactttggggagccattagaaaaggtggcctctgtggggaattctagacccacaggccagcagctagaatccctgggcctcctggcccccggggagcagagcctgccgtgcaccgagaggaagccagctgctactgccaggctgagccgtcgggggacctcgctgtccccgccccccgagagctccgggagcccccagcagccgggcctgtccgccccccacagccgccagatccccgcaccccagggcgcggtgctggtgcagcgggagaaggacctgccgaactacaactggaactccttcggcctgcgcttcggcaagcgggaggcggcaccagggaaccacggcagaagcgctgggcggggctgagggcgcaggtgcggggcagtgaacttcagaccccaaaggagtcagagcatgcggggcgggggcggggggcggggacgtagggctaagggagggggcgctggagcttccaacccgaggcaataaaagaaatgttgcgtaactca

SEQ ID NO: 146930 - DNA, 435 bp, Homo sapiens
  Payload ID: 9062
  Gene Symbol: KISS1
  Gene Name: KiSS-1 metastasis-suppressor
  ENST ID: ENST00000625357
  CDS Start-End: 1-435
atgaactcactggtttcttggcagctactgcttttcctctgtgccacccactttggggagccattagaaaaggtggcctctgtggggaattctagacccacaggccagcagctagaatccctgggcctcctggcccccggggagcagagcctgccgtgcaccgagaggaagccagctgctactgccaggctgagccgtcgggggacctcgctgtccccgccccccgagagctccgggagcccccagcagccgggcctgtccgccccccacagccgccagatccccgcaccccagggcgcggtgctggtgcagcgggagaaggacctgccgaactacaactggaactccttcggcctgcgcttcggcaagcgggaggcggcaccagggaaccacggcagaagcgctgggcggggcggcgcaggtgcggggcagtga

SEQ ID NO: 146931 - DNA, 1625 bp, Homo sapiens
  Payload ID: 9063
  Gene Symbol: KISS1R
  Gene Name: KISS1 receptor
  Uniprot ID: Q969F8
  ENST ID: ENST00000234371
  CDS Start-End: 162-1358
gccgagcccagcacagctgccctctggaccctgcggaccccagccgagccccttcctgagttccacaggcgcagcccccgggcggtcgggcggaggggtccccggggcggtgccagggcgcaatcctggagggcggccgggaggaggaggtgcgcgcggccatgcacaccgtggctacgtccggacccaacgcgtcctggggggcaccggccaacgcctccggctgcccgggctgtggcgccaacgcctcggacggcccagtcccttcgccgcgggccgtggacgcctggctcgtgccgctcttcttcgcggcgctgatgctgctgggcctggtggggaactcgctggtcatctacgtcatctgccgccacaagccgatgcggaccgtgaccaacttctacatcgccaacctggcggccacggacgtgaccttcctcctgtgctgcgtccccttcacggccctgctgtacccgctgcccggctgggtgctgggcgacttcatgtgcaagttcgtcaactacatccagcaggtctcggtgcaggccacgtgtgccactctgaccgccatgagtgtggaccgctggtacgtgacggtgttcccgttgcgcgccctgcaccgccgcacgccccgcctggcgctggctgtcagcctcagcatctgggtaggctctgcggcggtgtctgcgccggtgctcgccctgcaccgcctgtcacccgggccgcgcgcctactgcagtgaggccttccccagccgcgccctggagcgcgccttcgcactgtacaacctgctggcgctgtacctgctgccgctgctcgccacctgcgcctgctatgcggccatgctgcgccacctgggccgggtcgccgtgcgccccgcgcccgccgatagcgccctgcaggggcaggtgctggcagagcgcgcaggcgccgtgcgggccaaggtctcgcggctggtggcggccgtggtcctgctcttcgccgcctgctggggccccatccagctgttcctggtgctgcaggcgctgggccccgcgggctcctggcacccacgcagctacgccgcctacgcgcttaagacctgggctcactgcatgtcctacagcaactccgcgctgaacccgctgctctacgccttcctgggctcgcacttccgacaggccttccgccgcgtctgcccctgcgcgccgcgccgcccccgccgcccccgccggcccggaccctcggaccccgcagccccacacgcggagctgctccgcctggggtcccacccggcccccgccagggcgcagaagccagggagcagtgggctggccgcgcgcgggctgtgcgtcctgggggaggacaacgcccctctctgagcggacccggtgggaatccgagcggctccctcgggagcggggactgctggaacagcggctattcttctgttattagtatttttcttactgtccaagatcaactgtggaaatattttggtctcttgtgacgttcggtgcagtttcgttgtgaagtttgctattgatattgaaattatgacttctgtgtttcctgaaattaaacatgtgtcaacacaggactttctggatcattccagaaagtgtcagacgttttctcattgtcttgta

SEQ ID NO: 146932 - DNA, 507 bp, Homo sapiens
  Payload ID: 9063
  Gene Symbol: KISS1R
  Gene Name: KISS1 receptor
  ENST ID: ENST00000592648
  CDS Start-End: 217-507
gggaggggggcacgggctataaacgctcggccgcagcggcgccggcagaggagccgccgagcccagcacagctgccctctggaccctgcggaccccagccgagccccttcctgagttccacaggcgcagcccccgggcggtcgggcggaggggtccccggggcggtgccagggcgcaatcctggagggcggccgggaggaggaggtgcgcgcggccatgcacaccgtggctacgtccggacccaacgcgtcctggggggcaccggccaacgcctccggctgcccgggctgtggcgccaacgcctcggacggcccagtcccttcgccgcgggccgtggacgcctggctcgtgccgctcttcttcgcggcgctgatgctgctgggcctggtggggaactcgctggtcatctacgtcatctgccgccacaagccgatgcggaccgtgaccaacttctacatcggtctcggtgcaggccacgtgtgccactctgaccgccatgagtgtgga

SEQ ID NO: 146933 - DNA, 964 bp, Homo sapiens
  Payload ID: 9063
  Gene Symbol: KISS1R
  Gene Name: KISS1 receptor
  ENST ID: ENST00000606939
  CDS Start-End: 1-681
atgcacaccgtggctacgtccggacccaacgcgtcctggggggcaccggccaacgcctccggctgcccgggctgtggcgccaacgcctcggacggcccagtcccttcgccgcgggccgtggacgcctggctcgtgccgctcttcttcgcggcgctgatgctgctgggcctggtggggaactcgctggtcatctacgtcatctgccgccacaagccgatgcggaccgtgaccaacttctacatcgccaacctggcggccacggacgtgaccttcctcctgtgctgcgtccccttcacggccctgctgtacccgctgcccggctgggtgctgggcgacttcatgtgcaagttcgtcaactacatccagcaggtctcggtgcaggccacgtgtgccactctgaccgccatgagtgtggaccgctggtacgtgacggtgttcccgttgcgcgccctgcaccgccgcacgccccgcctggcgctggctgtcagcctcagcatctgggtaggggcaggtgctggcagagcgcgcaggcgccgtgcgggccaaggtctcgcggctggtggcggccgtggtcctgctcttcgccgcctgctggggccccatccagctgttcctggtgctgcaggcgctgggccccgcgggctcctggcacccacgcagctacgccgcctacgcgcttaagacctgggctcactgcatgtcctacagcaactccgcgctgaacccgctgctctacgccttcctgggctcgcacttccgacaggccttccgccgcgtctgcccctgcgcgccgcgccgcccccgccgcccccgccggcccggaccctcggaccccgcagccccacacgcggagctgctccgcctggggtcccacccggcccccgccagggcgcagaagccagggagcagtgggctggccgcgcgcgggctgtgcgtcctgggggaggacaacgcccctctctga

SEQ ID NO: 146934 - DNA, 1948 bp, Homo sapiens
  Payload ID: 9064
  Gene Symbol: KITLG
  Gene Name: KIT ligand
  Uniprot ID: P21583
  ENST ID: ENST00000347404
  CDS Start-End: 574-1311
aacagagggagctccgagccctctctggcgcgcgaggtatttcgtctgtccccgggggtgccaggtgagccccagcggatccgggagggtaagctgggactcctcgcgagcagtagctgcagggtaccaagcttcgccctctgcgtccccgcgccttcgcggtctcccgccagtgcaggtccggggcccccaggcgagcggacaaggttggcctaatctgccaaacttctggggcatttaccgtgctctggccgccctcccgattcttccctccgcgcccttgcctgcttctcgcctaccccgggctccggaagggaaggaggcgtgtccggagcaggcgggcgggaactgtataaaagcgccggcggctcagcagccgggcttcgctcgccgcctcgcgccgagactagaagcgctgcgggaagcagggacagtggagagggcgctgcgctcgggctacccaatgcgtggactatctgccgccgctgttcgtgcaatatgctggagctccagaacagctaaacggagtcgccacaccactgtttgtgctggatcgcagcgctgcctttccttatgaagaagacacaaacttggattctcacttgcatttatcttcagctgctcctatttaatcctctcgtcaaaactgaagggatctgcaggaatcgtgtgactaataatgtaaaagacgtcactaaattggtggcaaatcttccaaaagactacatgataaccctcaaatatgtccccgggatggatgttttgccaagtcattgttggataagcgagatggtagtacaattgtcagacagcttgactgatcttctggacaagttttcaaatatttctgaaggcttgagtaattattccatcatagacaaacttgtgaatatagtggatgaccttgtggagtgcgtgaaagaaaactcatctaaggatctaaaaaaatcattcaagagcccagaacccaggctctttactcctgaagaattctttagaatttttaatagatccattgatgccttcaaggactttgtagtggcatctgaaactagtgattgtgtggtttcttcaacattaagtcctgagaaagggaaggccaaaaatccccctggagactccagcctacactgggcagccatggcattgccagcattgttttctcttataattggctttgcttttggagccttatactggaagaagagacagccaagtcttacaagggcagttgaaaatatacaaattaatgaagaggataatgagataagtatgttgcaagagaaagagagagagtttcaagaagtgtaattgtggcttgtatcaacactgttactttcgtacattggctggtaacagttcatgtttgcttcataaatgaagcagctttaaacaaattcatattctgtctggagtgacagaccacatctttatctgttcttgctacccatgactttatatggatgattcagaaattggaacagaatgttttactgtgaaactggcactgaattaatcatctataaagaagaacttgcatggagcaggactctattttaaggactgcgggacttgggtctcatttagaacttgcagctgatgttggaagagaaagcacgtgtctcagactgcatgtaccatttgcatggctccagaaatgtctaaatgctgaaaaaacacctagctttattcttcagatacaaactgcagcctgtagttatcctggtctctgcaagtagatttcagcttggatagtgagggtaacaatttttctcaaagggatctggaaaaaatgtttaaaactcagtagtgtcagccactgtacagtgtagaaagcagtgggaactgtgattggatttggcaacatgtcagctttatagttgccgattagtgatatgggtctgatttcgatctcttcctgatgtaaaccatgctcacccatatccca

SEQ ID NO: 146935 - DNA, 1642 bp, Homo sapiens
  Payload ID: 9064
  Gene Symbol: KITLG
  Gene Name: KIT ligand
  Uniprot ID: P21583
  ENST ID: ENST00000228280
  CDS Start-End: 184-1005
ccgcctcgcgccgagactagaagcgctgcgggaagcagggacagtggagagggcgctgcgctcgggctacccaatgcgtggactatctgccgccgctgttcgtgcaatatgctggagctccagaacagctaaacggagtcgccacaccactgtttgtgctggatcgcagcgctgcctttccttatgaagaagacacaaacttggattctcacttgcatttatcttcagctgctcctatttaatcctctcgtcaaaactgaagggatctgcaggaatcgtgtgactaataatgtaaaagacgtcactaaattggtggcaaatcttccaaaagactacatgataaccctcaaatatgtccccgggatggatgttttgccaagtcattgttggataagcgagatggtagtacaattgtcagacagcttgactgatcttctggacaagttttcaaatatttctgaaggcttgagtaattattccatcatagacaaacttgtgaatatagtggatgaccttgtggagtgcgtgaaagaaaactcatctaaggatctaaaaaaatcattcaagagcccagaacccaggctctttactcctgaagaattctttagaatttttaatagatccattgatgccttcaaggactttgtagtggcatctgaaactagtgattgtgtggtttcttcaacattaagtcctgagaaagattccagagtcagtgtcacaaaaccatttatgttaccccctgttgcagccagctcccttaggaatgacagcagtagcagtaataggaaggccaaaaatccccctggagactccagcctacactgggcagccatggcattgccagcattgttttctcttataattggctttgcttttggagccttatactggaagaagagacagccaagtcttacaagggcagttgaaaatatacaaattaatgaagaggataatgagataagtatgttgcaagagaaagagagagagtttcaagaagtgtaattgtggcttgtatcaacactgttactttcgtacattggctggtaacagttcatgtttgcttcataaatgaagcagctttaaacaaattcatattctgtctggagtgacagaccacatctttatctgttcttgctacccatgactttatatggatgattcagaaattggaacagaatgttttactgtgaaactggcactgaattaatcatctataaagaagaacttgcatggagcaggactctattttaaggactgcgggacttgggtctcatttagaacttgcagctgatgttggaagagaaagcacgtgtctcagactgcatgtaccatttgcatggctccagaaatgtctaaatgctgaaaaaacacctagctttattcttcagatacaaactgcagcctgtagttatcctggtctctgcaagtagatttcagcttggatagtgagggtaacaatttttctcaaagggatctggaaaaaatgtttaaaactcagtagtgtcagccactgtacagtgtagaaagcagtgggaactgtgattggatttggcaacatgtcagctttatagttgccgattagtgatatgggtctgatttcgatctcttcctgatgtaaaccatgctcacccatatccca

SEQ ID NO: 146936 - DNA, 565 bp, Homo sapiens
  Payload ID: 9064
  Gene Symbol: KITLG
  Gene Name: KIT ligand
  ENST ID: ENST00000357116
  CDS Start-End: 256-426
gcttcgctcgccgcctcgcgccgagactagaagcgctgcgggaagcagggacagtggagagggcgctgcgctcgggctacccaatgcgtggactatctgccgccgctgttcgtgcaatatgctggagctccagaacagctaaacggagtcgccacaccactgtttgtgctggatcgcagcgctgcctttccttatgaagaagacacaaggaaggccaaaaatccccctggagactccagcctacactgggcagccatggcattgccagcattgttttctcttataattggctttgcttttggagccttatactggaagaagagacagccaagtcttacaagggcagttgaaaatatacaaattaatgaagaggataatgagataagtatgttgcaagagaaagagagagagtttcaagaagtgtaattgtggcttgtatcaacactgttactttcgtacattggctggtaacagttcatgtttgcttcataaatgaagcagctttaaacaaattcatattctgtctggagtgacagaccacatctttatctgttcttgctaccca

SEQ ID NO: 146937 - DNA, 555 bp, Homo sapiens
  Payload ID: 9064
  Gene Symbol: KITLG
  Gene Name: KIT ligand
  ENST ID: ENST00000552044
  CDS Start-End: 482-555
ttcgctcgccgcctcgcgccgagactagaagcgctgcgggaagcagggacagtggagagggcgctgcgctcgggctacccaatgcgtggactatctgccgccgctgttcgtgcaatatgctggagctccagaacagctaaacggagtcgccacaccactgtttgtgctggatcgcagcgctgcctttccttatgaagaagacacaacaaagcagctgctttgaaaagaagctcaaaggattaccttgaaatggttacccactctcccccttttctgctccaagaagaaagtttctttctgtattttcccagcattattaagagtcaagacttgaggccttaagacttggattctcacttgcatttatcttcagctgctcctatttaatcctctcgtcaaaactgaagggatctgcaggaatcgtgtgactaataatgtaaaagacgtcactaaattggtggcaaatcttccaaaagactacatgataaccctcaaatatgtccccgggatggatgttttgccaagtcattgttggataagcgagatggtagtaca

SEQ ID NO: 146938 - DNA, 135 bp, Homo sapiens
  Payload ID: 9064
  Gene Symbol: KITLG
  Gene Name: KIT ligand
  ENST ID: ENST00000613305
  CDS Start-End: 1-135
gaaaactcatctaagtgtttttcagtatgttgcaagagaaagagagagagtttcaagaagtgtaattgtggcttgtatcaacactgttactttcgtacattggctggtaacagttcatgtttgcttcataaatga

SEQ ID NO: 146939 - DNA, 1663 bp, Homo sapiens
  Payload ID: 9065
  Gene Symbol: KIZ
  Gene Name: kizuna centrosomal protein
  ENST ID: ENST00000619179
  CDS Start-End: 1-1617
aagatgctatgctcaaaagatagcctgggactaaaagaggaactgacagatgaagacagagaaaaggttgcagtgcacgaggggattaactcaggaacagccatgtcaagaggattgtatcaaccagcaacaatctttatgggccgccaaatgtcagccatcttaagcatgagagatttcagtacagagcacaaatctccccagcccacaaagaacttttcaattcctgacccacattcacaccgacagacagcccagagcagtaatgtgacagacagctgtgtagtacaaactagtaatgacacacagtgcttaaataagtctgacaacatagatggaaaggcatctcttcagattggtgagaaaatgccagtcacagccagtgtattgtctgaggaggaacaaactcattgcttggagataggaagtaacacacgtcatggcaagagtaatttatctgaaggcaaaaagtctgctgaactcaattccccgttacgggaaagattaagtccagagaacagaaccactgatttaaagtgtgacagttccagcggatcagagggagaaatactgacacgggaacatattgaagttgaggaaaaaagagccagcccgccagtctctccgataccagtttcagaatactgtgaatctgaaaataagtggtctcaagagaagcattctccttgggaaggtgtttcagatcatcttgctcacagggaaccaaagtcacaaaagcccttcagaaaaatgcaggaagaggaggaggaaagttggagcaccagcagtgaccttaccatttcaataagtgaagatgatctgattttagagagcccagaaccacagccaaatccaggtggcaagatggagggagaagatggaatagaggccttaaaattaatccatgctgagcaagaaagagttgccctatccactgaaaaaaattgtattttgcaaaccctaagctctcctgattcagaaaaggaatcctccactaacgcaccaacaagagaacctggacaaacaccagactcagacgtaccgagggcacaggtgggtcagcatgttgccaccttgaaagaacatgataattctgtcaaagaagaggcaacagcattattgagaaaagcccttacagaagagtgtggccgtaggtcagctattcacagtagtgaatcatcttgcagcttgccatctattctgaatgacaatagtggaataaaggaagccaaacctgctgtatggctcaacagtgttcctacaagggaacaagaaacagaagcctatcagttgctgaagaaggccacccttcaggataatacaaatcaaactgaaaacaggtttcaaaagacagatgcttctgtgtcacacttgtcaggtttgaatattggcagcggtgcattcgagacaaagacagctaacaaaattgcttcggaagctagtttttcatctagtgaaggaagtcctttgtcaaggcatgaaaacaaaaagaaacccgtgatcaatttaaaatctaatgccctctgggatgagtctgatgacagtaactcagaaattgaggctgctttacgccccagaaaccataacaccgatgattctgatgatttttatgactaacgtgctgtgacattggtttcaaataaagtctttaaacaaactaaaa

SEQ ID NO: 146940 - DNA, 2014 bp, Homo sapiens
  Payload ID: 9065
  Gene Symbol: KIZ
  Gene Name: kizuna centrosomal protein
  Uniprot ID: Q2M2Z5
  ENST ID: ENST00000620891
  CDS Start-End: 256-1968
gcggcccggcgcggtgtttacccgcggtgcatggtggggcggtctccttcggcaaccccggccgaacggccacccagaggctgtgctgagctggcgcagcggcagcagcatgagccggaccctcgcatcggccgtgcccctgtcgagtcccgactactacgagaggctgggccaactccagcacgggctgcgggacagtgaaaagaagagattggacctggaaaagaaactttatgaatataatcagtctgatacatgcagctcgaatatgagactcaaattaagaagatgctatgctcaaaagatagcctgggactaaaagaggaactgacagatgaagacagagaaaaggttgcagtgcacgaggggattaactcaggaacagccatgtcaagaggattgtatcaaccagcaacaatctttatgggccgccaaatgtcagccatcttaagcatgagagatttcagtacagagcacaaatctccccagcccacaaagaacttttcaattcctgacccacattcacaccgacagacagcccagagcagtaatgtgacagacagctgtgtagtacaaactagtaatgacacacagtgcttaaataagtctgacaacatagatggaaaggcatctcttcagattggtgagaaaatgccagtcacagccagtgtattgtctgaggaggaacaaactcattgcttggagataggaagtaacacacgtcatggcaagagtaatttatctgaaggcaaaaagtctgctgaactcaattccccgttacgggaaagattaagtccagagaacagaaccactgatttaaagtgtgacagttccagcggatcagagggagaaatactgacacgggaacatattgaagttgaggaaaaaagagccagcccgccagtctctccgataccagtttcagaatactgtgaatctgaaaataagtggtctcaagagaagcattctccttgggaaggtgtttcagatcatcttgctcacagggaaccaaagtcacaaaagcccttcagaaaaatgcaggaagaggaggaggaaagttggagcaccagcagtgaccttaccatttcaataagtgaagatgatctgattttagagagcccagaaccacagccaaatccaggtggcaagatggagggagaagatggaatagaggccttaaaattaatccatgctgagcaagaaagagttgccctatccactgaaaaaaattgtattttgcaaaccctaagctctcctgattcagaaaaggaatcctccactaacgcaccaacaagagaacctggacaaacaccagactcagacgtaccgagggcacaggtgggtcagcatgttgccaccttgaaagaacatgataattctgtcaaagaagaggcaacagcattattgagaaaagcccttacagaagagtgtggccgtaggtcagctattcacagtagtgaatcatcttgcagcttgccatctattctgaatgacaatagtggaataaaggaagccaaacctgctgtatggctcaacagtgttcctacaagggaacaagaagtttcaagtggctgtggagacaagagcaagaaagaaaatgtggctgcagatatcccaatcacagaaacagaagcctatcagttgctgaagaaggccacccttcaggataatacaaatcaaactgaaaacaggtttcaaaagacagatgcttctgtgtcacacttgtcaggtttgaatattggcagcggtgcattcgagacaaagacagctaacaaaattgcttcggaagctagtttttcatctagtgaaggaagtcctttgtcaaggcatgaaaacaaaaagaaacccgtgatcaatttaaaatctaatgccctctgggatgagtctgatgacagtaactcagaaattgaggctgctttacgccccagaaaccataacaccgatgattctgatgatttttatgactaacgtgctgtgacattggtttcaaataaagtctttaaacaaactaaaa

SEQ ID NO: 146941 - DNA, 2130 bp, Homo sapiens
  Payload ID: 9065
  Gene Symbol: KIZ
  Gene Name: kizuna centrosomal protein
  Uniprot ID: Q2M2Z5
  ENST ID: ENST00000619189
  CDS Start-End: 63-2084
ttcggcaaccccggccgaacggccacccagaggctgtgctgagctggcgcagcggcagcagcatgagccggaccctcgcatcggccgtgcccctgtcgagtcccgactactacgagaggctgggccaactccagcacgggctgcgggacagtgaaaagaagagattggacctggaaaagaaactttatgaatataatcagtctgatacatgcagagttaagctgaaatatgtaaaactaaagaattatctgaaggaaatatgtgaatctgaaaagaaggctcatactcgaaaccaagaatatttaaagcgatttgagcgtgtccaagctcatgttgtacacttcaccacaaatacagagaagcttcaaaaactgaagctcgaatatgagactcaaattaagaagatgctatgctcaaaagatagcctgggactaaaagaggaactgacagatgaagacagagaaaaggttgcagtgcacgaggggattaactcaggaacagccatgtcaagaggattgtatcaaccagcaacaatctttatgggccgccaaatgtcagccatcttaagcatgagagatttcagtacagagcacaaatctccccagcccacaaagaacttttcaattcctgacccacattcacaccgacagacagcccagagcagtaatgtgacagacagctgtgtagtacaaactagtaatgacacacagtgcttaaataagtctgacaacatagatggaaaggcatctcttcagattggtgagaaaatgccagtcacagccagtgtattgtctgaggaggaacaaactcattgcttggagataggaagtaacacacgtcatggcaagagtaatttatctgaaggcaaaaagtctgctgaactcaattccccgttacgggaaagattaagtccagagaacagaaccactgatttaaagtgtgacagttccagcggatcagagggagaaatactgacacgggaacatattgaagttgaggaaaaaagagccagcccgccagtctctccgataccagtttcagaatactgtgaatctgaaaataagtggtctcaagagaagcattctccttgggaaggtgtttcagatcatcttgctcacagggaaccaaagtcacaaaagcccttcagaaaaatgcaggaagaggaggaggaaagttggagcaccagcagtgaccttaccatttcaataagtgaagatgatctgattttagagagcccagaaccacagccaaatccaggtggcaagatggagggagaagatggaatagaggccttaaaattaatccatgctgagcaagaaagagttgccctatccactgaaaaaaattgtattttgcaaaccctaagctctcctgattcagaaaaggaatcctccactaacgcaccaacaagagaacctggacaaacaccagactcagacgtaccgagggcacaggtgggtcagcatgttgccaccttgaaagaacatgataattctgtcaaagaagaggcaacagcattattgagaaaagcccttacagaagagtgtggccgtaggtcagctattcacagtagtgaatcatcttgcagcttgccatctattctgaatgacaatagtggaataaaggaagccaaacctgctgtatggctcaacagtgttcctacaagggaacaagaagtttcaagtggctgtggagacaagagcaagaaagaaaatgtggctgcagatatcccaatcacagaaacagaagcctatcagttgctgaagaaggccacccttcaggataatacaaatcaaactgaaaacaggtttcaaaagacagatgcttctgtgtcacacttgtcaggtttgaatattggcagcggtgcattcgagacaaagacagctaacaaaattgcttcggaagctagtttttcatctagtgaaggaagtcctttgtcaaggcatgaaaacaaaaagaaacccgtgatcaatttaaaatctaatgccctctgggatgagtctgatgacagtaactcagaaattgaggctgctttacgccccagaaaccataacaccgatgattctgatgatttttatgactaacgtgctgtgacattggtttcaaataaagtctttaaacaaactaaaa

SEQ ID NO: 146942 - DNA, 1875 bp, Homo sapiens
  Payload ID: 9065
  Gene Symbol: KIZ
  Gene Name: kizuna centrosomal protein
  Uniprot ID: Q2M2Z5
  ENST ID: ENST00000616848
  CDS Start-End: 211-1833
ccttcggcaaccccggccgaacggccacccagaggctgtgctgagctggcgcagcggcagcagcatgagccggaccctcgcatcggccgtgcccctgtcgagtcccgactactacgagaggctgggccaactccagcacgggctgcgggacagtgaaaagaagagattggacctggaaaagaaactttatgaatataatcagtctgatacatgcaggttgcagtgcacgaggggattaactcaggaacagccatgtcaagaggattgtatcaaccagcaacaatctttatgggccgccaaatgtcagccatcttaagcatgagagatttcagtacagagcacaaatctccccagcccacaaagaacttttcaattcctgacccacattcacaccgacagacagcccagagcagtaatgtgacagacagctgtgtagtacaaactagtaatgacacacagtgcttaaataagtctgacaacatagatggaaaggcatctcttcagattggtgagaaaatgccagtcacagccagtgtattgtctgaggaggaacaaactcattgcttggagataggaagtaacacacgtcatggcaagagtaatttatctgaaggcaaaaagtctgctgaactcaattccccgttacgggaaagattaagtccagagaacagaaccactgatttaaagtgtgacagttccagcggatcagagggagaaatactgacacgggaacatattgaagttgaggaaaaaagagccagcccgccagtctctccgataccagtttcagaatactgtgaatctgaaaataagtggtctcaagagaagcattctccttgggaaggtgtttcagatcatcttgctcacagggaaccaaagtcacaaaagcccttcagaaaaatgcaggaagaggaggaggaaagttggagcaccagcagtgaccttaccatttcaataagtgaagatgatctgattttagagagcccagaaccacagccaaatccaggtggcaagatggagggagaagatggaatagaggccttaaaattaatccatgctgagcaagaaagagttgccctatccactgaaaaaaattgtattttgcaaaccctaagctctcctgattcagaaaaggaatcctccactaacgcaccaacaagagaacctggacaaacaccagactcagacgtaccgagggcacaggtgggtcagcatgttgccaccttgaaagaacatgataattctgtcaaagaagaggcaacagcattattgagaaaagcccttacagaagagtgtggccgtaggtcagctattcacagtagtgaatcatcttgcagcttgccatctattctgaatgacaatagtggaataaaggaagccaaacctgctgtatggctcaacagtgttcctacaagggaacaagaagtttcaagtggctgtggagacaagagcaagaaagaaaatgtggctgcagatatcccaatcacagaaacagaagcctatcagttgctgaagaaggccacccttcaggataatacaaatcaaactgaaaacaggtttcaaaagacagatgcttctgtgtcacacttgtcaggtttgaatattggcagcggtgcattcgagacaaagacagctaacaaaattgcttcggaagctagtttttcatctagtgaaggaagtcctttgtcaaggcatgaaaacaaaaagaaacccgtgatcaatttaaaatctaatgccctctgggatgagtctgatgacagtaactcagaaattgaggctgctttacgccccagaaaccataacaccgatgattctgatgatttttatgactaacgtgctgtgacattggtttcaaataaagtctttaaacaaact

SEQ ID NO: 146943 - DNA, 1397 bp, Homo sapiens
  Payload ID: 9065
  Gene Symbol: KIZ
  Gene Name: kizuna centrosomal protein
  ENST ID: ENST00000621366
  CDS Start-End: 1-1351
ctgtgtagtacaaactagtaatgacacacagtgcttaaataagtctgacaacatagatggaaaggcatctcttcagattggtgagaaaatgccagtcacagccagtgtattgtctgaggaggaacaaactcattgcttggagataggaagtaacacacgtcatggcaagagtaatttatctgaaggcaaaaagtctgctgaactcaattccccgttacgggaaagattaagtccagagaacagaaccactgatttaaagtgtgacagttccagcggatcagagggagaaatactgacacgggaacatattgaagttgaggaaaaaagagccagcccgccagtctctccgataccagtttcagaatactgtgaatctgaaaataagtggtctcaagagaagcattctccttgggaaggtgtttcagatcatcttgctcacagggaaccaaagtcacaaaagcccttcagaaaaatgcaggaagaggaggaggaaagttggagcaccagcagtgaccttaccatttcaataagtgaagatgatctgattttagagagcccagaaccacagccaaatccaggtggcaagatggagggagaagatggaatagaggccttaaaattaatccatgctgagcaagaaagagttgccctatccactgaaaaaaattgtattttgcaaaccctaagctctcctgattcagaaaaggaatcctccactaacgcaccaacaagagaacctggacaaacaccagactcagacgtaccgagggcacaggcaacagcattattgagaaaagcccttacagaagagtgtggccgtaggtcagctattcacagtagtgaatcatcttgcagcttgccatctattctgaatgacaatagtggaataaaggaagccaaacctgctgtatggctcaacagtgttcctacaagggaacaagaagtttcaagtggctgtggagacaagagcaagaaagaaaatgtggctgcagatatcccaatcacagaaacagaagcctatcagttgctgaagaaggccacccttcaggataatacaaatcaaactgaaaacaggtttcaaaagacagatgcttctgtgtcacacttgtcaggtttgaatattggcagcggtgcattcgagacaaagacagctaacaaaattgcttcggaagctagtttttcatctagtgaaggaagtcctttgtcaaggcatgaaaacaaaaagaaacccgtgatcaatttaaaatctaatgccctctgggatgagtctgatgacagtaactcagaaattgaggctgctttacgccccagaaaccataacaccgatgattctgatgatttttatgactaacgtgctgtgacattggtttcaaataaagtctttaaacaaactaaaa

SEQ ID NO: 146944 - DNA, 408 bp, Homo sapiens
  Payload ID: 9065
  Gene Symbol: KIZ
  Gene Name: kizuna centrosomal protein
  ENST ID: ENST00000612654
  CDS Start-End: 103-288
ggcgcggtgtttacccgcggtgcatggtggggcggtctccttcggcaaccccggccgaacggccacccagaggctgtgctgagctggcgcagcggcagcagcatgagccggaccctcgcatcggccgtgcccctgtcgagtcccgactactacgagaggctgggccaactccagcacgggctgcgggacagatttccctggcgactgctgcatacttttgtgccttttgttttagatgcgtctggcattttctgcttcttagaccagagaagcattttcacaaagtgaaaagaagagattggacctggaaaagaaactttatgaatataatcagtctgatacatgcagagttaagctgaaatatgtaaaactaaagaattatctgaaggaaatatgtgaatctgaaaa

SEQ ID NO: 146945 - DNA, 3856 bp, Homo sapiens
  Payload ID: 9065
  Gene Symbol: KIZ
  Gene Name: kizuna centrosomal protein
  ENST ID: ENST00000616679
  CDS Start-End: 1-1566
aagaagatgctatgctcaaaagatagcctgggactaaaagaggaactgacagatgaagacagagaaaaggttgcagtgcacgaggggattaactcaggaacagccatgtcaagaggattgtatcaaccagcaacaatctttatgggccgccaaatgtcagccatcttaagcatgagagatttcagtacagagcacaaatctccccagcccacaaagaacttttcaattcctgacccacattcacaccgacagacagcccagagcagtaatgtgacagacagctgtgtagtacaaactagtaatgacacacagtgcttaaataagtctgacaacatagatggaaaggcatctcttcagattggtgagaaaatgccagtcacagccagtgtattgtctgaggaggaacaaactcattgcttggagataggaagtaacacacgtcatggcaagagtaatttatctgaaggcaaaaagtctgctgaactcaattccccgttacgggaaagattaagtccagagaacagaaccactgatttaaagtgtgacagttccagcggatcagagggagaaatactgacacgggaacatattgaagttgaggaaaaaagagccagcccgccagtctctccgataccagtttcagaatactgtgaatctgaaaataagtggtctcaagagaagcattctccttgggaaggtgtttcagatcatcttgctcacagggaaccaaagtcacaaaagcccttcagaaaaatgcaggaagaggaggaggaaagttggagcaccagcagtgaccttaccatttcaataagtgaagatgatctgattttagagagcccagaaccacagccaaatccaggtggcaagatggagggagaagatggaatagaggccttaaaattaatccatgctgagcaagaaagagttgccctatccactgaaaaaaattgtattttgcaaaccctaagctctcctgattcagaaaaggaatcctccactaacgcaccaacaagagaacctggacaaacaccagactcagacgtaccgagggcacaggtgggtcagcatgttgccaccttgaaagaacatgataattctgtcaaagaagaggcaacagcattattgagaaaagcccttacagaagagtgtggccgtaggtcagctattcacagtagtgaatcatcttgcagcttgccatctattctgaatgacaatagtggaataaaggaagccaaacctgctgtatggctcaacagtgttcctacaagggaacaagaaacagaagcctatcagttgctgaagaaggccacccttcaggataatacaaatcaaactgaaaacaggtttcaaaagacagatgcttctgtgtcacacttgtcaggtttgaatattggcagcggtgcattcgagacaaagacagctaacaaaattgcttcggaagctagtttttcatctagtgaaggaagtcctttgtcaaggcatgaaaacaaaaagaaacccgtgatcaatttaaaatctaatggtgagagagataatcggacactagattttctttttctgttttaaccaaaaaactctgtgacatgcatttgttgtttgcaccctcatgtgagtcctgaagcgggcatgctcacagggactgccattgcagctgtccctggggtggaacctgagggcttctggaggctcagttcttcacagacaggaccacacgggtgccatggaccacaggggcagagcattgtaatttgcaagtatgaatttgcaggggatcctggcctccatgtctaattaattatcagcaccctgtattttaccaatgaaatgtttcttgcctctctcctcatcctcagaagcacccattgctcatgaccggacaggctcttggagtaactctaactggtttcctcatacccagttcctcccagctcctgggaactcccagctcctccacctggccaccagcctccaaaccctggcttcccccgaccttcctgtgtaaggacggccaatgcctccccgtaccttcagggtagagtctgagctttctccattcctgggaggccccagccctgctctccagcttattcctcccaaggtcgcctctttgggtcaagccacagtcagcttttttcagctgtagcacacctatgcctctgtacctttgcccatgttgttccttctgtagggagttccttttccttttcctcagcccagtgagctcctattcatccttcaacacccaactcacgggaaaaatctagccctcctaccataacactgtggcatatcccctgcccagcttgggctctctcacctcctgtctccttaaaccccttataccttaaattaaaggtataatttgattaatagttttactgacaataacaaaaatattcgctgtttatttagccccagtatgtcccactttgctaacccagtatggaaactgattcagagctgctgtagaacctaggcctaggaatctgcctttttagcaagcaccccactgtgaatcactcttctagaaggacagctacctactgtgggggagacaagtacccagtgggttgtgatggagagtatgggcttgagtcagatgacttggatgggactcccagcttggccactcactggcattgtgattgtggccaatttcttaacccccttcagcgtccgtttgtttgcacagtgaaatggaaacattaatacttaccttgccaggctggtgcgaggatgagatggggttgtgtatgagaagtcagcacagagctggcaggtggtgccatgcaggtgtcagcagagttaagggattgttgatgtagtagacgtggtccgctccactacaccttgccagaccacctgcagggcacctcagctccaattcacagacgcgcctacagcttcctgcaccaagcagctgtgtctctctgcctgagggctttctctggctgcaggagcgtgctcagccctcacaaggcagcccaaagtaccagggagttgatgccctgggttgagagcaaccctcaaccaacagaggcaagttggtggatcagtaaccccactcccttgctcttcactgggacaatctggggagagttctgcagtctctcagggggccccagcaggctgagccttgcctgtccactcactgccaggcacccactcgtcatcatacccttcattggcttcctgtcttccttgtgtcactgtccccatggttcctgggatcacctctcaagtaaatgatgtggaccaaagtcctgtctcagggtaaccatctctgcttattcctctgccacgtctttcccttctcctctctgctctcataaagaagaatgggagatgaaagtggaggggcagctgaggtggggcggcatcaggctgatacaacaccccagggaaccctgcttccatgtaaccctgaccttaaatccctatcctataataaagagttgggcacaacagaagggaaaaggaagtattctgcaaattgttttccataacagtgcagaggacacactttgcaatgtgtaatttgtgcagtatgacatgcatttgggtgtgtctggtcaggtacatcatgtggtgtccctgttatgcattttgcagactgacactctgcttaaccagtccttccgtgctgtgctgttttgtaagctcttaaccagaatgcaaaaatgttaaataactgtctggttttattttccagccctctgggatgagtctgatgacagtaactcagaaattgaggctgctttacgccccagaaaccataacaccgatgattctgatgatttttatgactaacgtgctgtgacattggtttcaaataaagtctttaaacaaactaaaa

SEQ ID NO: 146946 - DNA, 1915 bp, Homo sapiens
  Payload ID: 9065
  Gene Symbol: KIZ
  Gene Name: kizuna centrosomal protein
  ENST ID: ENST00000611685
  CDS Start-End: 1-1873
ggtggggcggtctccttcggcaaccccggccgaacggccacccagaggctgtgctgagctggcgcagcggcagcagcatgagccggaccctcgcatcggccgtgcccctgtcgagtcccgactactacgagaggctgggccaactccagcacgggctgcgggacagctcgaatatgagactcaaattaagaagatgctatgctcaaaagatagcctgggactaaaagaggaactgacagatgaagacagagaaaaggttgcagtgcacgaggggattaactcaggaacagccatgtcaagaggattgtatcaaccagcaacaatctttatgggccgccaaatgtcagccatcttaagcatgagagatttcagtacagagcacaaatctccccagcccacaaagaacttttcaattcctgacccacattcacaccgacagacagcccagagcagtaatgtgacagacagctgtgtagtacaaactagtaatgacacacagtgcttaaataagtctgacaacatagatggaaaggcatctcttcagattggtgagaaaatgccagtcacagccagtgtattgtctgaggaggaacaaactcattgcttggagataggaagtaacacacgtcatggcaagagtaatttatctgaaggcaaaaagtctgctgaactcaattccccgttacgggaaagattaagtccagagaacagaaccactgatttaaagtgtgacagttccagcggatcagagggagaaatactgacacgggaacatattgaagttgaggaaaaaagagccagcccgccagtctctccgataccagtttcagaatactgtgaatctgaaaataagtggtctcaagagaagcattctccttgggaaggtgtttcagatcatcttgctcacagggaaccaaagtcacaaaagcccttcagaaaaatgcaggaagaggaggaggaaagttggagcaccagcagtgaccttaccatttcaataagtgaagatgatctgattttagagagcccagaaccacagccaaatccaggtggcaagatggagggagaagatggaatagaggccttaaaattaatccatgctgagcaagaaagagttgccctatccactgaaaaaaattgtattttgcaaaccctaagctctcctgattcagaaaaggaatcctccactaacgcaccaacaagagaacctggacaaacaccagactcagacgtaccgagggcacaggtgggtcagcatgttgccaccttgaaagaacatgataattctgtcaaagaagaggcaacagcattattgagaaaagcccttacagaagagtgtggccgtaggtcagctattcacagtagtgaatcatcttgcagcttgccatctattctgaatgacaatagtggaataaaggaagccaaacctgctgtatggctcaacagtgttcctacaagggaacaagaagtttcaagtggctgtggagacaagagcaagaaagaaaatgtggctgcagatatcccaatcacagaaacagaagcctatcagttgctgaagaaggccacccttcaggataatacaaatcaaactgaaaacaggtttcaaaagacagatgcttctgtgtcacacttgtcaggtttgaatattggcagcggtgcattcgagacaaagacagctaacaaaattgcttcggaagctagtttttcatctagtgaaggaagtcctttgtcaaggcatgaaaacaaaaagaaacccgtgatcaatttaaaatctaatgccctctgggatgagtctgatgacagtaactcagaaattgaggctgctttacgccccagaaaccataacaccgatgattctgatgatttttatgactaacgtgctgtgacattggtttcaaataaagtctttaaacaaact

SEQ ID NO: 146947 - DNA, 1971 bp, Homo sapiens
  Payload ID: 9065
  Gene Symbol: KIZ
  Gene Name: kizuna centrosomal protein
  ENST ID: ENST00000619574
  CDS Start-End: 55-1929
ggcgtcttgccccgcctcctgcaggcggcccggcgcggtgtttacccgcggtgcatggtggggcggtctccttcggcaaccccggccgaacggccacccagaggctgtgctgagctggcgcagcggcagcagcatgagccggaccctcgcatcggccgtgcccctgtcgagtcccgactactacgagaggctgggccaactccagcacgggctgcgggacagctcgaatatgagactcaaattaagaagatgctatgctcaaaagatagcctgggactaaaagaggaactgacagatgaagacagagaaaaggttgcagtgcacgaggggattaactcaggaacagccatgtcaagaggattgtatcaaccagcaacaatctttatgggccgccaaatgtcagccatcttaagcatgagagatttcagtacagagcacaaatctccccagcccacaaagaacttttcaattcctgacccacattcacaccgacagacagcccagagcagtaatgtgacagacagctgtgtagtacaaactagtaatgacacacagtgcttaaataagtctgacaacatagatggaaaggcatctcttcagattggtgagaaaatgccagtcacagccagtgtattgtctgaggaggaacaaactcattgcttggagataggaagtaacacacgtcatggcaagagtaatttatctgaaggcaaaaagtctgctgaactcaattccccgttacgggaaagattaagtccagagaacagaaccactgatttaaagtgtgacagttccagcggatcagagggagaaatactgacacgggaacatattgaagttgaggaaaaaagagccagcccgccagtctctccgataccagtttcagaatactgtgaatctgaaaataagtggtctcaagagaagcattctccttgggaaggtgtttcagatcatcttgctcacagggaaccaaagtcacaaaagcccttcagaaaaatgcaggaagaggaggaggaaagttggagcaccagcagtgaccttaccatttcaataagtgaagatgatctgattttagagagcccagaaccacagccaaatccaggtggcaagatggagggagaagatggaatagaggccttaaaattaatccatgctgagcaagaaagagttgccctatccactgaaaaaaattgtattttgcaaaccctaagctctcctgattcagaaaaggaatcctccactaacgcaccaacaagagaacctggacaaacaccagactcagacgtaccgagggcacaggtgggtcagcatgttgccaccttgaaagaacatgataattctgtcaaagaagaggcaacagcattattgagaaaagcccttacagaagagtgtggccgtaggtcagctattcacagtagtgaatcatcttgcagcttgccatctattctgaatgacaatagtggaataaaggaagccaaacctgctgtatggctcaacagtgttcctacaagggaacaagaagtttcaagtggctgtggagacaagagcaagaaagaaaatgtggctgcagatatcccaatcacagaaacagaagcctatcagttgctgaagaaggccacccttcaggataatacaaatcaaactgaaaacaggtttcaaaagacagatgcttctgtgtcacacttgtcaggtttgaatattggcagcggtgcattcgagacaaagacagctaacaaaattgcttcggaagctagtttttcatctagtgaaggaagtcctttgtcaaggcatgaaaacaaaaagaaacccgtgatcaatttaaaatctaatgccctctgggatgagtctgatgacagtaactcagaaattgaggctgctttacgccccagaaaccataacaccgatgattctgatgatttttatgactaacgtgctgtgacattggtttcaaataaagtctttaaacaaact

SEQ ID NO: 146948 - DNA, 5006 bp, Homo sapiens
  Payload ID: 9066
  Gene Symbol: KL
  Gene Name: klotho
  Uniprot ID: Q9UEF7
  ENST ID: ENST00000380099
  CDS Start-End: 9-3047
cgcgcagcatgcccgccagcgccccgccgcgccgcccgcggccgccgccgccgtcgctgtcgctgctgctggtgctgctgggcctgggcggccgccgcctgcgtgcggagccgggcgacggcgcgcagacctgggcccgtttctcgcggcctcctgcccccgaggccgcgggcctcttccagggcaccttccccgacggcttcctctgggccgtgggcagcgccgcctaccagaccgagggcggctggcagcagcacggcaagggtgcgtccatctgggatacgttcacccaccaccccctggcacccccgggagactcccggaacgccagtctgccgttgggcgccccgtcgccgctgcagcccgccaccggggacgtagccagcgacagctacaacaacgtcttccgcgacacggaggcgctgcgcgagctcggggtcactcactaccgcttctccatctcgtgggcgcgagtgctccccaatggcagcgcgggcgtccccaaccgcgaggggctgcgctactaccggcgcctgctggagcggctgcgggagctgggcgtgcagcccgtggtcaccctgtaccactgggacctgccccagcgcctgcaggacgcctacggcggctgggccaaccgcgccctggccgaccacttcagggattacgcggagctctgcttccgccacttcggcggtcaggtcaagtactggatcaccatcgacaacccctacgtggtggcctggcacggctacgccaccgggcgcctggcccccggcatccggggcagcccgcggctcgggtacctggtggcgcacaacctcctcctggctcatgccaaagtctggcatctctacaatacttctttccgtcccactcagggaggtcaggtgtccattgccctaagctctcactggatcaatcctcgaagaatgaccgaccacagcatcaaagaatgtcaaaaatctctggactttgtactaggttggtttgccaaacccgtatttattgatggtgactatcccgagagcatgaagaataacctttcatctattctgcctgattttactgaatctgagaaaaagttcatcaaaggaactgctgacttttttgctctttgctttggacccaccttgagttttcaacttttggaccctcacatgaagttccgccaattggaatctcccaacctgaggcaactgctttcctggattgaccttgaatttaaccatcctcaaatatttattgtggaaaatggctggtttgtctcagggaccaccaagagagatgatgccaaatatatgtattacctcaaaaagttcatcatggaaaccttaaaagccatcaagctggatggggtggatgtcatcgggtataccgcatggtccctcatggatggtttcgagtggcacagaggttacagcatcaggcgtggactcttctatgttgactttctaagccaggacaagatgttgttgccaaagtcttcagccttgttctaccaaaagctgatagagaaaaatggcttccctcctttacctgaaaatcagcccctagaagggacatttccctgtgactttgcttggggagttgttgacaactacattcaagtagataccactctgtctcagtttaccgacctgaatgtttacctgtgggatgtccaccacagtaaaaggcttattaaagtggatggggttgtgaccaagaagaggaaatcctactgtgttgactttgctgccatccagccccagatcgctttactccaggaaatgcacgttacacattttcgcttctccctggactgggccctgattctccctctgggtaaccagtcccaggtgaaccacaccatcctgcagtactatcgctgcatggccagcgagcttgtccgtgtcaacatcaccccagtggtggccctgtggcagcctatggccccgaaccaaggactgccgcgcctcctggccaggcagggcgcctgggagaacccctacactgccctggcctttgcagagtatgcccgactgtgctttcaagagctcggccatcacgtcaagctttggataacgatgaatgagccgtatacaaggaatatgacatacagtgctggccacaaccttctgaaggcccatgccctggcttggcatgtgtacaatgaaaagtttaggcatgctcagaatgggaaaatatccatagccttgcaggctgattggatagaacctgcctgccctttctcccaaaaggacaaagaggtggctgagagagttttggaatttgacattggctggctggctgagcccattttcggctctggagattatccatgggtgatgagggactggctgaaccaaagaaacaattttcttcttccttatttcactgaagatgaaaaaaagctaatccagggtacctttgactttttggctttaagccattataccaccatccttgtagactcagaaaaagaagatccaataaaatacaatgattacctagaagtgcaagaaatgaccgacatcacgtggctcaactcccccagtcaggtggcggtagtgccctgggggttgcgcaaagtgctgaactggctgaagttcaagtacggagacctccccatgtacataatatccaatggaatcgatgacgggctgcatgctgaggacgaccagctgagggtgtattatatgcagaattacataaacgaagctctcaaagcccacatactggatggtatcaatctttgcggatactttgcttattcgtttaacgaccgcacagctccgaggtttggcctctatcgttatgctgcagatcagtttgagcccaaggcatccatgaaacattacaggaaaattattgacagcaatggtttcccgggcccagaaactctggaaagattttgtccagaagaattcaccgtgtgtactgagtgcagtttttttcacacccgaaagtctttactggctttcatagcttttctattttttgcttctattatttctctctcccttatattttactactcgaagaaaggcagaagaagttacaaatagttctgaacatttttctattcattcattttgaaataattatgcagacacatcagctgttaaccatttgcacctctaagtgttgtgaaactgtaaatttcatacatttgacttctagaaaacatttttgtggcttatgacagaggttttgaaatgggcataggtgatcgtaaaatattgaataatgcgaatagtgcctgaatttgttctctttttgggtgattaaaaaactgacaggcactataatttctgtaacacactaacaaaagcatgaaaaataggaaccacaccaatgcaacatttgtgcagaaatttgaatgacaagattaggaatattttcttctgcacccacttctaaatttaatgtttttctggaagtagtaattgcaagagttcgaatagaaagttatgtaccaagtaaccatttctcagctgccataataatgcctagtggcttcccctctgtcaaatctagtttcctatggaaaagaagatggcagatacaggagagacgacagagggtcctaggctggaatgttcctttcgaaagcaatgcttctatcaaatactagtattaatttatgtatctggttaatgacatacttggagagcaaattatggaaatgtgtattttatatgatttttgaggtcctgtctaaaccctgtgtccctgagggatctgtctcactggcatcttgttgagggccttgcacataggaaacttttgataagtatctgcggaaaaacaaacatgaatcctgtgatattgggctcttcaggaagcataaagcaattgtgaaatacagtataccgcagtggctctaggtggaggaaaggaggaaaaagtgcttattatgtgcaacattatgattaatctgattatacaccatttttgagcagatcttggaatgaatgacatgacctttccctagagaataaggatgaaataatcactcattctatgaacagtgacactactttctattctttagctgtactgtaatttctttgagttgatagttttacaaattcttaataggttcaaaagcaatctggtctgaataacactggatttgtttctgtgatctctgaggtctattttatgtttttgctgctacttctgtggaagtagctttgaactagttttactttgaactttcacgctgaaacatgctagtgatatctagaaagggctaattaggtctcatcctttaatgccccttaaataagtcttgctgattttcagacagggaagtctctctattacactggagctgttttatagataagtcaatattgtatcaggcaagataaaccaatgtcataacaggcattgccaacctcactgacacagggtcatagtgtataataatatactgtactatataatatatcatctttagaggtatgattttttcatgaaagataagcttttggtaatattcattttaaagtggacttattaaaattggatgctagagaatcaagtttattttatgtatatatttttctgattataagagtaatatatgttcattgtaaaaatttttaaaacacagaaactatatgcaaagaaaaaataaaaattatctataatctcagaacccagaaatagccactattaacatttcctacgtattttattttacatagatcatattgtatatagttagtatctttattaatttttattatgaaactttcctttgtcattattagtcttcaaaagcatgatttttaatagttgttgagtattccaccacaggaatgtatcacaacttaaccgttcccgtttgttagactagtttcttattaatgttgatgaatgttgtttaaaaataattttgttgctacatttactttaatttccttgactgtaaagagaagtaattttgctccttgataaagtattatattaataataaatctgcctgcaactttttgccttctttcataatcata

SEQ ID NO: 146949 - DNA, 6082 bp, Homo sapiens
  Payload ID: 9067
  Gene Symbol: KLB
  Gene Name: klotho beta
  Uniprot ID: Q86Z14
  ENST ID: ENST00000257408
  CDS Start-End: 98-3232
atcctcagtctcccagttcaagctaatcattgacagagctttacaatcacaagcttttactgaagctttgataagacagtccagcagttggtggcaaatgaagccaggctgtgcggcaggatctccagggaatgaatggattttcttcagcactgatgaaataaccacacgctataggaatacaatgtccaacgggggattgcaaagatctgtcatcctgtcagcacttattctgctacgagctgttactggattctctggagatggaagagctatatggtctaaaaatcctaattttactccggtaaatgaaagtcagctgtttctctatgacactttccctaaaaactttttctggggtattgggactggagcattgcaagtggaagggagttggaagaaggatggaaaaggaccttctatatgggatcatttcatccacacacaccttaaaaatgtcagcagcacgaatggttccagtgacagttatatttttctggaaaaagacttatcagccctggattttataggagtttctttttatcaattttcaatttcctggccaaggcttttccccgatggaatagtaacagttgccaacgcaaaaggtctgcagtactacagtactcttctggacgctctagtgcttagaaacattgaacctatagttactttataccactgggatttgcctttggcactacaagaaaaatatggggggtggaaaaatgataccataatagatatcttcaatgactatgccacatactgtttccagatgtttggggaccgtgtcaaatattggattacaattcacaacccatatctagtggcttggcatgggtatgggacaggtatgcatgcccctggagagaagggaaatttagcagctgtctacactgtgggacacaacttgatcaaggctcactcgaaagtttggcataactacaacacacatttccgcccacatcagaagggttggttatcgatcacgttgggatctcattggatcgagccaaaccggtcggaaaacacgatggatatattcaaatgtcaacaatccatggtttctgtgcttggatggtttgccaaccctatccatggggatggcgactatccagaggggatgagaaagaagttgttctccgttctacccattttctctgaagcagagaagcatgagatgagaggcacagctgatttctttgccttttcttttggacccaacaacttcaagcccctaaacaccatggctaaaatgggacaaaatgtttcacttaatttaagagaagcgctgaactggattaaactggaatacaacaaccctcgaatcttgattgctgagaatggctggttcacagacagtcgtgtgaaaacagaagacaccacggccatctacatgatgaagaatttcctcagccaggtgcttcaagcaataaggttagatgaaatacgagtgtttggttatactgcctggtctctcctggatggctttgaatggcaggatgcttacaccatccgccgaggattattttatgtggattttaacagtaaacagaaagagcggaaacctaagtcttcagcacactactacaaacagatcatacgagaaaatggtttttctttaaaagagtccacgccagatgtgcagggccagtttccctgtgacttctcctggggtgtcactgaatctgttcttaagcccgagtctgtggcttcgtccccacagttcagcgatcctcatctgtacgtgtggaacgccactggcaacagactgttgcaccgagtggaaggggtgaggctgaaaacacgacccgctcaatgcacagattttgtaaacatcaaaaaacaacttgagatgttggcaagaatgaaagtcacccactaccggtttgctctggattgggcctcggtccttcccactggcaacctgtccgcggtgaaccgacaggccctgaggtactacaggtgcgtggtcagtgaggggctgaagcttggcatctccgcgatggtcaccctgtattatccgacccacgcccacctaggcctccccgagcctctgttgcatgccgacgggtggctgaacccatcgacggccgaggccttccaggcctacgctgggctgtgcttccaggagctgggggacctggtgaagctctggatcaccatcaacgagcctaaccggctaagtgacatctacaaccgctctggcaacgacacctacggggcggcgcacaacctgctggtggcccacgccctggcctggcgcctctacgaccggcagttcaggccctcacagcgcggggccgtgtcgctgtcgctgcacgcggactgggcggaacccgccaacccctatgctgactcgcactggagggcggccgagcgcttcctgcagttcgagatcgcctggttcgccgagccgctcttcaagaccggggactaccccgcggccatgagggaatacattgcctccaagcaccgacgggggctttccagctcggccctgccgcgcctcaccgaggccgaaaggaggctgctcaagggcacggtcgacttctgcgcgctcaaccacttcaccactaggttcgtgatgcacgagcagctggccggcagccgctacgactcggacagggacatccagtttctgcaggacatcacccgcctgagctcccccacgcgcctggctgtgattccctggggggtgcgcaagctgctgcggtgggtccggaggaactacggcgacatggacatttacatcaccgccagtggcatcgacgaccaggctctggaggatgaccggctccggaagtactacctagggaagtaccttcaggaggtgctgaaagcatacctgattgataaagtcagaatcaaaggctattatgcattcaaactggctgaagagaaatctaaacccagatttggattcttcacatctgattttaaagctaaatcctcaatacaattttacaacaaagtgatcagcagcaggggcttcccttttgagaacagtagttctagatgcagtcagacccaagaaaatacagagtgcactgtctgcttattccttgtgcagaagaaaccactgatattcctgggttgttgcttcttctccaccctggttctactcttatcaattgccatttttcaaaggcagaagagaagaaagttttggaaagcaaaaaacttacaacacataccattaaagaaaggcaagagagttgttagctaaactgatctgtctgcatgatagacagtttaaaaattcatcccagttccatatgctggtaacttacaggagatatacctgtattatagaaagacaatctgagatacagctgtaaccaaggtgatgacaattgtctctgctgtgtggttcaaagaacattcccttaggtgttgacatcagtgaactcagttcttggatgtaaacataaaggcttcatcctgacagtaagctatgaggattacatgctacattgcttcttaaagtttcatcaactgtattccatcattctgctttagctttcatctctaccaatagctacttgtggtacaataaattatttttaagaagtaaaactctggggctggacgctgtggctcacacctgtaatctcagcactttgggaggccgaggcggggagatcacctgaggtgaggagttcgagaccagcctggccaacatggtgaaaccatgtctctactaaaaatacaaaaaattagccaggcgtggtgacagtggcacctgtaatcccagctacttgggaggctgaggcagaagtttgaacccaggaaacaggttacagtaggccaaaattgcgccactgcactccagcctaggcgacaacagcaagactgtgtccaaaaaaaaaaaaaaaagcaaaagcaaaactttgttttgttagactctacagcagagatttaacacccttctttaaactgggtagtcagtgatagataatatatattctgtcacttctaataaggtgccttctcctttaggtcagggtggttctaaaatggaaagaaaacacaatagggtaagtagtgcttgtctaagccagttacaacacagactcttaaagaggatcaagcccttcatttttctaacaacaaaaaatcacctatagaatatctaatttgtgatcttttactagatctgattttttaaaataatgtaatttccggccaggcacggtggcaccgcctgtaatcccagcactttgggaggccaaggcaggtggatcacctgaggttaggagttcgagactagcctggccaacatggcaaaaccccatctctactaaaaatacaaaagttagccgggcatggtggtgggcacctgtaatcccagctactcaggaggccgaggcaggagaatcgcttgaacccgagaggcagaggttgcaatgagccaagatcgtgccattgcactccagcctgggggacagggcaagactgtctctcaaaataaaaaaaaataataaaaataaaaataaaagtaatttccaaaacctcatctcatggaaagatcacaggatgaaggaaagctagactcaactctgtgaatagaagttgctatactgtaagtaaagcaacaattcagaatactgaatgagtttaaattgttttatatagcacccttttgggctagggttaattactagatctgacttggataatttgacactttgggaaatgaactctgttcttgagacttgttcagtgtattttaaacatctgaggaagaaaacttaaatatgcacctatttatacctattctttctttaggtcaacatttaacacccactgcatacattaatttgtccttgtctgctcactccagcaatttagaccttaacagtcacaagagacgttcttctgttacaaagccttagtaaattaaggcagttttgattatattctaggtccacctatgtctgaagctaaattcagtatctaactgctaatgaacaagtttccaaaatactgtaaaaatacaattagtcaatttgagtaaatgcaaatatgatgagaaatcaatttgctatttggcctggcaaatgggaacagtaaaattctgctttactcttctctagtctccttgccccagctgcacccactaccccaaagttggcagttttgaggtatgattttcaaggaatttttttagtattaacatctccctctgagaactatgtacctaaggtcacgcatacaactagtcaattctgtttttattactctaactatgtagaaacagtaagtcacttaaaacaatcacttggctgggttttttcccctttgtgccacattgattcaccctgacccaagaactccagggaaaattctttaatgtcaactgggcaactcattaacctctctttaacatcaagggcttgggaaaaaaaaaaaaaaggttagccacaggaataacaaaaacctggaatttatctttcaggttttgctttctctttctcactttgtttaaagtatctcgtactcacagttcacaaattaaccttcactgtctctttcacattaagagcttatgcttaaagcatgccccccttttctaacttgctggtttaccataaactcccctaagtaataaaattcctaacccagtactgagagtcctccttctctgccacttgggcattattttactagtttttaagccatcatcgcacaagaatccaaaaacccttaaattttttaaccactggcaaatatgtacagcaaattaggttaagcatttaatctggctcatgctctatcatactaaatattcaggtttatcataaactccttaaaaaccatcaaaggtcaaccagaaactgataactcttgaaaggagcaaacaggtaagatctttggagtttaagcttttctgagatgtgttgtgaaaaatctaacgtgtttatcgtatattcaatgtaacaacctggagaatcacaactatatttaaagagcctctggaaaatgaggccagtacagtgtgactacatgtttaattttcaatgtaatttattccaaataaactggttcatgctgaccacttgtattcaactaacaa

SEQ ID NO: 146950 - DNA, 1507 bp, Homo sapiens
  Payload ID: 9068
  Gene Symbol: KLRC4-KLRK1
  Gene Name: KLRC4-KLRK1 readthrough
  ENST ID: ENST00000539300
  CDS Start-End: 1-451
agaagtgagtctggcccaggacccaaagaggcagcaaaggaaacttaagggcaataaaatctccatttcaggaaccaaacaggaaatattccaagtagaattaaaccttcaaaatgcttcttcggatcatcaagggaatgacaagacatatcactgcaaaggtttactgccacctccagagaagctcactgctgaggtcctaggaatcatttgcattgtcctgatggccactgtgttaaaaacaatagttcttattccttgtattggagtactggagcagaacaatttttccctgaatagaagaatgcagaaagcacgtcattgtggccattgtcctgaggagtggattacatattccaacagttgttattacattggtaaggaaagaagaacttgggaagaaagagtttgctggcctgtgcttcgaagaactctgatctgctttctatagataatgaggaagaaatgctactggggataaaggaaggagaaataagtcaactaaaatttgagcacctgctaataggtatgtgtggggacttcccagttggctgtaagttgccatttgaactaaacgaaataggaatcctttgtgcattgaagactttagattcctctctgcggtagacgtgcacttataagtatttgatggggtggattcgtggtcggaggtctcgacacagctgggagatgagtgaatttcataattataacttggatctgaagaagagtgatttttcaacacgatggcaaaagcaaagatgtccagtagtcaaaagcaaatgtagagaaaatgcatctccattttttttctgctgcttcatcgctgtagccatgggaatccgtttcattattatggtaacaatatggagtgctgtattcctaaactcattattcaaccaagaagttcaaattcccttgaccgaaagttactgtggcccatgtcctaaaaactggatatgttacaaaaataactgctaccaattttttgatgagagtaaaaactggtatgagagccaggcttcttgtatgtctcaaaatgccagccttctgaaagtatacagcaaagaggaccaggatttacttaaactggtgaagtcatatcattggatgggactagtacacattccaacaaatggatcttggcagtgggaagatggctccattctctcacccaacctactaacaataattgaaatgcagaagggagactgtgcactctatgcctcgagctttaaaggctatatagaaaactgttcaactccaaatacgtacatctgcatgcaaaggactgtgtaaagatgatcaaccatctcaataaaagccaggaacagagaagagattacaccagcggtaacactgccaactgagactaaaggaaacaaacaaaaacaggacaaaatgaccaaagactgtcagatttcttagactccacaggaccaaaccatagaacaatttcactgcaaacatgcatgattctccaagacaaaagaagagagatcctaaa

SEQ ID NO: 146951 - DNA, 1750 bp, Homo sapiens
  Payload ID: 9068
  Gene Symbol: KLRC4-KLRK1
  Gene Name: KLRC4-KLRK1 readthrough
  ENST ID: ENST00000543572
  CDS Start-End: 1-114
gaggagtggattacatattccaacagttgttattacattggtaaggaaagaagaacttgggaagaaagagtttgctggcctgtgcttcgaagaactctgatctgctttctatagataatgaggaagaaatggtatgtgtggggacttcccagttggctgtaagttgccatttgaactaaacgaaatagatcaggaactgaggacatatctaaattttctagttttatagaaggcttttatccacaagaatcaagatcttccctctctgagcaggaatcctttgtgcattgaagactttagattcctctctgcggtagacgtgcacttataagtatttgatggggtggattcgtggtcggaggtctcgacacagctgggagatgagtgaatttcataattataacttggatctgaagaagagtgatttttcaacacgatggcaaaagcaaagatgtccagtagtcaaaagcaaatgtagagaaaatgcatctccattttttttctgctgcttcatcgctgtagccatgggaatccgtttcattattatggtaacaatatggagtgctgtattcctaaactcattattcaaccaagaagttcaaattcccttgaccgaaagttactgtggcccatgtcctaaaaactggatatgttacaaaaataactgctaccaattttttgatgagagtaaaaactggtatgagagccaggcttcttgtatgtctcaaaatgccagccttctgaaagtatacagcaaagaggaccaggatttacttaaactggtgaagtcatatcattggatgggactagtacacattccaacaaatggatcttggcagtgggaagatggctccattctctcacccaacctactaacaataattgaaatgcagaagggagactgtgcactctatgcctcgagctttaaaggctatatagaaaactgttcaactccaaatacgtacatctgcatgcaaaggactgtgtaaagatgatcaaccatctcaataaaagccaggaacagagaagagattacaccagcggtaacactgccaactgagactaaaggaaacaaacaaaaacaggacaaaatgaccaaagactgtcagatttcttagactccacaggaccaaaccatagaacaatttcactgcaaacatgcatgattctccaagacaaaagaagagagatcctaaaggcaattcagatatccccaaggctgcctctcccaccacaagcccagagtggatgggctgggggaggggtgctgttttaatttctaaaggtaggaccaacacccaggggatcagtgaaggaagagaaggccagcagatcactgagagtgcaaccccaccctccacaggaaattgcctcatgggcagggccacagcagagagacacagcatgggcagtgccttccctgcctgtgggggtcatgctgccacttttaatgggtcctccacccaacggggtcagggaggtggtgctgccccagtgggccatgattatcttaaaggcattattctccagccttaagtaagatcttaggacgtttcctttgctatgatttgtacttgcttgagtcccatgactgtttctcttcctctctttcttccttttggaatagtaatatccatcctatgtttgtcccactattgtattttggaagcacataacttgtttggtttcacaggttcacagttaagaaggaattttgcctctgaataaatagaatcttgagtctcatgca

SEQ ID NO: 146952 - DNA, 1309 bp, Homo sapiens
  Payload ID: 9068
  Gene Symbol: KLRC4-KLRK1
  Gene Name: KLRC4-KLRK1 readthrough
  ENST ID: ENST00000543812
  CDS Start-End: 111-338
agaataaaaaacatttgccaagacctcatgcccttttagtaaacgaatgtttactgccacctccagagaagctcactgctgaggtcctaggaatcatttgcattgtcctgatggccactgtgttaaaaacaatagttcttattccttgtattggagtactggagcagaacaatttttccctgaatagaagaatgcagaaagcacgtcattgtggccattgtcctgaggagtggattacatattccaacagttgttattacattggtaaggaaagaagaacttgggaagaaagagtttgctggcctgtgcttcgaagaactctgatctgctttctatagataatgaggaagaaatgctactggggataaaggaaggagaaataagtcaactaaaatttgagcacctgctaataggtatgtgtggggacttcccagttggctgtaagttgccatttgaactaaacgaaataggaatcctttgtgcattgaagactttagattcctctctgcggtagacgtgcacttataagtatttgatggggtggattcgtggtcggaggtctcgacacagctgggagatgagtgaatttcataattataacttggatctgaagaagagtgatttttcaacacgatggcaaaagcaaagatgtccagtagtcaaaagcaaatgtagagaaaatgcatctccattttttttctgctgcttcatcgctgtagccatgggaatccgtttcattattatggtaacaatatggagtgctgtattcctaaactcattattcaaccaagaagttcaaattcccttgaccgaaagttactgtggcccatgtcctaaaaactggatatgttacaaaaataactgctaccaattttttgatgagagtaaaaactggtatgagagccaggcttcttgtatgtctcaaaatgccagccttctgaaagtatacagcaaagaggaccaggatttacttaaactggtgaagtcatatcattggatgggactagtacacattccaacaaatggatcttggcagtgggaagatggctccattctctcacccaacctactaacaataattgaaatgcagaagggagactgtgcactctatgcctcgagctttaaaggctatatagaaaactgttcaactccaaatacgtacatctgcatgcaaaggactgtgtaaagatgatcaaccatctcaataaaagccaggaacagagaagagattacaccagcggtaacactgccaactgagactaaaggaaacaaacaaaaacaggacaaaatgaccaaagactgtcagatt

SEQ ID NO: 146953 - DNA, 1074 bp, Homo sapiens
  Payload ID: 9068
  Gene Symbol: KLRC4-KLRK1
  Gene Name: KLRC4-KLRK1 readthrough
  ENST ID: ENST00000588447
  CDS Start-End: 93-320
caagacctcatgcccttttagtaaacgaatgtttactgccacctccagagaagctcactgctgaggtcctaggaatcatttgcattgtcctgatggccactgtgttaaaaacaatagttcttattccttgtattggagtactggagcagaacaatttttccctgaatagaagaatgcagaaagcacgtcattgtggccattgtcctgaggagtggattacatattccaacagttgttattacattggtaaggaaagaagaacttgggaagaaagagtttgctggcctgtgcttcgaagaactctgatctgctttctatagataatgaggaagaaatgaaatttctgggctccctgtcagttctctcatgggttggcatctctcgtagtagcagtgatcatccatgggtgtcaataaatggctcaacgttcaaattgaagtatgtgtggggacttcccagttggctgtaagttgccatttgaactaaacgaaatagatcaggaactgaggacatatctaaattttctagttttatagaaggcttttatccacaagaatcaagatcttccctctctgagcaggaatcctttgtgcattgaagactttagattcctctctgcggtagacgtgcacttataagtatttgatggggtggattcgtggtcggaggtctcgacacagctgggagatgagtgaatttcataattataacttggatctgaagaagagtgatttttcaacacgatggcaaaagcaaagatgtccagtagtcaaaagcaaatgtagagaaaatgcatctccattttttttctgctgcttcatcgctgtagccatgggaatccgtttcattattatggtaacaatatggagtgctgtattcctaaactcattattcaaccaagaagttcaaattcccttgaccgaaagttactgtggcccatgtcctaaaaactggatatgttacaaaaataactgctaccaattttttgatgagagtaaaaactggtatgagagccaggcttcttgtatgtctcaaaatgccagccttctgaaagtatacagcaaagaggaccag

SEQ ID NO: 146954 - DNA, 944 bp, Homo sapiens
  Payload ID: 9068
  Gene Symbol: KLRC4-KLRK1
  Gene Name: KLRC4-KLRK1 readthrough
  ENST ID: ENST00000585507
  CDS Start-End: 93-320
caagacctcatgcccttttagtaaacgaatgtttactgccacctccagagaagctcactgctgaggtcctaggaatcatttgcattgtcctgatggccactgtgttaaaaacaatagttcttattccttgtattggagtactggagcagaacaatttttccctgaatagaagaatgcagaaagcacgtcattgtggccattgtcctgaggagtggattacatattccaacagttgttattacattggtaaggaaagaagaacttgggaagaaagagtttgctggcctgtgcttcgaagaactctgatctgctttctatagataatgaggaagaaatgaaatttctgggctccctgtcagttctctcatgggttggcatctctcgtagtagcagtgatcatccatgggtgtcaataaatggctcaacgttcaaattgaactactggggataaaggaaggagaaataagtcaactaaaatttgagcacctgctaataggtatgtgtggggacttcccagttggctgtaagttgccatttgaactaaacgaaatagatcaggaactgaggacatatctaaattttctagttttatagaaggcttttatccacaagaatcaagatcttccctctctgagcaggaatcctttgtgcattgaagactttagattcctctctgcggtagacgtgcacttataagtatttgatggggtggattcgtggtcggaggtctcgacacagctgggagatgagtgaatttcataattataacttggatctgaagaagagtgatttttcaacacgatggcaaaagcaaagatgtccagtagtcaaaagcaaatgtagagaaaatgcatctccattttttttctgctgcttcatcgctgtagccatgggaatccgtttcattattatggtaacaatatggagtgctgtattcctaaact

SEQ ID NO: 146955 - DNA, 910 bp, Homo sapiens
  Payload ID: 9068
  Gene Symbol: KLRC4-KLRK1
  Gene Name: KLRC4-KLRK1 readthrough
  ENST ID: ENST00000591937
  CDS Start-End: 183-410
caagacctcatgcccttttagtaaacgaatgaaccaaacaggaaatattccaagtagaattaaaccttcaaaatgcttcttcggatcatcaagggaatgacaagacatatcactgcaaaggtttactgccacctccagagaagctcactgctgaggtcctaggaatcatttgcattgtcctgatggccactgtgttaaaaacaatagttcttattccttgtattggagtactggagcagaacaatttttccctgaatagaagaatgcagaaagcacgtcattgtggccattgtcctgaggagtggattacatattccaacagttgttattacattggtaaggaaagaagaacttgggaagaaagagtttgctggcctgtgcttcgaagaactctgatctgctttctatagataatgaggaagaaatgaaatttctgggctccctgtcagttctctcatgggttggcatctctcgtagtagcagtgatcatccatgggtgtcaataaatggctcaacgttcaaattgaagtatgtgtggggacttcccagttggctgtaagttgccatttgaactaaacgaaatagatcaggaactgaggacatatctaaattttctagttttatagaaggcttttatccacaagaatcaagatcttccctctctgagcaggaatcctttgtgcattgaagactttagattcctctctgcggtagacgtgcacttataagtatttgatggggtggattcgtggtcggaggtctcgacacagctgggagatgagtgaatttcataattataacttggatctgaagaagagtgatttttcaacacgatggcaaaagcaaagatgtccagtagtcaaaagcaaatgtagagaaaatgcatctccattttttttctgctgcttca

SEQ ID NO: 146956 - DNA, 1085 bp, Homo sapiens
  Payload ID: 9068
  Gene Symbol: KLRC4-KLRK1
  Gene Name: KLRC4-KLRK1 readthrough
  ENST ID: ENST00000590131
  CDS Start-End: 93-320
caagacctcatgcccttttagtaaacgaatgtttactgccacctccagagaagctcactgctgaggtcctaggaatcatttgcattgtcctgatggccactgtgttaaaaacaatagttcttattccttgtattggagtactggagcagaacaatttttccctgaatagaagaatgcagaaagcacgtcattgtggccattgtcctgaggagtggattacatattccaacagttgttattacattggtaaggaaagaagaacttgggaagaaagagtttgctggcctgtgcttcgaagaactctgatctgctttctatagataatgaggaagaaatggaatcctttgtgcattgaagactttagattcctctctgcggtagacgtgcacttataagtatttgatggggtggattcgtggtcggaggtctcgacacagctgggagatgagtgaatttcataattataacttggatctgaagaagagtgatttttcaacacgatggcaaaagcaaagatgtccagtagtcaaaagcaaatgtagagaaaatgcatctccattttttttctgctgcttcatcgctgtagccatgggaatccgtttcattattatggtaacaatatggagtgctgtattcctaaactcattattcaaccaagaagttcaaattcccttgaccgaaagttactgtggcccatgtcctaaaaactggatatgttacaaaaataactgctaccaattttttgatgagagtaaaaactggtatgagagccaggcttcttgtatgtctcaaaatgccagccttctgaaagtatacagcaaagaggaccaggatttacttaaactggtgaagtcatatcattggatgggactagtacacattccaacaaatggatcttggcagtgggaagatggctccattctctcacccaacctactaacaataattgaaatgcagaagggagactgtgcactctatgcctcgagctttaaaggctatatagaaaactgttcaactccaaatacgtacatctgcatgcaaaggactgtgtaaagatgatcaaccatctcaataaaagccaggaa

SEQ ID NO: 146957 - DNA, 1239 bp, Homo sapiens
  Payload ID: 9068
  Gene Symbol: KLRC4-KLRK1
  Gene Name: KLRC4-KLRK1 readthrough
  ENST ID: ENST00000586581
  CDS Start-End: 1-451
agaagtgagtctggcccaggacccaaagaggcagcaaaggaaacttaagggcaataaaatctccatttcaggaaccaaacaggaaatattccaagtagaattaaaccttcaaaatgcttcttcggatcatcaagggaatgacaagacatatcactgcaaaggtttactgccacctccagagaagctcactgctgaggtcctaggaatcatttgcattgtcctgatggccactgtgttaaaaacaatagttcttattccttgtattggagtactggagcagaacaatttttccctgaatagaagaatgcagaaagcacgtcattgtggccattgtcctgaggagtggattacatattccaacagttgttattacattggtaaggaaagaagaacttgggaagaaagagtttgctggcctgtgcttcgaagaactctgatctgctttctatagataatgaggaagaaatggaatcctttgtgcattgaagactttagattcctctctgcggtagacgtgcacttataagtatttgatggggtggattcgtggtcggaggtctcgacacagctgggagatgagtgaatttcataattataacttggatctgaagaagagtgatttttcaacacgatggcaaaagcaaagatgtccagtagtcaaaagcaaatgtagagaaaatgcatctccattttttttctgctgcttcatcgctgtagccatgggaatccgtttcattattatggtaacaatatggagtgctgtattcctaaactcattattcaaccaagaagttcaaattcccttgaccgaaagttactgtggcccatgtcctaaaaactggatatgttacaaaaataactgctaccaattttttgatgagagtaaaaactggtatgagagccaggcttcttgtatgtctcaaaatgccagccttctgaaagtatacagcaaagaggaccaggatttacttaaactggtgaagtcatatcattggatgggactagtacacattccaacaaatggatcttggcagtgggaagatggctccattctctcacccaacctactaacaataattgaaatgcagaagggagactgtgcactctatgcctcgagctttaaaggctatatagaaaactgttcaactccaaatacgtacatctgcatgcaaaggactgtgtaaagatgatcaaccatctcaataaaagccaggaacagagaagagattacaccagcgg

SEQ ID NO: 146958 - DNA, 996 bp, Homo sapiens
  Payload ID: 9068
  Gene Symbol: KLRC4-KLRK1
  Gene Name: KLRC4-KLRK1 readthrough
  ENST ID: ENST00000585711
  CDS Start-End: 1-107
ggattacatattccaacagttgttattacattggtaaggaaagaagaacttgggaagaaagagtttgctggcctgtgcttcgaagaactctgatctgctttctatagataatgaggaagaaatgaaatttctgggctccctgtcagttctctcatgggttggcatctctcgtagtagcagtgatcatccatgggtgtcaataaatggctcaacgttcaaattgaagaatcctttgtgcattgaagactttagattcctctctgcggtagacgtgcacttataagtatttgatggggtggattcgtggtcggaggtctcgacacagctgggagatgagtgaatttcataattataacttggatctgaagaagagtgatttttcaacacgatggcaaaagcaaagatgtccagtagtcaaaagcaaatgtagagaaaatgcatctccattttttttctgctgcttcatcgctgtagccatgggaatccgtttcattattatggtaacaatatggagtgctgtattcctaaactcattattcaaccaagaagttcaaattcccttgaccgaaagttactgtggcccatgtcctaaaaactggatatgttacaaaaataactgctaccaattttttgatgagagtaaaaactggtatgagagccaggcttcttgtatgtctcaaaatgccagccttctgaaagtatacagcaaagaggaccaggatttacttaaactggtgaagtcatatcattggatgggactagtacacattccaacaaatggatcttggcagtgggaagatggctccattctctcacccaacctactaacaataattgaaatgcagaagggagactgtgcactctatgcctcgagctttaaaggctatatagaaaactgttcaactccaaatacgtacatctgcatgcaaaggactgtgtaaagatgatcaaccatctcaataaaagccaggaacagagaagagattacaccagcgg

SEQ ID NO: 146959 - DNA, 1086 bp, Homo sapiens
  Payload ID: 9068
  Gene Symbol: KLRC4-KLRK1
  Gene Name: KLRC4-KLRK1 readthrough
  ENST ID: ENST00000590323
  CDS Start-End: 183-410
caagacctcatgcccttttagtaaacgaatgaaccaaacaggaaatattccaagtagaattaaaccttcaaaatgcttcttcggatcatcaagggaatgacaagacatatcactgcaaaggtttactgccacctccagagaagctcactgctgaggtcctaggaatcatttgcattgtcctgatggccactgtgttaaaaacaatagttcttattccttgtattggagtactggagcagaacaatttttccctgaatagaagaatgcagaaagcacgtcattgtggccattgtcctgaggagtggattacatattccaacagttgttattacattggtaaggaaagaagaacttgggaagaaagagtttgctggcctgtgcttcgaagaactctgatctgctttctatagataatgaggaagaaatgaaatttctgggctccctgtcagttctctcatgggttggcatctctcgtagtagcagtgatcatccatgggtgtcaataaatggctcaacgttcaaattgaaatcaggaactgaggacatatctaaattttctagttttatagaaggcttttatccacaagaatcaagatcttccctctctgagcaggaatcctttgtgcattgaagactttagattcctctctgcggtagacgtgcacttataagtatttgatggggtggattcgtggtcggaggtctcgacacagctgggagatgagtgaatttcataattataacttggatctgaagaagagtgatttttcaacacgatggcaaaagcaaagatgtccagtagtcaaaagcaaatgtagagaaaatgcatctccattttttttctgctgcttcatcgctgtagccatgggaatccgtttcattattatggtaacaatatggagtgctgtattcctaaactcattattcaaccaagaagttcaaattcccttgaccgaaagttactgtggcccatgtcctaaaaactggatatgttacaaaaataactgctaccaattttttgatgagagtaaaaactggtatgagagccaggcttcttgtatgtctcaaaatgccagccttctgaaa

SEQ ID NO: 146960 - DNA, 1025 bp, Homo sapiens
  Payload ID: 9068
  Gene Symbol: KLRC4-KLRK1
  Gene Name: KLRC4-KLRK1 readthrough
  ENST ID: ENST00000588263
  CDS Start-End: 183-410
caagacctcatgcccttttagtaaacgaatgaaccaaacaggaaatattccaagtagaattaaaccttcaaaatgcttcttcggatcatcaagggaatgacaagacatatcactgcaaaggtttactgccacctccagagaagctcactgctgaggtcctaggaatcatttgcattgtcctgatggccactgtgttaaaaacaatagttcttattccttgtattggagtactggagcagaacaatttttccctgaatagaagaatgcagaaagcacgtcattgtggccattgtcctgaggagtggattacatattccaacagttgttattacattggtaaggaaagaagaacttgggaagaaagagtttgctggcctgtgcttcgaagaactctgatctgctttctatagataatgaggaagaaatggaatcctttgtgcattgaagactttagattcctctctgcggtagacgtgcacttataagtatttgatggggtggattcgtggtcggaggtctcgacacagctgggagatgagtgaatttcataattataacttggatctgaagaagagtgatttttcaacacgatggcaaaagcaaagatgtccagtagtcaaaagcaaatgtagagaaaatgcatctccattttttttctgctgcttcatcgctgtagccatgggaatccgtttcattattatggtaacaatatggagtgctgtattcctaaactcattattcaaccaagaagttcaaattcccttgaccgaaagttactgtggcccatgtcctaaaaactggatatgttacaaaaataactgctaccaattttttgatgagagtaaaaactggtatgagagccaggcttcttgtatgtctcaaaatgccagccttctgaaagtatacagcaaagaggaccaggatttacttaaactggtgaagtcatatcattggatgggactagtacacattccaacaaatggatcttggcagtgggaagatggctccattctctcacccaacct

SEQ ID NO: 146961 - DNA, 985 bp, Homo sapiens
  Payload ID: 9068
  Gene Symbol: KLRC4-KLRK1
  Gene Name: KLRC4-KLRK1 readthrough
  ENST ID: ENST00000591546
  CDS Start-End: 183-410
caagacctcatgcccttttagtaaacgaatgaaccaaacaggaaatattccaagtagaattaaaccttcaaaatgcttcttcggatcatcaagggaatgacaagacatatcactgcaaaggtttactgccacctccagagaagctcactgctgaggtcctaggaatcatttgcattgtcctgatggccactgtgttaaaaacaatagttcttattccttgtattggagtactggagcagaacaatttttccctgaatagaagaatgcagaaagcacgtcattgtggccattgtcctgaggagtggattacatattccaacagttgttattacattggtaaggaaagaagaacttgggaagaaagagtttgctggcctgtgcttcgaagaactctgatctgctttctatagataatgaggaagaaatgcatctccattttttttctgctgcttcatcgctgtagccatgggaatccgtttcattattatggtaacaatatggagtgctgtattcctaaactcattattcaaccaagaagttcaaattcccttgaccgaaagttactgtggcccatgtcctaaaaactggatatgttacaaaaataactgctaccaattttttgatgagagtaaaaactggtatgagagccaggcttcttgtatgtctcaaaatgccagccttctgaaagtatacagcaaagaggaccaggatttacttaaactggtgaagtcatatcattggatgggactagtacacattccaacaaatggatcttggcagtgggaagatggctccattctctcacccaacctactaacaataattgaaatgcagaagggagactgtgcactctatgcctcgagctttaaaggctatatagaaaactgttcaactccaaatacgtacatctgcatgcaaaggactgtgtaaagatgatcaaccatctcaataaaagccaggaacagagaagagattacaccagcgg

SEQ ID NO: 146962 - DNA, 2266 bp, Homo sapiens
  Payload ID: 9069
  Gene Symbol: KANK1
  Gene Name: KN motif and ankyrin repeat domains 1
  ENST ID: ENST00000382286
  CDS Start-End: 1-850
gtatgaattaagtgaaaagatgttgtctgcatgcaacttactgaaaaatactataaatgaccccaaagctttgaccagcaaagatatgaggttctgtctgaacaccctccagcacgagtggttccgcgtgtccagtcagaagtcagccattccagccatggtgggggactacatagctgcttttgaggccatttccccagatgtcctccgctatgtcatcaacttggcagacggcaacggcaacacagccctccattacagcgtgtcccactccaacttcgagattgtgaagctgctgttagatgccgatgtgtgtaatgtggatcaccagaacaaggcaggctacacccccatcatgttggcggccctcgccgctgtggaagcagagaaggacatgcggattgtggaagaactcttcggctgtggggatgtgaatgccaaagctagtcaggcgggacagacggccctcatgctggcggtcagtcacggacggatagacatggtgaagggccttctggcctgtggggctgatgtcaacatccaggatgacgagggctccacggccctcatgtgtgccagcgagcacggacacgtggagattgtcaagctgctgctggcccagcccggctgcaacggtcacctagaggacaacgatggcagcactgcgctctcaatcgccctggaagcaggacacaaggacatcgctgttcttctgtatgcccatgtcaactttgcaaaagcccagtctccggtcagtgttgtgcatttggcatttgtaaataggctgaaatccaccagactggtggacccccttcctccaggaattgacgggagacagattttatgttgattcagaaaatggaagttttagtctggagcttaagagttcatcctttccgcctccaccccgcaaaaagcaggagaactaatgttttagcagaggctggaccttgcttgtccttgcaagacatatgctcacagcttcccatagaggttttgattctgtgcagaattatccagatagcagcccctgagcccatggggatatttcgccatggttctggcattgttcctgaagcagatggcaggcagcctgtagtccacagttcactctgagtgggaaggtgacttcccaggacagccggacatagcactgctgagcccagctggccttggagctgtggacacctgttccctgttctcagccagagctctcctggctcgggctcacagctgcttgttgcctgtggtgggccaagatcctatgtcacagggtacacatctgcctgaggtcacttattaacccccagtttttttcctttcctggtctctagggcacccctaggcttggaaggaagacgtctcctggccccacccaccgaggttcatttgattgattgtatgcaaatagccctttatttacatgccactattaagctgctaattgttcctgttggggtgacagatactgaatgtatacgtattgtgcctgagctcaccagcaaacagaagcatcaagcccaggggtaaaggctgaagctttcacagtgcagagactgctagcctgggcacacacacctcctttctggccgtcttctgtgtagggcacactttaacccagtctctgttgctgttgagtctctgctccgttttgtacagtcacagggaattctgatctgaaggggcaccttctgttcactcccacaaagtggtgtctggttctcactgagacgttttaagatttttccacaaatatttatatgtactaaatgtggaaccattagaaagttcttccaaaatctcattccagcatagttttggatttttcttttgtcttattttaaaataaggaagtcgagatgactttgatcattggtaacttgggcctgggccagacaaagtataaaacttacaaaagaatattctcatttggtcttaactaggtagatgtaatatatgactttttataaaaagggtatctatatgaacttgacacagtattttcagcttttgtattccatactaaagccatgaagaactacacgtaacatcatcatttgtattaattgcacaactccaatgctaaaggttggattgtgttagaggaatcggctctgtatttgcctctagagaaacacagtgttctctttgtatttatggattcctttttaccgtgtcacatttactttggtcctctatgtatttaaatgtttgaagtgccttagactcttgccatattttcaaaataaaattccattaagctctt

SEQ ID NO: 146963 - DNA, 1926 bp, Homo sapiens
  Payload ID: 9069
  Gene Symbol: KANK1
  Gene Name: KN motif and ankyrin repeat domains 1
  ENST ID: ENST00000382289
  CDS Start-End: 1-1059
gagtgtgatgtcattgagtatcctcttgaagaagaggaggaggaggaggatgaagacactcggggaatggcagaagggcaccatgcagttaatattgaaggtttgaagtctgccagggtggaagatgaaatgcaggttcaagaatgtgaacctgagaaggtggaaatcagagagaggtatgaattaagtgaaaagatgttgtctgcatgcaacttactgaaaaatactataaatgaccccaaagctttgaccagcaaagatatgggccaggtgcagtggctgacacctatgatcccaacacttcgggaggccgatgcaggtggatcacatgagaggttctgtctgaacaccctccagcacgagtggttccgcgtgtccagtcagaagtcagccattccagccatggtgggggactacatagctgcttttgaggccatttccccagatgtcctccgctatgtcatcaacttggcagacggcaacggcaacacagccctccattacagcgtgtcccactccaacttcgagattgtgaagctgctgttagatgccgatgtgtgtaatgtggatcaccagaacaaggcaggctacacccccatcatgttggcggccctcgccgctgtggaagcagagaaggacatgcggattgtggaagaactcttcggctgtggggatgtgaatgccaaagctagtcaggcgggacagacggccctcatgctggcggtcagtcacggacggatagacatggtgaagggccttctggcctgtggggctgatgtcaacatccaggatgacgagggctccacggccctcatgtgtgccagcgagcacggacacgtggagattgtcaagctgctgctggcccagcccggctgcaacggtcacctagaggacaacgatggcagcactgcgctctcaatcgccctggaagcaggacacaaggacatcgctgttcttctgtatgcccatgtcaactttgcaaaagcccagtctccgggcacccctaggcttggaaggaagacgtctcctggccccacccaccgaggttcatttgattgattgtatgcaaatagccctttatttacatgccactattaagctgctaattgttcctgttggggtgacagatactgaatgtatacgtattgtgcctgagctcaccagcaaacagaagcatcaagcccaggggtaaaggctgaagctttcacagtgcagagactgctagcctgggcacacacacctcctttctggccgtcttctgtgtagggcacactttaacccagtctctgttgctgttgagtctctgctccgttttgtacagtcacagggaattctgatctgaaggggcaccttctgttcactcccacaaagtggtgtctggttctcactgagacgttttaagatttttccacaaatatttatatgtactaaatgtggaaccattagaaagttcttccaaaatctcattccagcatagttttggatttttcttttgtcttattttaaaataaggaagtcgagatgactttgatcattggtaacttgggcctgggccagacaaagtataaaacttacaaaagaatattctcatttggtcttaactaggtagatgtaatatatgactttttataaaaagggtatctatatgaacttgacacagtattttcagcttttgtattccatactaaagccatgaagaactacacgtaacatcatcatttgtattaattgcacaactccaatgctaaaggttggattgtgttagaggaatcggctctgtatttgcctctagagaaacacagtgttctctttgtatttatggattcctttttaccgtgtcacatttactttggtcctctatgtatttaaatgtttgaagtgccttagactcttgccatattttcaaaataaaattccattaagctc

SEQ ID NO: 146964 - DNA, 5249 bp, Homo sapiens
  Payload ID: 9069
  Gene Symbol: KANK1
  Gene Name: KN motif and ankyrin repeat domains 1
  Uniprot ID: Q14678
  ENST ID: ENST00000382293
  CDS Start-End: 797-4381
gaaaaacagagcctctctgtagagatgcttaaagtgctagctttatttaaaaatcagctggcaaagcgggagtgaagaacacacattttcagaagataccggtttcctgttttcattaagaaaacagggaatgcggaacagctgagtgcggcgggggtggtgtcactgcagccggagggagacctcgccggtgaaagctcagcctatggcatccgagcgtggccggccaagtttacacgaatgttgaaacttctcctcacggggtgaggatcgagggcgcccgaggccgggtccggctgagctggagcgagctgtgcggggcagcgcgggctggcggggagcgcggcgggcgccacgtggaaaagcaggtgatattctcagtggagaccaggacaaggaacagaaagacccttactttgtggagaccccctatggttatcaactagacttagatttcctcaaatatgtggatgacatacagaagggaaataccatcaaaagactgaacatccagaagaggcggaagccgtccgtgccatgcccagaacccaggaccacatctggtcagcaaggtatatggacttccactgaatccctctcatcctccaacagtgatgacaacaagcagtgccccaacttcctcatagccagaagtcaagttacatcaactccaatctcaaagccacctccccctctggagacctcactcccttttcttaccatcccagaaaatcgacagctgccacctccctcaccacaactcccaaagcataaccttcatgtcaccaagacactgatggagacccggagaagactggaacaggagagagccaccatgcagatgacaccgggtgagttcagaaggcccaggctggccagttttggaggcatgggcaccacaagctccctcccttcttttgtgggttctggaaaccacaatcctgccaagcaccagcttcagaatggataccaaggtaatggggattatggtagctatgccccagctgctcccaccacttcctccatggggagctccatccgccacagccccctgagctcagggatctccaccccagtgaccaacgtgagccccatgcacctgcagcacatccgcgagcagatggccattgctctgaaacgcctgaaggagctggaggagcaggtgcgaaccatccctgtgctccaggtaaagatctctgtcttgcaagaagagaaaaggcagttggtctcacagctgaaaaaccaaagggctgcatcccagatcaatgtctgtggtgtgaggaagcggtcctatagtgcggggaacgcctcccagctggaacagctctcccgggcccgaagaagtggcggggaattatacattgactatgaggaggaagaaatggagaccgtagaacagagcacgcagaggataaaggagttccggcaacttacagcagacatgcaagccctggagcagaagatccaggacagcagctgtgaggcctcctcagagctcagggagaatggagagtgccggtctgtggctgtgggtgccgaggagaacatgaacgacatcgtcgtgtaccacagaggctccaggtcctgtaaggatgcagctgtagggacacttgttgagatgagaaattgtggggtcagcgtgacagaggccatgcttggagtgatgactgaagctgacaaagaaattgagctgcaacagcagaccatagaatccttgaaggaaaagatctatcgcctagaagtacagcttagagaaaccacccatgaccgggagatgactaaactgaaacaagagctgcaggctgctggatcgaggaaaaaggttgacaaagccacgatggcccagccgcttgttttcagtaaggtggtggaggcagtggtgcagaccagagaccaaatggtcggcagtcacatggacctggtggacacgtgtgttgggacctccgtggaaacaaacagtgtaggcatctcctgccagcctgaatgtaagaataaagtcgtagggcctgagctgcctatgaattggtggattgttaaggagagggtggaaatgcatgaccgatgtgctgggaggtctgtggaaatgtgtgacaagagtgtgagtgtggaagtcagcgtctgcgaaacaggcagcaacacagaggagtctgtgaacgacctcacactcctcaagacaaacttgaatctcaaagaagtgcggtctatcggttgtggagattgttctgttgacgtgaccgtctgctctccaaaggagtgcgcctcccggggcgtgaacactgaggctgttagccaggtggaagctgccgtcatggcagtgcctcgtactgcagaccaggacactagcacagatttggaacaggtgcaccagttcaccaacaccgagacggccaccctcatagagtcctgcaccaacacttgtctaagcactttggacaagcagaccagcacccagactgtggagacgcggacagtagctgtaggagaaggccgtgtcaaggacatcaactcctccaccaagacgcggtccattggtgttggaacgttgctttctggccattctgggtttgacaggccatcagctgtgaagaccaaagagtcaggtgtggggcagataaatattaacgacaactatctggttggtctcaaaatgaggactatagcttgtgggccaccacagttgactgtggggctgacagccagcagaaggagcgtgggggttggggatgaccctgtaggggaatctctggagaacccccagcctcaagctccacttggaatgatgactggcctggatcactacattgagcgtatccagaagctgctggcagaacagcagacactgctggctgagaactacagtgaactggcagaagctttcggggaacctcactcacagatgggctccctcaactctcagctcatcagcaccctgtcgtctatcaactctgtcatgaaatctgcaagcactgaagagctgaggaaccctgacttccagaaaaccagtctgggtaaaatcacaggcaattatttgggatatacctgtaagtgtgggggccttcagtcaggaagtcccttaagctcccagacatcccagcctgagcaagaagtggggacctcagaaggaaagccaatcagcagcctggatgccttccccactcaggaaggtacgctgtctccagtgaacctgacagacgaccagatcgccgctggcctctatgcatgtacaaacaatgaaagtacactgaagtccatcatgaagaagaaagatggtaacaaagattcaaatggcgcaaaaaagaatcttcagtttgttggcattaatggagggtatgaaacaacttcaagtgatgattccagctcagatgaaagctcttcttccgagtcagatgacgagtgtgatgtcattgagtatcctcttgaagaagaggaggaggaggaggatgaagacactcggggaatggcagaagggcaccatgcagttaatattgaaggtttgaagtctgccagggtggaagatgaaatgcaggttcaagaatgtgaacctgagaaggtggaaatcagagagaggtatgaattaagtgaaaagatgttgtctgcatgcaacttactgaaaaatactataaatgaccccaaagctttgaccagcaaagatatgaggttctgtctgaacaccctccagcacgagtggttccgcgtgtccagtcagaagtcagccattccagccatggtgggggactacatagctgcttttgaggccatttccccagatgtcctccgctatgtcatcaacttggcagacggcaacggcaacacagccctccattacagcgtgtcccactccaacttcgagattgtgaagctgctgttagatgccgatgtgtgtaatgtggatcaccagaacaaggcaggctacacccccatcatgttggcggccctcgccgctgtggaagcagagaaggacatgcggattgtggaagaactcttcggctgtggggatgtgaatgccaaagctagtcaggcgggacagacggccctcatgctggcggtcagtcacggacggatagacatggtgaagggccttctggcctgtggggctgatgtcaacatccaggatgacgagggctccacggccctcatgtgtgccagcgagcacggacacgtggagattgtcaagctgctgctggcccagcccggctgcaacggtcacctagaggacaacgatggcagcactgcgctctcaatcgccctggaagcaggacacaaggacatcgctgttcttctgtatgcccatgtcaactttgcaaaagcccagtctccgggcacccctaggcttggaaggaagacgtctcctggccccacccaccgaggttcatttgattgattgtatgcaaatagccctttatttacatgccactattaagctgctaattgttcctgttggggtgacagatactgaatgtatacgtattgtgcctgagctcaccagcaaacagaagcatcaagcccaggggtaaaggctgaagctttcacagtgcagagactgctagcctgggcacacacacctcctttctggccgtcttctgtgtagggcacactttaacccagtctctgttgctgttgagtctctgctccgttttgtacagtcacagggaattctgatctgaaggggcaccttctgttcactcccacaaagtggtgtctggttctcactgagacgttttaagatttttccacaaatatttatatgtactaaatgtggaaccattagaaagttcttccaaaatctcattccagcatagttttggatttttcttttgtcttattttaaaataaggaagtcgagatgactttgatcattggtaacttgggcctgggccagacaaagtataaaacttacaaaagaatattctcatttggtcttaactaggtagatgtaatatatgactttttataaaaagggtatctatatgaacttgacacagtattttcagcttttgtattccatactaaagccatgaagaactacacgtaacatcatcatttgtattaattgcacaactccaatgctaaaggttggattgtgttagaggaatcggctctgtatttgcctctagagaaacacagtgttctctttgtatttatggattcctttttaccgtgtcacatttactttggtcctctatgtatttaaatgtttgaagtgccttagactcttgccatattttcaaaataaaattccattaagctct

SEQ ID NO: 146965 - DNA, 5051 bp, Homo sapiens
  Payload ID: 9069
  Gene Symbol: KANK1
  Gene Name: KN motif and ankyrin repeat domains 1
  Uniprot ID: Q14678
  ENST ID: ENST00000382297
  CDS Start-End: 123-4181
gcgagcgagcggccggcaggttgggaggagcggccgaaggttgaatgcctttgagaacttgatgcataaaatttgcatgactcctcactcctttctggatctctcattggactcaagccagcatggctcacaccacaaaggttaacggcagtgcctcaggaaaagcaggtgatattctcagtggagaccaggacaaggaacagaaagacccttactttgtggagaccccctatggttatcaactagacttagatttcctcaaatatgtggatgacatacagaagggaaataccatcaaaagactgaacatccagaagaggcggaagccgtccgtgccatgcccagaacccaggaccacatctggtcagcaaggtatatggacttccactgaatccctctcatcctccaacagtgatgacaacaagcagtgccccaacttcctcatagccagaagtcaagttacatcaactccaatctcaaagccacctccccctctggagacctcactcccttttcttaccatcccagaaaatcgacagctgccacctccctcaccacaactcccaaagcataaccttcatgtcaccaagacactgatggagacccggagaagactggaacaggagagagccaccatgcagatgacaccgggtgagttcagaaggcccaggctggccagttttggaggcatgggcaccacaagctccctcccttcttttgtgggttctggaaaccacaatcctgccaagcaccagcttcagaatggataccaaggtaatggggattatggtagctatgccccagctgctcccaccacttcctccatggggagctccatccgccacagccccctgagctcagggatctccaccccagtgaccaacgtgagccccatgcacctgcagcacatccgcgagcagatggccattgctctgaaacgcctgaaggagctggaggagcaggtgcgaaccatccctgtgctccaggtaaagatctctgtcttgcaagaagagaaaaggcagttggtctcacagctgaaaaaccaaagggctgcatcccagatcaatgtctgtggtgtgaggaagcggtcctatagtgcggggaacgcctcccagctggaacagctctcccgggcccgaagaagtggcggggaattatacattgactatgaggaggaagaaatggagaccgtagaacagagcacgcagaggataaaggagttccggcaacttacagcagacatgcaagccctggagcagaagatccaggacagcagctgtgaggcctcctcagagctcagggagaatggagagtgccggtctgtggctgtgggtgccgaggagaacatgaacgacatcgtcgtgtaccacagaggctccaggtcctgtaaggatgcagctgtagggacacttgttgagatgagaaattgtggggtcagcgtgacagaggccatgcttggagtgatgactgaagctgacaaagaaattgagctgcaacagcagaccatagaatccttgaaggaaaagatctatcgcctagaagtacagcttagagaaaccacccatgaccgggagatgactaaactgaaacaagagctgcaggctgctggatcgaggaaaaaggttgacaaagccacgatggcccagccgcttgttttcagtaaggtggtggaggcagtggtgcagaccagagaccaaatggtcggcagtcacatggacctggtggacacgtgtgttgggacctccgtggaaacaaacagtgtaggcatctcctgccagcctgaatgtaagaataaagtcgtagggcctgagctgcctatgaattggtggattgttaaggagagggtggaaatgcatgaccgatgtgctgggaggtctgtggaaatgtgtgacaagagtgtgagtgtggaagtcagcgtctgcgaaacaggcagcaacacagaggagtctgtgaacgacctcacactcctcaagacaaacttgaatctcaaagaagtgcggtctatcggttgtggagattgttctgttgacgtgaccgtctgctctccaaaggagtgcgcctcccggggcgtgaacactgaggctgttagccaggtggaagctgccgtcatggcagtgcctcgtactgcagaccaggacactagcacagatttggaacaggtgcaccagttcaccaacaccgagacggccaccctcatagagtcctgcaccaacacttgtctaagcactttggacaagcagaccagcacccagactgtggagacgcggacagtagctgtaggagaaggccgtgtcaaggacatcaactcctccaccaagacgcggtccattggtgttggaacgttgctttctggccattctgggtttgacaggccatcagctgtgaagaccaaagagtcaggtgtggggcagataaatattaacgacaactatctggttggtctcaaaatgaggactatagcttgtgggccaccacagttgactgtggggctgacagccagcagaaggagcgtgggggttggggatgaccctgtaggggaatctctggagaacccccagcctcaagctccacttggaatgatgactggcctggatcactacattgagcgtatccagaagctgctggcagaacagcagacactgctggctgagaactacagtgaactggcagaagctttcggggaacctcactcacagatgggctccctcaactctcagctcatcagcaccctgtcgtctatcaactctgtcatgaaatctgcaagcactgaagagctgaggaaccctgacttccagaaaaccagtctgggtaaaatcacaggcaattatttgggatatacctgtaagtgtgggggccttcagtcaggaagtcccttaagctcccagacatcccagcctgagcaagaagtggggacctcagaaggaaagccaatcagcagcctggatgccttccccactcaggaaggtacgctgtctccagtgaacctgacagacgaccagatcgccgctggcctctatgcatgtacaaacaatgaaagtacactgaagtccatcatgaagaagaaagatggtaacaaagattcaaatggcgcaaaaaagaatcttcagtttgttggcattaatggagggtatgaaacaacttcaagtgatgattccagctcagatgaaagctcttcttccgagtcagatgacgagtgtgatgtcattgagtatcctcttgaagaagaggaggaggaggaggatgaagacactcggggaatggcagaagggcaccatgcagttaatattgaaggtttgaagtctgccagggtggaagatgaaatgcaggttcaagaatgtgaacctgagaaggtggaaatcagagagaggtatgaattaagtgaaaagatgttgtctgcatgcaacttactgaaaaatactataaatgaccccaaagctttgaccagcaaagatatgaggttctgtctgaacaccctccagcacgagtggttccgcgtgtccagtcagaagtcagccattccagccatggtgggggactacatagctgcttttgaggccatttccccagatgtcctccgctatgtcatcaacttggcagacggcaacggcaacacagccctccattacagcgtgtcccactccaacttcgagattgtgaagctgctgttagatgccgatgtgtgtaatgtggatcaccagaacaaggcaggctacacccccatcatgttggcggccctcgccgctgtggaagcagagaaggacatgcggattgtggaagaactcttcggctgtggggatgtgaatgccaaagctagtcaggcgggacagacggccctcatgctggcggtcagtcacggacggatagacatggtgaagggccttctggcctgtggggctgatgtcaacatccaggatgacgagggctccacggccctcatgtgtgccagcgagcacggacacgtggagattgtcaagctgctgctggcccagcccggctgcaacggtcacctagaggacaacgatggcagcactgcgctctcaatcgccctggaagcaggacacaaggacatcgctgttcttctgtatgcccatgtcaactttgcaaaagcccagtctccgggcacccctaggcttggaaggaagacgtctcctggccccacccaccgaggttcatttgattgattgtatgcaaatagccctttatttacatgccactattaagctgctaattgttcctgttggggtgacagatactgaatgtatacgtattgtgcctgagctcaccagcaaacagaagcatcaagcccaggggtaaaggctgaagctttcacagtgcagagactgctagcctgggcacacacacctcctttctggccgtcttctgtgtagggcacactttaacccagtctctgttgctgttgagtctctgctccgttttgtacagtcacagggaattctgatctgaaggggcaccttctgttcactcccacaaagtggtgtctggttctcactgagacgttttaagatttttccacaaatatttatatgtactaaatgtggaaccattagaaagttcttccaaaatctcattccagcatagttttggatttttcttttgtcttattttaaaataaggaagtcgagatgactttgatcattggtaacttgggcctgggccagacaaagtataaaacttacaaaagaatattctcatttggtcttaactaggtagatgtaatatatgactttttataaaaagggtatctatatgaacttgacacagtattttcagcttttgtattccatactaaagccatgaagaactacacgtaacatcatcatttgtattaattgcacaactccaatgctaaaggttggattgtgttagaggaatcggctctgtatttgcctctagagaaacacagtgttctctttgtatttatggattcctttttaccgtgtcacatttactttggtcctctatgtatttaaatgtttgaagtgccttagactcttgccatattttcaaaataaaattccattaagctcttt

SEQ ID NO: 146966 - DNA, 5581 bp, Homo sapiens
  Payload ID: 9069
  Gene Symbol: KANK1
  Gene Name: KN motif and ankyrin repeat domains 1
  Uniprot ID: Q14678
  ENST ID: ENST00000382303
  CDS Start-End: 653-4711
gcccgagggtgtttcggggcgtccgaagcgggcgtgctccagcctgctcagcagcgagtggttggaaattagcaaagtgagagggtgaaaggaagcaggaggaggagggagttctagcgaagacttcggagggaagcaacccatcccctgccacaagaaagcaccgccactccagtgggaacggacacgcgtgcacacagccacgagtgaggagagaatacagcagttccaaggacaagggattcgtaccactgctcctcactcagtaaatagcagagacagaatttgaacggtctcactctgtcacctgagctagagtgcagtggtgcgatcacagcttactgcagcattgaactcctgggctcaagtgatcctcttgcctcagcctcccaagtaactgtgactgcagtgtccttgctggccttgcaaaatgagtttggaagggttgattccatcctcttcagttgttggaaagagtttaagaagggttggtgttaattcttctctttaaatatttgatgaaattcaccagtgaagccgtgacatcctgggatattctttgttgagaggttgaatgcctttgagaacttgatgcataaaatttgcatgactcctcactcctttctggatctctcattggactcaagccagcatggctcacaccacaaaggttaacggcagtgcctcaggaaaagcaggtgatattctcagtggagaccaggacaaggaacagaaagacccttactttgtggagaccccctatggttatcaactagacttagatttcctcaaatatgtggatgacatacagaagggaaataccatcaaaagactgaacatccagaagaggcggaagccgtccgtgccatgcccagaacccaggaccacatctggtcagcaaggtatatggacttccactgaatccctctcatcctccaacagtgatgacaacaagcagtgccccaacttcctcatagccagaagtcaagttacatcaactccaatctcaaagccacctccccctctggagacctcactcccttttcttaccatcccagaaaatcgacagctgccacctccctcaccacaactcccaaagcataaccttcatgtcaccaagacactgatggagacccggagaagactggaacaggagagagccaccatgcagatgacaccgggtgagttcagaaggcccaggctggccagttttggaggcatgggcaccacaagctccctcccttcttttgtgggttctggaaaccacaatcctgccaagcaccagcttcagaatggataccaaggtaatggggattatggtagctatgccccagctgctcccaccacttcctccatggggagctccatccgccacagccccctgagctcagggatctccaccccagtgaccaacgtgagccccatgcacctgcagcacatccgcgagcagatggccattgctctgaaacgcctgaaggagctggaggagcaggtgcgaaccatccctgtgctccaggtaaagatctctgtcttgcaagaagagaaaaggcagttggtctcacagctgaaaaaccaaagggctgcatcccagatcaatgtctgtggtgtgaggaagcggtcctatagtgcggggaacgcctcccagctggaacagctctcccgggcccgaagaagtggcggggaattatacattgactatgaggaggaagaaatggagaccgtagaacagagcacgcagaggataaaggagttccggcaacttacagcagacatgcaagccctggagcagaagatccaggacagcagctgtgaggcctcctcagagctcagggagaatggagagtgccggtctgtggctgtgggtgccgaggagaacatgaacgacatcgtcgtgtaccacagaggctccaggtcctgtaaggatgcagctgtagggacacttgttgagatgagaaattgtggggtcagcgtgacagaggccatgcttggagtgatgactgaagctgacaaagaaattgagctgcaacagcagaccatagaatccttgaaggaaaagatctatcgcctagaagtacagcttagagaaaccacccatgaccgggagatgactaaactgaaacaagagctgcaggctgctggatcgaggaaaaaggttgacaaagccacgatggcccagccgcttgttttcagtaaggtggtggaggcagtggtgcagaccagagaccaaatggtcggcagtcacatggacctggtggacacgtgtgttgggacctccgtggaaacaaacagtgtaggcatctcctgccagcctgaatgtaagaataaagtcgtagggcctgagctgcctatgaattggtggattgttaaggagagggtggaaatgcatgaccgatgtgctgggaggtctgtggaaatgtgtgacaagagtgtgagtgtggaagtcagcgtctgcgaaacaggcagcaacacagaggagtctgtgaacgacctcacactcctcaagacaaacttgaatctcaaagaagtgcggtctatcggttgtggagattgttctgttgacgtgaccgtctgctctccaaaggagtgcgcctcccggggcgtgaacactgaggctgttagccaggtggaagctgccgtcatggcagtgcctcgtactgcagaccaggacactagcacagatttggaacaggtgcaccagttcaccaacaccgagacggccaccctcatagagtcctgcaccaacacttgtctaagcactttggacaagcagaccagcacccagactgtggagacgcggacagtagctgtaggagaaggccgtgtcaaggacatcaactcctccaccaagacgcggtccattggtgttggaacgttgctttctggccattctgggtttgacaggccatcagctgtgaagaccaaagagtcaggtgtggggcagataaatattaacgacaactatctggttggtctcaaaatgaggactatagcttgtgggccaccacagttgactgtggggctgacagccagcagaaggagcgtgggggttggggatgaccctgtaggggaatctctggagaacccccagcctcaagctccacttggaatgatgactggcctggatcactacattgagcgtatccagaagctgctggcagaacagcagacactgctggctgagaactacagtgaactggcagaagctttcggggaacctcactcacagatgggctccctcaactctcagctcatcagcaccctgtcgtctatcaactctgtcatgaaatctgcaagcactgaagagctgaggaaccctgacttccagaaaaccagtctgggtaaaatcacaggcaattatttgggatatacctgtaagtgtgggggccttcagtcaggaagtcccttaagctcccagacatcccagcctgagcaagaagtggggacctcagaaggaaagccaatcagcagcctggatgccttccccactcaggaaggtacgctgtctccagtgaacctgacagacgaccagatcgccgctggcctctatgcatgtacaaacaatgaaagtacactgaagtccatcatgaagaagaaagatggtaacaaagattcaaatggcgcaaaaaagaatcttcagtttgttggcattaatggagggtatgaaacaacttcaagtgatgattccagctcagatgaaagctcttcttccgagtcagatgacgagtgtgatgtcattgagtatcctcttgaagaagaggaggaggaggaggatgaagacactcggggaatggcagaagggcaccatgcagttaatattgaaggtttgaagtctgccagggtggaagatgaaatgcaggttcaagaatgtgaacctgagaaggtggaaatcagagagaggtatgaattaagtgaaaagatgttgtctgcatgcaacttactgaaaaatactataaatgaccccaaagctttgaccagcaaagatatgaggttctgtctgaacaccctccagcacgagtggttccgcgtgtccagtcagaagtcagccattccagccatggtgggggactacatagctgcttttgaggccatttccccagatgtcctccgctatgtcatcaacttggcagacggcaacggcaacacagccctccattacagcgtgtcccactccaacttcgagattgtgaagctgctgttagatgccgatgtgtgtaatgtggatcaccagaacaaggcaggctacacccccatcatgttggcggccctcgccgctgtggaagcagagaaggacatgcggattgtggaagaactcttcggctgtggggatgtgaatgccaaagctagtcaggcgggacagacggccctcatgctggcggtcagtcacggacggatagacatggtgaagggccttctggcctgtggggctgatgtcaacatccaggatgacgagggctccacggccctcatgtgtgccagcgagcacggacacgtggagattgtcaagctgctgctggcccagcccggctgcaacggtcacctagaggacaacgatggcagcactgcgctctcaatcgccctggaagcaggacacaaggacatcgctgttcttctgtatgcccatgtcaactttgcaaaagcccagtctccgggcacccctaggcttggaaggaagacgtctcctggccccacccaccgaggttcatttgattgattgtatgcaaatagccctttatttacatgccactattaagctgctaattgttcctgttggggtgacagatactgaatgtatacgtattgtgcctgagctcaccagcaaacagaagcatcaagcccaggggtaaaggctgaagctttcacagtgcagagactgctagcctgggcacacacacctcctttctggccgtcttctgtgtagggcacactttaacccagtctctgttgctgttgagtctctgctccgttttgtacagtcacagggaattctgatctgaaggggcaccttctgttcactcccacaaagtggtgtctggttctcactgagacgttttaagatttttccacaaatatttatatgtactaaatgtggaaccattagaaagttcttccaaaatctcattccagcatagttttggatttttcttttgtcttattttaaaataaggaagtcgagatgactttgatcattggtaacttgggcctgggccagacaaagtataaaacttacaaaagaatattctcatttggtcttaactaggtagatgtaatatatgactttttataaaaagggtatctatatgaacttgacacagtattttcagcttttgtattccatactaaagccatgaagaactacacgtaacatcatcatttgtattaattgcacaactccaatgctaaaggttggattgtgttagaggaatcggctctgtatttgcctctagagaaacacagtgttctctttgtatttatggattcctttttaccgtgtcacatttactttggtcctctatgtatttaaatgtttgaagtgccttagactcttgccatattttcaaaataaaattccattaagctcttt
